(19) United States
(12) Patent Application Publication
(10) Pub. No.: US 2014/0141044 A1
(43) Pub. Date: May 22, 2014

(54) Cord Colitis Syndrome Pathogen

(71) Applicants: Dana-Farber Cancer Institute, Inc., Boston, MA (US); The Broad Institute, Inc., Cambridge, MA (US); The Brigham and Women's Hospital, Inc., Boston, MA (US)

(72) Inventors: Ami S. Bhatt, Jamaica Plain, MA (US); Samuel S. Freeman, Brookline, MA (US); Chandra Sekhar Pedamallu, Belmont, MA (US); Francisco Marty, Chestnut Hill, MA (US); Matthew Meyerson, Concord, MA (US)

(21) Appl. No.: 14/078,314

(22) Filed: Nov. 12, 2013

Related U.S. Application Data
(60) Provisional application No. 61/725,281, filed on Nov. 12, 2012.

(51) Int. Cl. A61K 39/02; C12Q 1/68

(52) U.S. Cl. CPC A61K 39/0208; C12Q 1/6869
USPC 424/234.1; 435/252.1; 435/32; 514/2.4; 435/34; 435/6.11

(57) ABSTRACT

The present invention provides a novel cord colitis syndrome pathogen as well as a method for the discovery of novel viral, prokaryotic or eukaryotic genomes or genomic fragments using a sequencing-based methodology.

### RELATED APPLICATION

[0001] This application claims priority to, and the benefit of the U.S. Provisional Application No. 61/725,281 filed on Nov. 12, 2012, the contents of which are incorporated herein by reference in their entireties.

### FIELD OF THE INVENTION

[0002] The field of the invention relates to a novel cord colitis syndrome pathogen.

### INCORPORATION-BY-REFERENCE

[0003] The contents of the text file named “20363-069001US_ST25.txt”, which is created on Nov. 11, 2013 and is 48,035 KB in size, are hereby incorporated by reference in their entireties.

### BACKGROUND OF THE INVENTION

[0004] Allogeneic human stem-cell transplantation (HSCT) has become a cornerstone of therapy for patients with aggressive and refractory hematologic malignancies. While transplantation represents a potentially curative therapeutic strategy, there are significant complications associated with this form of treatment. Cytotoxic conditioning prior to administration of the stem cells and the immunological sequelae of transplantation and immunosuppression can cause significant morbidity and mortality. Conditioning and antimicrobial therapy can lead to direct toxic effects and alter the gut microbiome, thus predisposing the host to serious infections. Immunosuppression and the limited efficacy of immunologically naïve stem cells can result in life-threatening infectious complications, especially in the first year after transplantation. Despite these challenges, HSCT remains a major part of the treatment armamentarium for a variety of otherwise incurable hematologic diseases.

[0005] A major complication of transplantation is gastrointestinal toxicity, which can manifest clinically as “colitis”. Several types of colitis affect transplantation candidates, including bacteria, viral, parasitic, and immunologic (graft-versus-host disease, or GVHD). Many factors affect the likelihood of developing these different types of colitis including the conditioning regimen, immunosuppressive regimen, the extent of haplotype-matching, and stem-cell source.

[0006] Recently, a syndrome of colitis was described, which appears to be unique to umbilical cord HSCT patients. This “cord colitis syndrome” (CCS) is clinically and histopathologically distinct from other known causes of colitis in transplantation patients. Approximately 10% of patients receiving umbilical cord HSCT at a single center developed this syndrome of nonbloody, frequent stools between three and eleven months after transplantation. Histopathological evaluation of colonic biopsies revealed epithelioid granulomas without evidence of known microbial pathogens, viral cytopathic changes or signs of GVHD. A traditional infectious disease evaluation did not reveal an etiology for this syndrome.

[0007] Despite many studies and hypothesis regarding the etiology of this syndrome, the underlying pathogenesis remains unclear. Thus, there is an urgent need to identify the pathogen that causes this syndrome and an effective antibiotic agent and treatment for this syndrome.

### SUMMARY OF THE INVENTION

[0008] The present invention provides novel pathogens and methods of using these pathogens, as well as methods of identifying a novel viral, prokaryotic or eukaryotic genome or genomic fragments using a sequencing-based methodology.

[0009] The pathogens presented herein include an isolated bacterial strain that includes (i) at least one contiguous overlapping sequence (contig) selected from nucleic acid sequences of SEQ ID NOs: 1-88; (ii) at least one contig selected from nucleic acid sequences of SEQ ID NOs: 94-349; (iii) at least one open reading frame presented herein (SED ID Nos: 351-8212); (iv) a bacterial conjugation operon of SEQ ID NO: 350; (v) a bacterium of ATCC Accession No. PTA-______1; or (vi) a bacterium of ATCC Accession No. PTA-______2.

[0010] Cultures of the bacterial strains of the present invention are stored and maintained on deposit under the provisions of the Budapest Treaty with American Type Culture Collection, Manassas, Va., USA under ATCC Accession No. PTA-______1 and PTA-______2.

[0011] The present invention provides a pharmaceutical composition that includes a therapeutically effective amount of the bacterial strain presented herein.

[0012] The present invention provides a vaccine that includes a therapeutically effective amount of attenuated or inactivated bacterial strain presented herein.

[0013] The present invention provides a method of preventing, treating or alleviating a symptom of cord colitis syndrome in a subject by administering to the subject a therapeutically effective amount of a vaccine presented herein.

[0014] The present invention provides a method of screening for an antibiotic agent against the bacterial strain presented herein by contacting a living bacterium with a candidate antibiotic agent and selecting an antibiotic agent that specifically inhibits growth of the bacterium.

[0015] The present invention provides a method of screening or monitoring water supply, water source, or a water filtration system by obtaining a sample from the water supply, water source, or water filtration system and detecting the presence of the bacterial strain presented herein.

[0016] The present invention provides a method of identifying a novel viral, prokaryotic or eukaryotic genome that includes the steps of (i) collecting a nucleic acid sample from a biological sample obtained from a diseased subject; (ii) performing a genome sequencing of the nucleic acid sample and generating a mix of reads; (iii) identifying one or more unmapped reads; and (iv) assembling the one or more unmapped reads into one or more contigs, thereby identifying a novel viral, prokaryotic or eukaryotic genome. In some embodiment, the step of identifying one or more unmapped reads is carried out by taxonomic classification.

[0017] In any method presented herein, the subject may have a compromised immune system.

[0018] Unless otherwise defined, all technical and scientific terms used herein have the same meaning as commonly understood by one of ordinary skill in the art to which this invention pertains. Although methods and materials similar or equivalent to those described herein can be used in the practice of the present invention, suitable methods and materials are described below. All publications, patent applications, patents, and other references mentioned herein are expressly incorporated by reference in their entirety. In cases of conflict, the present specification, including definitions, will control. In addition, the materials, methods, and examples described herein are illustrative only and are not intended to be limiting.

[0019] Other features and advantages of the invention will be apparent from and encompassed by the following detailed description and claims.

### BRIEF DESCRIPTION OF THE DRAWINGS

[0020] FIG. 1 is a flow chart showing sample selection and experimental procedure. Formalin fixed, paraffin embedded (FFPE) samples were selected for molecular analysis based on clinical criteria. Patients for whom colon biopsies were available in the time period 120 days before and 200 days after CCS-directed antibiotic therapy were selected for inclusion in the studied cohort. DNA extraction and sequencing was followed by PathSeq analysis whereby computational subtraction was applied for the removal of human and known microbial sequences. The remaining unmapped sequencing reads and the reads with homology to known microbial sequences were then computationally assembled into longer contigs representing genomic fragments of a novel organism. Candidate pathogens, predicted by PathSeq analysis of the discovery cohort, were then detected by targeted methods such as the polymerase chain reaction in the validation cohort.

[0021] FIG. 2 is a rooted phylogenetic tree demonstrating the predicted evolutionary relationship between B. enterica and related species, which was constructed by multisequence alignment of 400 core, protein-coding genes.

[0022] FIG. 3 is a circos plot of the draft B. enterica genome assembled using unmappable reads from shotgun WGS of cord colitis samples. The whole linear genome is represented circularly in the middle track in order of descending contig size. A circular contig likely representing a plasmid was excluded from this representation. On the inner track, blue hash marks that are perpendicular to the circular genome plot indicate genes that are present in B. enterica that are not present in B. japonicum USDA 110. On the outer track, the global amino acid sequence identity of each B. enterica protein to its closest B. japonicum homolog is represented.

[0023] FIGS. 4A-4M are a serial of panels demonstrating that B. enterica is more abundant in CCS patients than in normal colon, colon cancer and GVHD controls and is present in colonic biopsies from three additional patients with CCS. The top subpanel in each figure indicates amplification of a B. enterica target after 35 cycles of PCR; the bottom subpanel indicates amplification of a human actin target after 35 cycles of PCR. A no template, negative control is also included. Results of PCR of a no template control (0), (A) five normal colon controls (p1-p5), (B) five colon cancer specimens (c1-c5), (C) three colon biopsies from patients with pathologically diagnosed GVHD (g1-3), and DNA from temporally distinct CCS biopsies from (D) patient four (samples 4a, 4b, 4c, 4e), (E) patient nine (samples 9b, 9c, 9d, 9e, 9f), (F) patient six (samples 6a, 6b) are displayed. Samples are displayed chronologically. Cord colitis syndrome-directed treatment is indicated by colored arrowheads. Microscopical images of colon tissue obtained from a patient with cord colitis are shown, including a section stained with hematoxylin and eosin (G) and a corresponding section (H-K: H lower magnitude with probe EUB; K lower magnitude with probe Brady; J: higher magnitude with probe EUB and K: higher magnitude with probe Brady), along with colon tissue from healthy controls (L and M) stained with either a universal eubacterial probe (EUB, yellow) or a bradyrhizobium-specific probe (Brady) and counterstained with 4′,6-diamidino-2-pheylindole (DAPI, orange).

[0024] FIG. 5 is a diagram showing BLASTN of contigs >2.5 kb generated by the ALLPATHS assembly of nonhuman reads of Samples 5b and 5c. Each contig is subjected to nucleotide BLAST against the NCBI nt database. The top hit was taken for each contig and the organism corresponding to the top hit is indicated on the scatter plot as described in the legend. The x-axis indicates the percentage of the contig that was contained in the top hit and the y-axis indicates the contig size.

[0025] FIG. 6 is a diagram showing GC content, size and read coverage for contigs generated by the ALLPATHS assembly of samples 5b and 5c. Each contig is indicated as a colored circle (the color corresponds to the organism encoded by the top nucleotide BLAST hit as described in FIG. 1). The size of the circle correlates with the relative size of each contig. Percent GC content is indicated on the x-axis and read coverage is indicated on the y-axis.

[0026] FIG. 7 is a histogram indicating the number of predicted B. enterica genes based on percentage global amino acid sequence identity to the closes B. japonicum homolog.

[0027] FIG. 8 is a panel of PCR results of detection of B. enterica. PCR was performed using the conditions indicated in the main text with the exception that 40 cycles of PCR were carried out. Lanes are indicated with red text and correspond to the following: 1. 100 bp MW marker; 2. CC006 (positive control)—middle scroll; 3. CC011—top scroll; 4. CC010—top scroll; 5. Non template control; 6. Hemo-D; 7. Wash 2/3 (bottle 1); 8. Wash 2/3 (bottle 2); 9. Digestion buffer; 10. Wash 1 (bottle 1); 11. Wash 1 (bottle 2); 12. Wash 1 (bottle 3); 13. Isolation additive; 14. Digestion buffer; 15. Nuclease free water.

[0028] FIG. 9 is a series of panels showing PathSeq quantification of viral reads in sequences CCS samples.

[0029] FIG. 10 is a diagram showing Phylogenetic tree (generated using PhyloPhlAn) of B. enterica and related organisms).

[0030] FIG. 11 is a diagram showing the methodological objective of “Reverse microbiology” or sequence based discovery of candidate pathogens in human and animal diseases.

[0031] FIGS. 12A-12D are diagrams showing the steps of “Reverse microbiology” approach presented herein: (A) bulk extraction of DNA (or RNA) from a complex mixture of human cells and microbial cells or particles from a diseased tissue or body fluid specimen; (B) computational subtraction of human reads followed by iterative taxonomic classification of non-human reads; (C) a computational assembly algorithm is used to generate contigs (identify areas of overlap between reads to assemble longer, contiguous read sequences); and (D) the contigs are subjected to a host of tests carried out by a classifying program (such as GAEMR—www.broadinstitute.org/software/gaemr/) in order to determine which contigs likely belong to the same organism.

### DETAILED DESCRIPTION OF THE INVENTION

[0032] The present invention is based upon, in partial, the discovery of novel bacterial species (i.e., Bradyrhizobium species) termed Bradyrhizobium enterica (B. enterica) and Bradyrhizobium enterica-like (B. enterica-like). Accordingly, the present invention provides isolated bacterial strains (e.g., Bradyrhizobium enterica, Bradyrhizobium enterica-like, and bacterial strains that includes a bacterial conjugation operon), the genomic sequence of these novel strains, compositions comprising these novel strains and methods of using these strains and the compositions. The present invention also provides methods for identifying a novel viral, prokaryotic or eukaryotic strain.

[0033] Analysis of shotgun whole genome sequencing (WGS) data from four CCS colon biopsy samples from two patients revealed over 2.5 million unclassifiable high-quality sequencing reads, suggesting the presence of a yet-unidentified microbial organism within the tissue specimens. The nonhuman reads were computationally assembled into a 7.65 Mb draft genome. Ninety-eight of 99 contiguous overlapping sequences (“contigs”) demonstrated homology to Bradyrhizobium species. The organism was named Bradyrhizobium enterica (also called B. enterica, Bradyrhizobium enterica DFCI-1 or B. enterica DFCI-1) based on the results of a rooted phylogenetic analysis. PCR confirmed the presence of B. enterica in three additional CCS patients and demonstrated absence of B. enterica in normal colon, colon cancer and graft-versus-host disease controls.

[0034] This bacterium has never been genomically described before and represents a completely novel species. The association of this bacterium with CCS suggests that B. enterica functions as an opportunistic human pathogen.

[0035] An environmental survey of patient care areas was carried out in order to establish a potential source of the infection and an organism that was similar to, but not identical to B. enterica was identified. This second novel organism (B. enterica-like or Bradyrhizobium colbertium or B. colbertium) was also determined to be in the genus Bradyrhizobium, based on a phylogenetic analysis (FIG. 10).

[0036] Both of these two bacterial species contain a conserved region that encodes a “bacterial conjugation operon” (SEQ ID NO:).

### Bradyrhizobium Strains Polynucleotide Sequences and Encoded Polypeptides

[0037] The sequences of these contigs (SEQ ID NOs: 1-88 and 94-349) are provided in the Sequence Listing as filed herein, the contents of which are hereby incorporated by reference in their entireties.

[0038] Accordingly, the present invention provides an isolated polynucleotide sequence selected from the group consisting of SEQ ID NOs: 1-88 and 94-349, or a fragment thereof. The present invention also provides an isolated polynucleotide sequence (an open reading frame, i.e., an ORF) presented herein (SED ID Nos: 351-8212). A “polynucleotide” is a nucleic acid polymer of ribonucleic acid (RNA), deoxyribonucleic acid (DNA), modified RNA or DNA, or RNA or DNA mimetics (such as PNAs), and derivatives thereof, and homologues thereof. Thus, polynucleotides include polymers composed of naturally occurring nucleobases, sugars and covalent inter-nucleoside (backbone) linkages as well as polymers having non-naturally-occurring portions that function similarly. Such modified or substituted nucleic acid polymers are well known in the art and for the purposes of the present invention, are referred to as “analogues.” Oligonucleotides are generally short polynucleotides from about 10 to up to about 160 or 200 nucleotides.

[0039] A “variant polynucleotide” or a “variant nucleic acid sequence” means a polynucleotide having at least about 60% nucleic acid sequence identity, more preferably at least about 61%, 62%, 63%, 64%, 65%, 66%, 67%, 68%, 69%, 70%, 71%, 72%, 73%, 74%, 75%, 76%, 77%, 78%, 79%, 80%, 81%, 82%, 83%, 84%, 85%, 86%, 87%, 88%, 89%, 90%, 91%, 92%, 93%, 94%, 95%, 96%, 97%, 98% nucleic acid sequence identity and yet more preferably at least about 99% nucleic acid sequence identity with the nucleic acid sequence selected from the group consisting of SEQ ID NOs: 1-88 and 94-349.

[0040] The present invention also provides an isolated peptide or, a fragment thereof, encoded by at least one of the nucleic acid sequences of SEQ ID NOs: 1-88 and 94-349 or by at least one of the open reading frames presented herein (SED ID Nos: 351-8212). Alternatively, the present invention provides an isolated peptide selected from the group consisting of SEQ ID NOs: 8213-16021 or a fragment thereof. A fragment can be between 3-10 amino acids, 10-20 amino acids, 20-40 amino acids, 40-56 amino acids in length or even longer. Amino acid sequences having at least 70% amino acid identity, preferably at least 80% amino acid identity, more preferably at least 90% identity, and most preferably 95% identity to the fragments described herein are also included within the scope of the present invention.

[0041] As used herein, an “isolated” or “purified” nucleotide or polypeptide is substantially free of other nucleotides and polypeptides. Purified nucleotides and polypeptides are also free of cellular material or other chemicals when chemically synthesized. Purified compounds are at least 60% by weight (dry weight) the compound of interest. Preferably, the preparation is at least 75%, more preferably at least 90%, and most preferably at least 99%, by weight the compound of interest. For example, a purified nucleotides and polypeptides is one that is at least 90%, 91%, 92%, 93%, 94%, 95%, 98%, 99%, or 100% (w/w) of the desired oligosaccharide by weight. Purity is measured by any appropriate standard method, for example, by column chromatography, thin layer chromatography, or high-performance liquid chromatography (HPLC) analysis. The nucleotides and polypeptides are purified and used in a number of products for consumption by humans as well as animals, such as companion animals (dogs, cats) as well as livestock (bovine, equine, ovine, caprine, or porcine animals, as well as poultry). “Purified” also defines a degree of sterility that is safe for administration to a human subject, e.g., lacking infectious or toxic agents.

[0042] Similarly, by “substantially pure” is meant a nucleotide or polypeptide that has been separated from the components that naturally accompany it. Typically, the nucleotides and polypeptides are substantially pure when they are at least 60%, 70%, 80%, 90%, 95%, or even 99%, by weight, free from the proteins and naturally-occurring organic molecules with they are naturally associated.

### Recombinant Expression Vectors and Host Cells

[0043] The present invention also provides vectors, preferably expression vectors, containing at least one nucleic acid sequence of SEQ ID NOs: 1-88 and 94-349, at least one ORF presented herein (SED ID Nos: 351-8212), or derivatives, fragments, analogs or homologs thereof. As used herein, the term “vector” refers to a nucleic acid molecule capable of transporting another nucleic acid to which it has been linked. One type of vector is a “plasmid”, which refers to a linear or circular double stranded DNA loop into which additional DNA segments can be ligated. Another type of vector is a viral vector, wherein additional DNA segments can be ligated into the viral genome. Certain vectors are capable of autonomous replication in a host cell into which they are introduced (e.g., bacterial vectors having a bacterial origin of replication and episomal mammalian vectors). Other vectors (e.g., non episomal mammalian vectors) are integrated into the genome of a host cell upon introduction into the host cell, and thereby are replicated along with the host genome. Moreover, certain vectors are capable of directing the expression of genes to which they are operatively linked. Such vectors are referred to herein as “expression vectors”. In general, expression vectors of utility in recombinant DNA techniques are often in the form of plasmids. In the present specification, “plasmid” and “vector” can be used interchangeably as the plasmid is the most commonly used form of vector. However, the invention is intended to include such other forms of expression vectors, such as viral vectors (e.g., replication defective retroviruses, adenoviruses and adeno-associated viruses), which serve equivalent functions. Additionally, some viral vectors are capable of targeting a particular cells type either specifically or non-specifically. An exemplary vector sequence (SEQ ID NO: 89) is provided in the Sequence Listing.

[0044] Another aspect of the invention pertains to host cells into which a recombinant expression vector of the invention has been introduced. The terms “host cell” and “recombinant host cell” are used interchangeably herein. It is understood that such terms refer not only to the particular subject cell but also to the progeny or potential progeny of such a cell. Because certain modifications may occur in succeeding generations due to either mutation or environmental influences, such progeny may not, in fact, be identical to the parent cell, but are still included within the scope of the term as used herein. Additionally, host cells could be modulated once expressing PDX, and may either maintain or loose original characteristics.

[0045] A host cell can be any prokaryotic or eukaryotic cell. For example, any of the polypeptides or polynucleotide sequences of the present invention can be expressed in bacterial cells such as E. coli, insect cells, yeast or mammalian cells (such as Chinese hamster ovary cells (CHO) or COS cells). Alternatively, a host cell can be a premature mammalian cell, i.e., pluripotent stem cell. A host cell can also be derived from other human tissue. Other suitable host cells are known to those skilled in the art.

[0046] Vector DNA can be introduced into prokaryotic or eukaryotic cells via conventional transformation, transduction, infection or transfection techniques. As used herein, the terms “transformation” “transduction”, “infection” and “transfection” are intended to refer to a variety of art recognized techniques for introducing foreign nucleic acid (e.g., DNA) into a host cell, including calcium phosphate or calcium chloride co precipitation, DEAE dextran mediated transfection, lipofection, or electroporation. In addition transfection can be mediated by a transfection agent. By “transfection agent” is meant to include any compound that mediates incorporation of DNA in the host cell, e.g., liposome. Suitable methods for transforming or transfecting host cells can be found in Sambrook, et al. (MOLECULAR CLONING: A LABORATORY MANUAL. 2nd ed., Cold Spring Harbor Laboratory, Cold Spring Harbor Laboratory Press, Cold Spring Harbor, N.Y., 1989), and other laboratory manuals.

[0047] Transfection may be “stable” (i.e. integration of the foreign DNA into the host genome) or “transient” (i.e., DNA is episomally expressed in the host cells).

### Antibodies Against Bradyrhizobium Strains

[0048] The present invention also includes antibodies against strains B. enterica and/or B. enterica-like, alternatively, antibodies against at least one peptide encoded by any one of the sequences of SEQ ID NOs: 1-88 and 94-349, against at least one peptide encoded by any one of the ORFs (SED ID Nos: 351-8212), against at least one peptide selected from the group consisting of SEQ ID NOs: 8213-16021 or a fragment thereof, as well as against their muteins, fused proteins, salts, functional derivatives and active fractions. The term “antibody” is meant to include polyclonal antibodies, monoclonal antibodies (MAbs), chimeric antibodies, anti-idiotypic (anti-Id) antibodies to antibodies that can be labeled in soluble or bound form, and humanized antibodies as well as fragments thereof provided by any known technique, such as, but not limited to enzymatic cleavage, peptide synthesis or recombinant techniques.

[0049] Polyclonal antibodies are heterogeneous populations of antibody molecules derived from the sera of animals immunized with an antigen. A monoclonal antibody contains a substantially homogeneous population of antibodies specific to antigens, which population contains substantially similar epitope binding sites. MAbs may be obtained by methods known to those skilled in the art. See, for example Kohler and Milstein, Nature 256:495-497 (1975); U.S. Pat. No. 4,376,110; Ausubel et al, eds., supra, Harlow and Lane, ANTIBODIES: A LABORATORY MANUAL, Cold Spring Harbor Laboratory (1988); and Colligan et al., eds., Current Protocols in Immunology, Greene Publishing Assoc. and Wiley Interscience, N.Y., (1992, 1993), the contents of which references are incorporated entirely herein by reference. Such antibodies may be of any immunoglobulin class including IgG, IgM, IgE, IgA, GILD and any subclass thereof. A hybridoma producing a MAb of the present invention may be cultivated in vitro, in situ or in vivo. Production of high titers of MAbs in vivo or in situ makes this the presently preferred method of production.

[0050] Chimeric antibodies are molecules, different portions of which are derived from different animal species, such as those having the variable region derived from a murine MAb and a human immunoglobulin constant region. Chimeric antibodies are primarily used to reduce immunogenicity in application and to increase yields in production, for example, where murine MAbs have higher yields from hybridomas but higher immunogenicity in humans, such that human/murine chimeric MAbs are used. Chimeric antibodies and methods for their production are known in the art (Cabilly et al, Proc. Natl. Acad. Sci. USA 81:3273-3277 (1984); Morrison et al., Proc. Natl. Acad. Sci. USA 81:6851-6855 (1984); Boulianne et al., Nature 312:643-646 (1984); Cabilly et al., European Patent Application 125023 (published Nov. 14, 1984); Neuberger et al., Nature 314:268-270 (1985); Taniguchi et al., European Patent Application 171496 (published Feb. 19, 1985); Morrison et al., European Patent Application 173494 (published Mar. 5, 1986); Neuberger et al., PCT Application WO 8601533, (published Mar. 13, 1986); Kudo et al., European Patent Application 184187 (published Jun. 11, 1986); Morrison et al., European Patent Application 173494 (published Mar. 5, 1986); Sahagan et al., J. Immunol. 137:1066-1074 (1986); Robinson et al., International Patent Publication, WO 9702671 (published 7 May 1987); Liu et al., Proc. Natl. Acad. Sci. USA 84:3439-3443 (1987); Sun et al., Proc. Natl. Acad. Sci. USA 84:214-218 (1987); Better et al., Science 240:1041-1043 (1988); and Harlow and Lane, ANTIBODIES: A LABORATORY MANUAL, supra. These references are entirely incorporated herein by reference.

[0051] An anti-idiotypic (anti-Id) antibody is an antibody, which recognizes unique determinants generally, associated with the antigen-binding site of an antibody. An Id antibody can be prepared by immunizing an animal of the same species and genetic type (e.g., mouse strain) as the source of the MAb with the MAb to which an anti-Id is being prepared. The immunized animal will recognize and respond to the idiotypic determinants of the immunizing antibody by producing an antibody to these idiotypic determinants (the anti-Id antibody). See, for example, U.S. Pat. No. 4,699,880, which is herein entirely incorporated by reference.

[0052] The anti-Id antibody may also be used as an “immunogen” to induce an immune response in yet another animal, producing a so-called anti-anti-Id antibody. The anti-anti-Id may be epitopically identical to the original MAb, which induced the anti-Id. Thus, by using antibodies to the idiotypic determinants of a MAb, it is possible to identify other clones expressing antibodies of identical specificity.

[0053] Accordingly, MAbs generated against any peptides of a pathogen described herein (e.g., B. enterica, B. enterica-like) and related proteins of the present invention may be used to induce anti-Id antibodies in suitable animals, such as BALB/c mice. Spleen cells from such immunized mice are used to produce anti-Id hybridomas secreting anti-Id Mabs. Further, the anti-Id Mabs can be coupled to a carrier such as keyhole limpet hemocyanin (KLH) and used to immunize additional BALB/c mice. Sera from these mice will contain anti-anti-Id antibodies that have the binding properties of the original MAb specific for a B. enterica epitope, a B. enterica-like epitope or an epitope for both strains.

[0054] The term “humanized antibody” is meant to include e.g. antibodies which were obtained by manipulating mouse antibodies through genetic engineering methods so as to be more compatible with the human body. Such humanized antibodies have reduced immunogenicity and improved pharmacokinetics in humans. They may be prepared by techniques known in the art, such as described, e.g. for humanzied anti-TNF antibodies in Molecular Immunology, Vol. 30, No. 16, pp. 1443-1453, 1993.

[0055] The term “antibody” is also meant to include both intact molecules as well as fragments thereof, such as, for example, Fab and F(ab′)₂, which are capable of binding antigen Fab and F(ab′)₂ fragments lack the Fc fragment of intact antibody, clear more rapidly from the circulation, and may have less non-specific tissue binding than an intact antibody (Wahl et al., J. Nucl. Med. 24:316-325 (1983)). It will be appreciated that Fab and F(ab′)₂ and other fragments of the antibodies useful in the present invention may be used for the detection and quantitation of an IL-18BP or a viral IL-18BP, according to the methods disclosed herein for intact antibody molecules. Such fragments are typically produced by proteolytic cleavage, using enzymes such as papain (to produce Fab fragments) or pepsin (to produce F(ab′)₂ fragments).

[0056] An antibody is said to be “capable of binding” a molecule if it is capable of specifically reacting with the molecule to thereby bind the molecule to the antibody. The term “epitope” is meant to refer to that portion of any molecule capable of being bound by an antibody which can also be recognized by that antibody. Epitopes or “antigenic determinants” usually consist of chemically active surface groupings of molecules such as amino acids or sugar side chains and have specific three dimensional structural characteristics as well as specific charge characteristics.

[0057] An “antigen” is a molecule or a portion of a molecule capable of being bound by an antibody which is additionally capable of inducing an animal to produce antibody capable of binding to an epitope of that antigen. An antigen may have one or more than one epitope. The specific reaction referred to above is meant to indicate that the antigen will react, in a highly selective manner, with its corresponding antibody and not with the multitude of other antibodies which may be evoked by other antigens.

[0058] The antibodies, including fragments of antibodies, useful in the present invention may be used to detect bacteria described herein (e.g., B. enterica, B. enterica-like) quantitatively or qualitatively, or related proteins in a sample or to detect presence of cells, which express such proteins of the present invention. This can be accomplished by immunofluorescence techniques employing a fluorescently labeled antibody coupled with light microscopic, flow cytometric, or fluorometric detection.

Bradyrhizobium enterica Strain

[0059] The present invention also provides an isolated B. enterica strain comprising at least one (e.g., 1, 2, 3, 4, 5, 6, 7, 8, 9, 10, 11, 12, 13, 14, 15, 16, 17, 18, 19, 20, 21, 22, 23, 24, 25, 26, 27, 28, 29, 30, 31, 32, 33, 34, 35, 36, 37, 38, 39, 40, 41, 42, 43, 44, 45, 46, 47, 48, 49, 50, 51, 52, 53, 54, 55, 56, 57, 58, 59, 60, 61, 62, 63, 64, 65, 66, 67, 68, 69, 70, 71, 72, 73, 74, 75, 76, 77, 78, 79, 80, 81, 82, 83, 84, 85, 86, 87, or 88) contig selected from the group consisting of nucleic acid sequences of SEQ ID NOs: 1-88.

[0060] Alternatively, the present invention provides an isolated B. enterica strain of ATCC Accession No. PTA-______1. Cultures of the bacterial strains of the present invention are stored and maintained on deposit under the provisions of the Budapest Treaty with American Type Culture Collection, Manassas, Va., USA under ATCC Accession No. PTA-______1.

[0061] The present invention further provides an isolated strain that includes a bacterial conjugation operon having a nucleic acid sequence presented herein (SEQ ID NO: 350).

[0062] An “isolated” microorganism (such as an isolated B. enterica) has been substantially separated or purified away from microorganisms of different types, strains, or species. Microorganisms can be isolated by a variety of techniques, including serial dilution and culturing.

[0063] The present invention further provides a pharmaceutical composition comprising a therapeutically effective amount of inactivated or attenuated B. enterica or bacterial strain that includes a bacterial conjugation operon having a nucleic acid sequence presented herein (SEQ ID NO: 350).

Bradyrhizobium enterica-like (B. colbertium) Strain

[0064] The present invention also provides an isolated B. enterica-like strain (B. colbertium) comprising at least one (e.g., 1, 2, 3, 4, 5, 6, 7, 8, 9, 10, 11, 12, 13, 14, 15, 16, 17, 18, 19, 20, 21, 22, 23, 24, 25, 26, 27, 28, 29, 30, 31, 32, 33, 34, 35, 36, 37, 38, 39, 40, 41, 42, 43, 44, 45, 46, 47, 48, 49, 50, 51, 52, 53, 54, 55, 56, 57, 58, 59, 60, 61, 62, 63, 64, 65, 66, 67, 68, 69, 70, 71, 72, 73, 74, 75, 76, 77, 78, 79, 80, 81, 82, 83, 84, 85, 86, 87, 88, 89, 90, 91, 92, 93, 94, 95, 96, 97, 98, 99, 100, 101, 102, 103, 104, 105, 106, 107, 108, 109, 110, 111, 112, 113, 114, 115, 116, 117, 118, 119, 120, 121, 122, 123, 124, 125, 126, 127, 128, 129, 130, 131, 132, 133, 134, 135, 136, 137, 138, 139, 140, 141, 142, 143, 144, 145, 146, 147, 148, 149, 150, 151, 152, 153, 154, 155, 156, 157, 158, 159, 160, 161, 162, 163, 164, 165, 166, 167, 168, 169, 170, 171, 172, 173, 174, 175, 176, 177, 178, 179, 180, 181, 182, 183, 184, 185, 186, 187, 188, 189, 190, 191, 192, 193, 194, 195, 196, 197, 198, 199, 200, 201, 202, 203, 204, 205, 206, 207, 208, 209, 210, 211, 212, 213, 214, 215, 216, 217, 218, 219, 220, 221, 222, 223, 224, 225, 226, 227, 228, 229, 230, 231, 232, 233, 234, 235, 236, 237, 238, 239, 240, 241, 242, 243, 244, 245, 246, 247, 248, 249, 250, 251, 252, 253, 254, 255 or 256) contig selected from the group consisting of nucleic acid sequences of SEQ ID NOs: 94-349.

[0065] The present invention also present an isolated B. enterica-like strain comprising at least one ORF presented herein (SED ID Nos: 351-8212).

[0066] Alternatively, the present invention provides an isolated B. colbertium strain of ATCC Accession No. PTA-______2. Cultures of the bacterial strains of the present invention are stored and maintained on deposit under the provisions of the Budapest Treaty with American Type Culture Collection, Manassas, Va., USA under ATCC Accession No. PTA-______2.

[0067] An “isolated” microorganism (such as an isolated B. enterica-like) has been substantially separated or purified away from microorganisms of different types, strains, or species. Microorganisms can be isolated by a variety of techniques, including serial dilution and culturing.

[0068] The present invention further provides a pharmaceutical composition comprising a therapeutically effective amount of inactivated or attenuated B. enterica-like.

### Vaccine Compositions

[0069] Also provided herein are vaccine compositions or immunogenic compositions comprising a therapeutically effective amount of inactivated or attenuated i) B. enterica; ii) B. enterica-like; iii) bacterial strains that include a bacterial conjugation having a nucleic acid sequence presented herein (SEQ ID NO: 350); or iv) any combination thereof.

[0070] A “therapeutically effective amount” of attenuated such strain(s) is an amount effective to induce an immunogenic response in the recipient. In some examples, the immunogenic response is adequate to inhibit (including prevent) or ameliorate signs or symptoms of disease (such as cord colitis syndrome), including adverse health effects or complications thereof, caused by infection with bacterial strains described herein (such as wild type B. enterica and/or B. enterica-like and/or bacterial strains having a bacterial conjugation operon). Either humoral immunity or cell-mediated immunity or both can be induced by the attenuated bacterial strains (for example in an immunogenic composition) disclosed herein. Signs and symptoms of cord colitis syndrome includes watery diarrhea.

[0071] The term “inactivation” or “inactivated” as described herein refers to treatment with inactivation agent, heat treatment, and other general methods to inactivate or kill the bacteria. The inactivation agent includes, but is not limited to, formaldehyde, binary ethyleneimine (BEI) or other suitable inactivation agents.

[0072] Attenuated bacterium refers to a bacterium having a decreased or weakened ability to produce disease (for example having reduced pathogenesis of cord colitis syndrome) while retaining the ability to stimulate an immune response like that of the natural (or wild-type) bacterium.

[0073] Attenuated vaccine refers to an immunogenic composition that includes attenuated bacteria (such as attenuated B. enterica, B. enterica-like).

[0074] Bacteria used for the vaccine may be purified prior to admixture with other formulation ingredients. The term “purified” does not require absolute purity; rather, it is intended as a relative term. Thus, for example, a purified attenuated B. enterica preparation is one in which the bacteria are more enriched than the bacteria are in its natural environment (for example within a cell). In one example, a preparation is purified such that the purified bacteria represent at least 50% of the total content of the preparation. In other examples, bacteria are purified to represent at least 90%, such as at least 95%, or even at least 98%, of all macromolecular species present in a purified preparation.

[0075] Such purified preparations can include materials in covalent association with the active agent, such as glycoside residues or materials admixed or conjugated with the active agent, which may be desired to yield a modified derivative or analog of the active agent or produce a combinatorial therapeutic formulation, conjugate, fusion protein or the like.

[0076] The present invention provides another vaccine composition. Such vaccine composition comprises at least one DNA contig selected from the group consisting of nucleic acid sequences of SEQ ID NOs: 1-88 and 94-349, at least one ORF presented herein (SED ID Nos: 351-8212) or a fragment thereof. Alternatively, the vaccine composition comprises at least one peptide encoded by a nucleic acid sequence selected from the group of SEQ ID NOs: 1-88 and 94-349 and ORFs presented herein (SED ID Nos: 351-8212). A person skilled in the art will be able to select preferred peptides, polypeptides, nucleic acid sequences or combination of thereof by testing. Usually, the most efficient peptides are then combined as a vaccine. A suitable vaccine will preferably contain between 1 and 20 peptides, more preferably 2, 3, 4, 5, 6, 7, 8, 9, 10, 11, 12, 13, 14, 15, 16, 17, 18, 19, or 20 different peptides, further preferred 6, 7, 8, 9, 10 11, 12, 13, or 14 different peptides, and most preferably 12, 13 or 14 different peptides. Alternatively, a suitable vaccine will preferably contain between 1 and 20 nucleic acid sequences, more preferably 2, 3, 4, 5, 6, 7, 8, 9, 10, 11, 12, 13, 14, 15, 16, 17, 18, 19, or 20 different nucleic acid sequences, further preferred 6, 7, 8, 9, 10 11, 12, 13, or 14 different nucleic acid sequences, and most preferably 12, 13 or 14 different nucleic acid sequences.

[0077] Any vaccine of the present invention can be a prophylactic vaccine or a therapeutic vaccine.

[0078] Any vaccine composition of the present invention may further comprise a pharmaceutical carrier, adjuvant or other co-ingredient. An adjuvant is a compound, composition, or substance that when used in combination with an immunogenic agent (such as the attenuated B. enterica bacteria disclosed herein) augments or otherwise alters or modifies a resultant immune response. In some examples, an adjuvant increases the titer of antibodies induced in a subject by the immunogenic agent. In another example, if the antigenic agent is a multivalent antigenic agent, an adjuvant alters the particular epitopic sequences that are specifically bound by antibodies induced in a subject.

[0079] Exemplary adjuvants include, but are not limited to, Freund's Incomplete Adjuvant (IFA), Freund's complete adjuvant, B30-MDP, LA-15-PH, montanide, saponin, aluminum salts such as aluminum hydroxide (Amphogel, Wyeth Laboratories, Madison, N.J.), alum, lipids, keyhole lympet protein, hemocyanin, the MF59 microemulsion, a mycobacterial antigen, vitamin E, non-ionic block polymers, muramyl dipeptides, polyanions, amphipatic substances, ISCOMs (immune stimulating complexes, such as those disclosed in European Patent EP 109942), vegetable oil, Carbopol, aluminium oxide, oil-emulsions (such as Bayol F or Marcol 52), E. coli heat-labile toxin (LT), Cholera toxin (CT), and combinations thereof.

[0080] The pharmaceutically acceptable vehicle or carrier includes, but is not limited to, solvent, emulsifier, suspending agent, decomposer, binding agent, excipient, stabilizing agent, chelating agent, diluent, gelling agent, preservative, lubricant, surfactant, adjuvant or other suitable vehicle.

### Methods of Use

[0081] The compositions of the present invention are candidates for treating or preventing certain conditions and diseases, particularly conditions and diseases associated with allogeneic human stem-cell transplantation or cancer. These compositions include: (1) an isolated polynucleotide selected from the group consisting of SEQ ID NOs: 1-88 and 94-349 and ORFs presented herein (SED ID Nos: 351-8212), or a fragment thereof; (2) an isolated peptide or, a fragment thereof, encoded by at least one of the nucleic acid sequences of SEQ ID NOs: 1-88 and 94-349 and ORFs presented herein (SED ID Nos: 351-8212); (3) an isolated pathogen (B. enterica, B. enterica-like or bacterial strain that includes a bacterial conjugation operon having a nucleic acid sequence presented herein (SEQ ID NO: 350); (4) a vector or a cell expressing at least one contig selected from the group consisting of nucleic acid sequences of SEQ ID NOs: 1-88 and 94-349 and ORFs presented herein (SED ID Nos: 351-8212); (5) a pharmaceutical composition comprising a therapeutically effective amount of one or more bacterial strains described herein or attenuated/inactivated one or more bacterial strains described herein; (6) a vaccine or an immunogenic composition comprising a therapeutically effective amount of one or more bacterial strains described herein or attenuated/inactivated one or more bacterial strains described herein.

[0082] This invention provides methods for eliciting an immune response against at least one bacterial strain described herein in a subject. The method includes administering to a subject a therapeutically effective amount of the attenuated bacteria disclosed herein (preferably in the form of an immunogenic composition or a vaccine), thereby eliciting an immune response against the bacteria in the subject.

[0083] The present invention also provides methods for treating or alleviating a symptom of conditions or disorders associated with allogeneic human stem-cell transplantation or cancer. The method includes administering to a subject, a therapeutically effective amount of a composition of the present invention.

[0084] The present invention also provides methods for preventing at least one symptom of conditions or disorders associated with allogeneic human stem-cell transplantation or cancer. The method includes administering to a subject, a therapeutically effective amount of a composition of the present invention.

[0085] The present invention further provides uses of the compositions of the present invention for the preparation of a medicament useful for the treatment of conditions or disorders associated with allogeneic human stem-cell transplantation or cancer.

[0086] The present invention further provides uses of the compositions of the present invention for the preparation of a medicament useful for the prevention of conditions or disorders associated with allogeneic human stem-cell transplantation or cancer.

[0087] As used herein, “preventing” or “prevent” describes reducing or eliminating the onset of the symptoms or complications (such as watery diarrhea) of the disease, condition or disorder associated with allogeneic human stem-cell transplantation.

[0088] One preferred disorder associated with allogeneic human stem-cell transplantation is cord colitis syndrome. Another preferred condition associated with allogeneic human stem-cell transplantation is B. enterica infection or B. enterica-like infection or an infection caused by ant pathogen described herein.

[0089] As used herein, a “subject” includes a mammal. The mammal can be e.g., a human or appropriate non-human mammal, such as primate, mouse, rat, dog, cat, cow, horse, goat, camel, sheep or a pig. The subject can also be a bird or fowl. In one embodiment, the mammal is a human. A subject can be male or female.

[0090] A subject can be one who had allogeneic human stem-cell transplantation or cancer. A subject can also be one who is having or will have allogeneic human stem-cell transplantation or cancer. A subject can be one who is previously infected with B. enterica or B. enterica-like or any pathogen described herein. A subject can be one who has B. enterica or B. enterica-like infection or an infection caused by any pathogen described herein. A subject can also be one who has rick of being infected with B. enterica or B. enterica-like or any pathogen described herein. A subject may have cord colitis syndrome. A subject may have comprised immune system.

[0091] A comprised immune system, also called immunodeficiency (or immune deficiency), is a state in which the immune system's ability to fight infectious disease is compromised or entirely absent. Most cases of immunodeficiency are acquired (“secondary”) but some people are born with defects in their immune system, or primary immunodeficiency. Transplant patients take medications to suppress their immune system as an anti-rejection measure. A person who has an immunodeficiency of any kind is said to be immunocompromised. An immunocompromised person may be particularly vulnerable to opportunistic infections, in addition to normal infections that could affect everyone.

[0092] The vaccines are administered in a manner compatible with the dosage formulation, and in such amount as will be therapeutically effective and immunogenic. The quantity to be administered depends on the subject to be treated, including, e.g., the capacity of the individual's immune system to mount an immune response, and the degree of protection desired. Suitable dosage ranges are of the order of several hundred micrograms active ingredient per vaccination with a preferred range from about 0.1 ug to 1000 ug, such as in the range from about 1 ug to 300 ug, and especially in the range from about 10 ug to 50 ug. Suitable regimens for initial administration and booster shots are also variable but are typified by an initial administration followed by subsequent inoculations or other administrations.

[0093] The manner of application may be varied widely. Any of the conventional methods for administration of a vaccine are applicable such as oral application on a solid physiologically acceptable base or in a physiologically acceptable dispersion, parenterally, by injection or the like. The dosage of the vaccine will depend on the route of administration and will vary according to the age of the person to be vaccinated and, to a lesser degree, the size of the person to be vaccinated.

[0094] The vaccines are conventionally administered parenterally, by injection, for example, either subcutaneously or intramuscularly. Additional formulations which are suitable for other modes of administration include suppositories and, in some cases, oral formulations. For suppositories, traditional binders and carriers may include, for example, polyalkylene glycols or triglycerides; such suppositories may be formed from mixtures containing the active ingredient in the range of 0.5% to 10%, preferably 1-2%. Oral formulations include such normally employed excipients as, for example, pharmaceutical grades of mannitol, lactose, starch, magnesium stearate, sodium saccharine, cellulose, magnesium carbonate, and the like. These compositions take the form of solutions, suspensions, tablets, pills, capsules, sustained release formulations or powders and advantageously contain 10-95% of active ingredient, preferably 25-70%.

[0095] In many instances, it will be necessary to have multiple administrations of the vaccine. Especially, vaccines can be administered to prevent an infection with B. enterica or B. enterica-like, a prophylactic vaccine, and/or to treat established B. enterica or B. enterica-like infection, a therapeutic vaccine. When administered to prevent an infection, the vaccine is given prophylactically, before definitive clinical signs, diagnosis or identification of an infection is present. Prophylactic vaccines may also be designed to be used as booster vaccines. Such booster vaccines are given to individuals who have previously received a vaccination, with the intention of prolonging the period of protection. In instances where the individual has already become infected or is suspected to have become infected, the previous vaccination may have provided sufficient immunity to prevent primary disease, but as discussed previously, boosting this immune response will not help against the latent infection. In such a situation, the vaccine will necessarily have to be a therapeutic vaccine designed for efficacy against the latent stage of infection. A combination of a prophylactic vaccine and a therapeutic vaccine, which is active against both primary and latent infection, constitutes a multiphase vaccine.

[0096] The present invention also relates to a method of diagnosing any conditions or disorders associated with a bacterial strain described herein (e.g., B. enterica, B. enterica-like), such as cord colitis syndrome. The method includes steps of obtaining a sample from the subject and detecting the presence of a pathogen (e.g., bacterium) described herein (protein or DNA level). The presence of such pathogen (e.g., bacterium) indicates the subject has cord colitis syndrome or is at a risk of developing cord colitis syndrome.

[0097] By “sample” it means any biological sample derived from the subject, includes but is not limited to, cells, tissues samples, and body fluids (including, but not limited to, mucus, blood, plasma, serum, urine, saliva, and semen).

[0098] The detecting step can be carried out by any methods known in the art for determining the presence of protein or DNA of a pathogen described herein (for example, B. enterica, B. enterica-like) in the sample, such as Western Blot analysis, PCR analysis, immunohistochemistry, or any solid-phase detection methods. Exemplary agents that can be used for the detecting steps include an antibody (a monoclonal or polyclonal antibody) against B. enterica/B. enterica-like, a nucleic acid fragment and/or a polypeptide encoded by a nucleic acid fragment of B. enterica/B. enterica-like genome.

[0099] The present invention further provides a method of screening for an antibiotic agent, particularly an antibiotic agent specifically against a bacterial strain described herein (such as B. enterica, B. enterica-like). The method includes steps of contacting a living bacterium with a candidate antibiotic agent and selecting an antibiotic agent that specifically inhibits protein synthesis, cell growth cell division and/or cell viability of the tested bacterium. The phrase “an antibiotic agent specifically against a bacterial strain described herein” means the inhibitory effect of the antibiotic agent screened herein on the bacterial strain described herein is considerably greater than its inhibitory effect on other bacteria species.

[0100] The pathogen (e.g., B. enterica, B. enterica-like) is cultured in the absence or presence of the candidate antibiotic agent. At a variety of time points after treatment, protein synthesis, cell growth, cell division and/or cell viability will be assayed according to any methods available in the art, thereby screening for a pathogen selective antibiotic agent.

[0101] An antibiotic agent that prevents or disrupts protein synthesis may completely prevent protein synthesis, as defined by 98-100% loss of synthesized labeled protein as analyzed on an SDS-polyacrylamide gel or other methods available in the art. An antibiotic agent that partially inhibits protein synthesis is determined by at least, up to, and including 10%, 15%, 20%, 25%, 40%, 50%, 75%, 98% of loss of synthesized labeled protein as analyzed on an SDS-polyacrylamide gel or alternatively by an assay of uptake of labeled amino acids into a polypeptide chain that can be precipitated or trapped on a filter or other methods available in the art.

[0102] Further, an antibiotic agent that prevents or disrupts cell growth may completely prevent cell growth as defined by 98-100% retention of the same cell size without an increase in the cell size as observed by light microscopy or other methods available in the art. An antibiotic agent that partially inhibits cell growth is determined by at least, up to, and including 10%, 15%, 20%, 25%, 40%, 50%, 75%, 98% of the same cell size without an increase in the cell size.

[0103] Further, an antibiotic agent that prevents or disrupts cell division may completely prevent cell division as defined by 98-100% retention of the same cell number without an increase in cell number over time as judged by microscopy of the cells or other methods available in the art. An antibiotic agent that partially inhibits cell division is determined by at least, up to, and including 10%, 15%, 20%, 25%, 40%, 50%, 75%, 98% of the same cell number without an increase in cell number as judged by microscopy of the cells or other methods available in the art.

[0104] Still further, an antibiotic agent that prevents or disrupts cell viability may completely prevent cell viability as defined by 98-100% cell death as indicated by incorporation of Trypan Blue into the cells in a cell culture analyzed under microscope or other methods available in the art. An antibiotic agent that partially inhibits cell viability is determined by at least, up to, and including 10%, 15%, 20%, 25%, 40%, 50%, 75%, 98% of the loss of viability of the cell in a cell culture as indicated by increase of Trypan Blue stained cells or other methods available in the art.

[0105] A candidate antibiotic agent that can be tested for according to the invention include any recombinant, modified or natural nucleic acid molecule including anti-sense oligonucleotides; library of recombinant, modified or natural nucleic acid molecules; organic or inorganic compound; library of organic or inorganic compounds where the agent has the capacity to inhibit protein synthesis, cell growth, cell division and/or cell viability of B. enterica.

[0106] Test compounds for use in high-throughput screening methods may be found in large libraries of synthetic or natural substances. Numerous means are currently used for random and directed synthesis of saccharide, peptide, and nucleic acid-based compounds. Synthetic compound libraries are commercially available from Maybridge Chemical Co. (Trevillet, Cornwall, UK), Comgenex (Princeton, N.J.), Brandon Associates (Merrimack, N.H.), and Microsource (New Milford, Conn.). A rare chemical library is available from Aldrich (Milwaukee, Wis.). In addition, there exist methods for generating combinatorial libraries based on peptides, oligonucleotides, and other organic compounds (Baum, C&EN, Feb. 7, 1994, page 20-26). Alternatively, libraries of natural compounds in the form of bacterial, fungal, plant and animal extracts are available from e.g. Pan Labs (Bothell, Wash.) or MycoSearch (NC), or are readily producible. Additionally, natural and synthetically produced libraries and compounds are readily modified through conventional chemical, physical, and biochemical means.

[0107] An antibiotic agent such as an antisense oligonucleotide or organic or inorganic small molecule may be administered in a eukaryotic host infected with a pathogenic agent as necessary. The antibiotic agent may be administered to, for example, a mammal, orally, cutaneously, subcutaneously, intramuscularly, intravenously, or may be inhaled as aerosols in pharmacologically suitable media daily, weekly, monthly as determined necessary in varying dosages. Administration of an antibiotic agent to, for example, a plant, may be direct spraying onto a plant or into the soil in a suitable liquid or solid medium.

[0108] Administration of, for example, small organic or inorganic molecule therapeutic agents in an individual infected with a pathogenic agent will vary depending on the potency of the small organic or inorganic molecule. For a very potent small organic or inorganic molecule inhibitor, nanogram (ng) amounts kilogram (kg) of patient, or microgram (ug) amounts per kg of patient may be sufficient. Thus, for small organic molecules, peptides, or peptoids (also called peptodimimetics), the dosage range can be for example, from about 100 ng/kg to about 500 mg/kg of patient weight, or the dosage range can be a range within this broad range, for example, about 100 ng/kg to 400 ng/kg, from about 500 ng/kg to about 1 ug/kg, from about 5 ug/kg to about 100 ug/kg, from about 150 ug/kg to about 500 ug/kg, from about 600 ug/kg to about 1 mg/kg, or from about 25 mg/kg, to about 500 mg/kg of patient weight.

[0109] The individual doses for viral gene delivery vehicles for delivery of polynucleotide inhibitors, such as antisense molecules, normally used are 107 to 109 colony forming units (c.f.u of neomycin resistance titered on HT1080 cells) per body. Dosages for, for example, adeno-associated virus (AAV) containing delivery systems are in the range of about 109 to about 1011 particles per body. Dosage of nonviral gene delivery vehicles can be 1 ug, preferably at least 5 or 10 ug, and more preferably at least 50 or 100 ug of polynucleotide, providing one or more dosages.

[0110] In all cases, routine experimentation in clinical trials will determine specific ranges for optimal therapeutic effect, for each therapeutic and each administrative protocol, and administration to specific patients will also be adjusted to within effective and safe ranges depending on the patients' condition and responsiveness to initial administrations.

[0111] All of the antibiotic agents discovered by the methods according to the present invention can be incorporated into an appropriate pharmaceutical composition that includes a pharmaceutically acceptable carrier for the agent. The pharmaceutical carrier for the agents may be the same or different for each agent. Suitable carriers may be large, slowly metabolized macromolecules such as proteins, polysaccharides, polylactic acids, polyglycolic acids, polymeric amino acids, amino acid copolymers, and inactive viruses in particles. Such carriers are well known to those of ordinary skill in the art. Pharmaceutically acceptable salts can be used therein, for example, mineral acid salts such as hydrochlorides, hydrobromides, phosphates, sulfates, and the like; an the salts of organic acids such as acetates, propionates, malonates, benzoates, and the like. A thorough discussion of pharmaceutically acceptable excipients is available in REMINGTON′S PHARMACEUTICAL SCIENCES (Mack Pub. Co., N.J. 1991). Pharmaceutically acceptable carriers in therapeutic compositions may contain liquids such as water, saline, glycerol and ethanol. Additionally, auxiliary substances, such as wetting or emulsifying agents, pH buffering substances, and the like, may be present in such vehicles. Typically, the therapeutic compositions are prepared as injectables, either as liquid solutions or suspensions; solid forms suitable for solution in, or suspension in, liquid vehicles prior to injection may also be prepared. Liposomes are included within the definition of a pharmaceutically acceptable carrier. Liposomes are described in U.S. Pat. Nos. 5,422,120 and 4,762,915, WO 95/13796, WO 94/23697, WO 91/144445 and EP 524,968, and in Starrier, Biochemistry, pages 236-240 (1975) W. H. Freeman, San Francisco, Shokai, Biochem. Biophys. Acct. 600:1 (1980); Bayer, Biochem Biophys Acct 550:464 (1979); Rivet, Meth. Enzyme. 149:119 (1987); Wang, Proc. Natl. Acad. Sci. 84:785: (1987); and Plant, Anal. Biochem 176:420 (1989).

[0112] The pharmaceutically acceptable carrier or diluent may be combined with other agents to provide a composition either as a liquid solution, or as a solid form (e.g., lyophilized) which can be resuspended in a solution prior to administration. The composition can be administered by parenteral or nonparenteral routes. Parenteral routes can include local injection into an organ or space of the body or systemic injection including intravenous, intraarterial injections or other systemic routes of administration. Nonparenteral routes can include oral administration.

[0113] The present invention also provides a method for treating an infection associated with allogeneic human stem-cell transplantation, such as an infection caused by any pathogen described herein (e.g., B. enterica, B. enterica-like). The method comprises administering an antibiotic agent screened according to the method disclosed herein to a subject suspect of or infected by a pathogen (e.g., B. enterica, B. enterica-like) in an amount sufficient to reduce or prevent the infection.

[0114] Further provided by the present invention is a method of screening or monitoring water supply, water source, or a water filtration system. The method comprises steps of obtaining a sample from the water supply, water source, or water filtration system and detecting the presence of i) bacterial conjugation operon (SEQ ID NO: 350) or a fragment thereof; or ii) protein or DNA or a fragment thereof of B. enterica and/or B. enterica-like. Preferably, the water supply, water source or water filtration system screened and/or monitored herein is located in a hospital. More preferably, the water supply, water source or water filtration system screened and/or monitored herein is used for a subject who has a comprised immune system.

[0115] Any methods available in the art that are suitable for detecting i) bacterial conjugation operon (SEQ ID NO: 350) or a fragment thereof; or ii) protein or DNA or a fragment thereof of B. enterica and/or B. enterica-like can be used. For example, it can be detected by an antibody (monoclonal or polyclonal) against B. enterica/B. enterica-like. Alternatively, it can be detected by an isolated oligonucleotide that is specific to bacterial conjugation operon (or a fragment thereof) or genome DNA (or a fragment thereof) of B. enterica/B. enterica-like. The oligonucleotide probes may be at least 15 nucleotides in length. In alternate embodiments, oligonucleotide probes may range from about 20 to 200, or from 40 to 100, or from 45 to 80 nucleotides in length.

[0116] DNA isolated from the water supply, water source, or water filtration system can be amplified, e.g., using PCR. Alternatively, it can be detected by PCR using primers specific for bacterial conjugation operon (or a fragment thereof) and/or genome DNA (or a fragment thereof) of B. enterica/B. enterica-like.

[0117] Also provided herein are methods for water purification and/or decontamination. The methods include steps of obtaining a sample from a water supply, water source, or water filtration system; detecting the presence of i) bacterial conjugation operon or a fragment thereof; or ii) protein or DNA or a fragment thereof of B. enterica and/or B. enterica-like in the water supply, water source, or water filtration system; and purifying/decontaminating the water supply, water source, or water filtration system when i) bacterial conjugation operon or a fragment thereof; or ii) protein or DNA or a fragment thereof of B. enterica and/or B. enterica-like is present. Water purification and/or decontamination can be carried out by any methods known in the art, for example, by chemical agents, radiation chambers, electrostatic treatment, and filters.

[0118] The present invention further provides a method of identifying a novel viral, prokaryotic or eukaryotic genome that includes steps of (i) collecting/providing a nucleic acid sample from a biological sample obtained from a diseased subject; (ii) performing a genome or RNA sequencing of the nucleic acid sample and generating a mix of reads; (iii) identifying one or more unmapped reads; and (iv) assembling the one or more unmapped reads into one or more contigs, thereby identifying a novel viral, prokaryotic or eukaryotic genome. Any methods known in the art can be used to identify one or more unmapped reads, for example utilizing taxonomic classification. A biological sample can be any tissue, body fluid, body secretion, or body excretion from the diseased subject. For example, the subject is suffering from a post-HSCT colitis syndrome. For example, the subject is undergoing cancer treatment. For example, the subject is suffering from a pathogen infection.

[0119] Current microbiological methods used for diagnosis of human diseases in the clinical setting are biased to the identification of known organisms (with known growth, morphological, behavioral or sequence-based characteristics). Thus, the existing methods used bias against the discovery of unknown or unanticipated microorganisms. The method described herein circumvents this inherent bias.

[0120] In certain illustrative embodiments, the method includes the following steps.

[0121] The first step is to obtain diseased human or animal tissue or body fluid (or body secretion or excretion). Total DNA or RNA can be extracted from the sample (which is theorized to be a mixture of human and non-human microbial particles or cells as demonstrated in FIG. 12A.

[0122] The resultant DNA (or RNA) is subjected to next generation sequencing, which generates a mixed population of reads from human and other sources. These sequences may be quality filtered and are then taken forward for taxonomic classification using a homology based classifier or alignment system (one possible approach is to use a program such as PathSeq (Kostic et al, Nature Biotechnology, 2011)). Known microbial reads are assigned to a taxonomic classifier and the resultant data can be used for the identification of rare or abundant microorganisms that may be candidate pathogens. In most cases, a subset of reads will remain unclassifiable or “unmapped” (as outlined in FIG. 12B).

[0123] The remaining unmapped reads (or all nonhuman reads) can be taken forward for the generation of longer “contigs” or contiguous sequences that are generated by identifying regions of overlap between reads. This can be performed using computational methods that rely on “overlap consensus method”, de Bruijn graph theory based methods, “greedy extension methods”, or other computational methods. For the work described herein, de Bruijn graph based assemblers in the programs VELVET and ALLPATHS was used. This resulted in the generation of longer sequences that are thought to comprise regions of the novel or divergent organism's genome (FIG. 12C).

[0124] Finally, the contigs are subjected to a host of tests carried out by a classifying program (such as GAEMR—www.broadinstitute.org/software/gaemr/) in order to determine which contigs likely belong to the same organism (as more than one organism without an existing draft genome may exist within the sample set) (FIG. 12D).

### Kits

[0125] A composition of the present invention may, if desired, be presented in a kit (e.g., a pack or dispenser device) which may contain one or more unit dosage forms containing the composition, for example (1) an isolated polynucleotide selected from the group consisting of SEQ ID NOs: 1-88 and 94-349 and ORFs presented herein (SED ID Nos: 351-8212), or a fragment thereof; (2) an isolated peptide or, a fragment thereof, encoded by at least one of the nucleic acid sequences of SEQ ID NOs: 1-88 and 94-349 and ORFs presented herein (SED ID Nos: 351-8212); (3) an isolated pathogen (B. enterica, B. enterica-like or bacterial strain that includes a bacterial conjugation operon having a nucleic acid sequence presented herein); (4) a vector or a cell expressing at least one contig selected from the group consisting of nucleic acid sequences of SEQ ID NOs: 1-88 and 94-349 and ORFs presented herein (SED ID Nos: 351-8212); (5) a pharmaceutical composition comprising a therapeutically effective amount of one or more bacterial strains described herein or attenuated/inactivated one or more bacterial strains described herein; (6) a vaccine or an immunogenic composition comprising a therapeutically effective amount of one or more bacterial strains described herein or attenuated/inactivated one or more bacterial strains described herein.

[0126] The pack may for example comprise metal or plastic foil, such as a blister pack. The pack or dispenser device may be accompanied by instructions for administration. Compositions comprising a composition of the invention formulated in a compatible pharmaceutical carrier may also be prepared, placed in an appropriate container, and labeled for treatment of an indicated condition. Instructions for use may also be provided.

[0127] The kits may also include a plurality of detection reagents that detect the presence of a pathogen described herein. For example, the kit includes antibodies or fragments thereof, polypeptide, aptamers or oligonucleotide sequences. The kit may contain in separate containers an aptamer or an antibody, control formulations (positive and/or negative), and/or a detectable label such as fluorescein, green fluorescent protein, rhodamine, cyanine dyes, Alexa dyes, luciferase, radiolabels, among others.

[0128] Instructions (e.g., written, tape, VCR, CD-ROM, etc.) for carrying out the assay may be included in the kit. The assay may for example be in the form of PCR, Western Blot analysis, Immunohistochemistry (IHC), immunofluorescence (IF), sequencing and Mass spectrometry (MS) as known in the art.

### EXAMPLES

### Example 1

### Methods

[0129] Sample Selection, DNA Extraction and Preparation and Sequencing of Bar-Coded Libraries

[0130] The 11 patients that comprised the original CCS cohort were chosen for further investigation. A retrospective clinical chart review was performed and identified gastrointestinal biopsies for these 11 patients. During further review of the gastrointestinal biopsies from the 11 patients of the original CCS cohort, we noted that five patients had undergone lower gastrointestinal endoscopy with biopsy both before and after antibiotic treatment initiation for CCS, and 16 of these colonic biopsies were selected for further investigation (Table 1a). FFPE preserved control tissues were obtained from: histologically normal mucosa from five healthy patients who had undergone screening colonoscopy; three umbilical cord blood stem-cell transplantation patients with pathologically confirmed intestinal GVHD; and DNA from five colon cancer resection specimens, which were previously described. Institutional review board approval was granted for this study and all patient samples were de-identified.

[0131] After the first 20 μm of each FFPE block was removed, two 20 μm shaves were then obtained and taken forward for DNA extraction (RecoverAll total nucleic acid isolation, AM1975, Ambion, Grand Island, N.Y., USA). Samples for which >25 ng DNA was extracted were taken forward for sequencing; samples for which <25 ng DNA was extracted were reserved for validation studies. Bar-coded libraries were prepared from two temporally separated samples from each of two CCS patients as described. 18 Paired-end 76-bp or 101-bp sequencing was performed at a different sequencing center (using an Illumina V3 HiSeq platform) for each patient in order to control for possible contamination.

[0132] Computational Subtraction Followed by De Novo Assembly of Unmappable Reads

[0133] Quality filtering of all sequencing reads was performed followed by sequential computational subtraction of human reads, known microbial, and viral reads using the PathSeq software (version 1.2; www.broadinstitute.org/software/pathseq/) as previously described.

[0134] Non-human reads from samples 11b and 11d were pooled and subjected to de novo assembly using two different assembly methods: the (1) VELVET and (2) ALLPATHS software packages. Contigs that comprised the novel genome were aligned to the NCBI nt database using the Basic Local Alignment Search Tool for Nucleotide sequences (BLASTN). Contigs that had homology to Bradyrhizobia or related genera, had similar sequencing coverage, and had similar % GC content to the mean GC content were included in the deposited draft genome. A subset of contigs was linked to one another using paired reads to generate supercontigs.

[0135] Comparative Genomic Analysis

[0136] The supercontigs generated by the de novo assembly comprised the draft genome of a novel organism, termed Bradyrhizobium enterica. This draft genome will be deposited (NCBI Bioproject PRJNA174084, accession number AMFB00000000; strain name B. enterica DFCI-1) and was annotated using the Prodigal automated annotation tool, as described. Rooted phylogenetic analysis was performed using a subset of 400 core genes as described (huttenhower.org/phylophlan, manuscript submitted). Bootstrap analysis was carried out.

[0137] Comparative genomic analysis was performed. Global amino acid sequence alignment was performed using the Needleman-Wunsch algorithm and percentage identity between each B. enterica gene and its closest homolog in B. japonicum, was determined.

[0138] Polymerase Chain Reaction (PCR) Amplification of a B. enterica Target and Human Actin Control

[0139] Primers for PCR were designed and generated against a nonconserved region of the provisional B. enterica genome using the PrimerQuest program (Integrated DNA Technologies, Coralville, Iowa, USA). These primers (Forward primer 5′-TCGAGGGCTACGGCTTGAAGATTT-3′ (SEQ ID NO: 90), Reverse primer 5′ ACAACGTGTTGCCGCCAATATGAG-3′(SEQ ID NO: 91)) amplify a 367 bp target, which spans an intergenic region (supercontig 17, by 152,156-152,522). Primers that target the human actin gene (Forward primer 5′-GCGAGAAGATGACCCAGATC-3′(SEQ ID NO: 92), Reverse primer 5′-CCAGTGGTACGGCCAGAGG-3′(SEQ ID NO: 93)) amplify a 102 bp target.

### Example 2

### Results and Conclusions

[0140] Shotgun Sequencing and PathSeq Analysis of Colon Biopsies from Patients with CCS

[0141] Of all biopsies performed for the 11 patients with cord colitis, those obtained within 120 days before or 200 days after antibiotic therapy were selected for further analysis (FIG. 1, Table 1a). DNA was extracted and two temporally separated colonic biopsy specimens from each of two affected patients (samples 5b, 5c, 11b and 11d; Table 1a), chosen due to DNA yield >25 ng from the extraction step, were taken forward for massively parallel sequencing. Bar-coded sequencing libraries were prepared and subjected to Illumina V3 sequencing as described. Sequential computational subtraction of human reads, known microbial reads, and viral reads was performed as described (Table 1b). Over 2.5 million reads remained unmapped suggesting the presence of abundant sequences absent from the bacterial reference database used (Table 1b).

[0142] Genome Assembly and Comparative Genomics

[0143] A pooled sets of reads from samples 11b and 11d were subjected to de novo assembly using both the VELVET and ALLPATHS software packages. ALLPATHS generated the largest number of total contigs >2.5 kb. Ninety-nine contigs generated by this method were assembled into 89 supercontigs/scaffolds and were manually reviewed; one supercontig (3,621 bp) was removed, as it exhibited high sequence similarity to a SEN virus. Another supercontig was found to encode a 126 kb circular plasmid (contig000032, scaffold00025) with high homology to a plasmid element from Bradyrhizobium BTAi (accession number CP000495.1), but is absent in B. japonicum. The 88 remaining supercontigs all contained regions of high homology to B. japonicum (which comprises a single circular chromosome of 9,105,828 bp) and 86 of the 88 supercontigs had a GC content between 60 and 66%. The final draft genome size (including the plasmid) was 7,645,871 with 64.4% GC content. Given the high GC content of the organism and the single fragment-length library method used for sequencing, small areas of the genome are likely to remain unassembled. However, the over 35-fold coverage of the genome suggests that the majority of the genome has been discovered. Seventy one hundred and twelve open protein-encoding genes were predicted within the provisional genome using the Prodigal genome annotation tool.

[0144] Phylogenetic Analysis was Performed Using the PhyloPhlan Software

[0145] (huttenhower.org/phylophlan), which employs a set of 400 core protein-coding genes in order to generate a rooted phylogenetic tree (FIG. 2). Bootstrap analysis revealed >99% consensus at all branch points except the branch point marked with a circle, where the bootstrap value was 0.181. The organism was provisionally named Bradyrhizobium enterica based on the phylogenetic analysis, which showed a close relationship to Bradyrhizobium japonicum, and the anatomic location of discovery of the organism. The global amino acid sequence identity between homologous B. enterica and B. japonicum proteins (B. japonicum is comprised of a single circular chromosome measuring 9,105,828 bp) is presented in FIG. 3.

[0146] Metagenomic Characterization of the Sequenced CCS Samples

[0147] In order to determine the proportion of B. enterica to total bacterial reads in the four index samples, PathSeq analysis was carried out once more, with the addition of the draft B. enterica genome to the reference database. The relative abundance of B. enterica reads compared to total quality filtered reads dropped by ˜6.3-fold between the pre-treatment and post-treatment sample (obtained 28 days after antibiotic initiation) in patient 5 and ˜1.7-fold in patient 11 (post-treatment sample obtained 44 days after antibiotic initiation). These relative findings were independently corroborated by PCR. The most abundant bacterial species and selected viruses identified are presented in Table 2a and b. B. enterica was the predominant bacteria in all four samples (Table 2a). In stark contrast to the microbiome of healthy individuals and normal colonic tissue adjacent to colorectal tumors, known intestinal commensals and pathogens, such as Escherichia coli, were present at a much lower abundance than B. enterica (the number of E. coli reads ranging between 0.01 and 0.03% of the total number of reads corresponding to B. enterica). Patient 11 had previously been diagnosed with CMV colitis but had no pathological evidence of viral cytopathic changes at the time of clinical CCS. Of note, the total number of cytomegalovirus (CMV) reads was lower in the second versus the first biopsy in this patient (Table 2b).

[0148] Detection of B. enterica in Controls and Additional CCS Patients

[0149] PCR was performed in order to investigate the differential abundance of B. enterica compared to total bacteria and total human cells in CCS patients versus healthy controls, patients with colon cancer, and umbilical cord HSCT patients who carried a pathologically-confirmed diagnosis of GVHD. In addition to these controls, colonic biopsies for three additional patients within 120 days prior to and 200 days after CCS-directed therapy were obtained. Given the very small size of the biopsies and limited sample amount, quantitative studies were not possible. PCR was performed with primers to B. enterica and human actin. The presence of actin in all samples confirms the presence of human tissue within each specimen and the relative intensity of the actin band indicates the relative abundance of actin within the sample. B. enterica was undetectable in all three control tissue types (FIGS. 4A-C). In biopsies from the three additional CCS patients, B. enterica was less abundant in biopsies prior to onset of CCS, was present in all biopsies around the time of diagnosis of CCS, and in some cases, decreased in abundance after CCS treatment with metronidazole +/−fluoroquinolone (FIG. 4D-F).

[0150] Conclusion

[0151] Conventional microbiological tools are successful in the detection of many clinically significant infectious organisms. Despite this, many potentially infectious syndromes remain idiopathic. Determining a candidate etiological agent in these presumed infectious diseases can be challenging, costly, and is often unsuccessful. Many have predicted that new sensitive and unbiased genomics methods may illuminate candidate etiologic agents in a subset of these diseases, as they have in the past, in selected circumstances.

[0152] The present invention demonstrates the discovery of a novel organism, provisionally named Bradyrhizobium enterica, from a cohort of patients with an idiopathic, antibiotic-responsive colitis syndrome using genomic tools. The unusual lack of diversity in the colonic microbiome after HSCT has been described, and the relationships between these altered microbiomes and GVHD and infection are being illuminated. The abundance of B. enterica in these samples suggests that the syndrome is distinct from other known transplantation-associated colitis syndromes. According to the data presented herein, the organism appears to be specific to patients with CCS and is not present in various controls, including patients with intestinal GVHD.

[0153] Interestingly, the phylogenetic analysis reveals that B. enterica is taxonomically related to plant endosymbionts such as B. japonicum. Related organisms demonstrate direct or inferred sensitivity of B. enterica to fluoroquinolones, metronidazole, and the therapy that was effective in the treatment of CCS patients from the original cohort. Ferredoxin/pyruvate reductase genes, predicted to have a critical role in the reduction of metronidazole and thus its activity, are present in the draft genome of B. enterica, supporting the conclusion that B. enterica is the therapeutic target of CCS-directed metronidazole based therapy. As B. enterica is not a known pathogen in immunocompetent hosts, it may only be tolerated and cause damage to an immunosuppressed host.

[0154] As WGS of human disease specimens becomes more widespread, several novel disease-associated organisms will be discovered using methods similar to those described here.

TABLE 1a
Clinical data regarding antibiotic therapy, temporal and anatomic details of archived gastrointestinal biopsies
in the discovery and validation CCS cohort. Samples in the discovery cohort are indicated by red text in
the “Sample designation” column. Antibiotic therapy is indicated by date; M = metronidazole,
C = ciprofloxacin and L = levofloxacin. Patient nine had an appendectomy several years prior to
transplantation, thus accounting for the pre-transplantation gastrointestinal biopsy specimen.

| | | Diagnosis/ | | | CCS antibiotic therapy (days post SCT) | | | | |
|---|---|---|---|---|---|---|---|---|---|
| | | Transplantation details | | CCS | | | Relapse | | Sample |
| Patient ID | | Diagnosis | | Onset of CCS | Antibiotic | Antibiotic | antibiotic | Relapse | designation |
| Patient # | | (indication | Type of | (days post | start | stop | start | antibiotic | Sample |
| (deidentified) | Gender | for SCT) | SCT | transplantation) | date | date | date | stop | number |
| 4 | F | AML | Myeloablative | 103 | 111 | 121 | 125 | 855 | 4a |
| | | | UC-SCT | | (M, C) | | (M, C) | | 4b |
| | | | | | | | | | 4c |
| | | | | | | | | | 4d |
| | | | | | | | | | 4e |
| 5 | F | CML | Myeloablative | 158 | 181 | 271 | 278 | ongoing | 5a |
| | | | UC-SCT | | (M, C) | | (M, C) | | 5b |
| | | | | | | | | | 5c |
| | | | | | | | | | 5d |
| 6 | M | MDS | Myeloablative | 167 | 177 | 191 | n/a | n/a | 6a |
| | | | UC-SCT | | (M, C) | | | | 6b |
| 9 | M | CLL | RIC UC-SCT | 314 | 375 | 385 | n/a | n/a | 9a |
| | | | | | | | | | 9b |
| | | | | | | | | | 9c |
| | | | | | | | | | 9d |
| | | | | | | | | | 9e |
| | | | | | | | | | 9f |
| | | | | | | | | | 9g |
| | | | | | | | | | 9h |
| 11 | M | HD | RIC UC-SCT | 298 | 298 | 358 | 376 | 436 | 11a |
| | | | | | (M, L) | | (M, L) | | 11b |
| | | | | | | | | | 11c |
| | | | | | | | | | 11d |

| | | GI biopsy date | | | | | | |
|---|---|---|---|---|---|---|---|---|
| | | (days post SCT) | | | | | | |
| Patient ID | | GI biopsy date | | | | | | |
| Patient # | | (with respect | GI biopsy site | | | | | |
| (deidentified) | Gender | to transplant) | Stomach | Duodenum | Ileum | Colon | Sigmoid | Rectum |
| 4 | F | 30 | | | | | x | |
| | | 120 | | | | | x | |
| | | 180 | | | | | x | |
| | | 236 | x | x | | | x | x |
| | | 358 | | x | | x | | |
| 5 | F | 64 | | | | x | | |
| | | 105 | | | | x | | |
| | | 209 | x | x | | | x | |
| | | 526 | x | x | x | x | | |
| 6 | M | 55 | | | | x | | |
| | | 205 | | | x | x | | |
| 9 | M | −5553 | | | | | | |
| | | 257 | | | | | x | |
| | | 312 | x | x | | x | | |
| | | 371 | | | | | x | |
| | | 481 | | | | | x | |
| | | 560 | | | | x | | |
| | | 642 | | | | x | | |
| | | 668 | | | | x | | |
| 11 | M | 205 | | | | x | | |
| | | 266 | x | x | | x | | |
| | | 285 | | | | x | | |
| | | 342 | | x | | | x | |

TABLE 1b
Classification of reads from whole genome shotgun sequencing of formalin-fixed,
paraffin embedded colon biopsy samples from patients with cord colitis syndrome.

| Sample number | 5b | 5c | 11b | 11d |
|---|---|---|---|---|
| Read length | 101 | 101 | 76 | 76 |
| Total number of reads | 134,251,634 | 110,856,860 | 31,045,710 | 41,992,012 |
| Low quality reads (removed) | 52,004,826 | 11,994,589 | 12,688,835 | 17,063,731 |
| Duplicate/repeat reads | 1,625,164 | 2,492,830 | 1,982,166 | 1,351,105 |
| Human reads | 79,951,010 | 96,212,072 | 14,612,284 | 30,119,587 |
| Known bacterial reads | 268,774 | 58,838 | 570,238 | 449,463 |
| Known viral reads | 99* | 125* | 399* | 719* |
| Unmapped reads | 401,761 | 98,406 | 1,191,788 | 955,165 |

Computational analysis of massively parallel DNA sequencing from human tissue samples was performed using PathSeq software. Human reads were computationally subtracted, followed by taxonomic classification with BLASTN to microbial and viral databases. A large proportion of non-human reads were “unmappable” to available reference genomes.

TABLE 1c
Results of contig generation from unmapped read assembly.

| Samples used for assembly | 11b + 11c |
|---|---|
| Number of input reads for assembly* | 4,619,184 |
| Number of contigs (>2.5 kb) | 99 |
| Maximum contig length (bp) | 334,780 |
| Mean contig length (bp) | 77,268 |
| Contig N50 | 141,525 |
| Total Contig length (bp) | 7,649,492 |
| Assembly GC content (% of total bp) | 64.4 |

The ALLPATHS software program was used to assemble unmapped reads from pooled samples (11b and 11d) into longer, contiguous sequences.
*The input reads for assembly were comprised of all non-human reads. All pair-mates of quality filtered reads that were classified as nonhuman were also included in the assembly.

TABLE 2a
Bacterial abundance (in raw read number) of the
27 most abundant bacteria in CCS patients.

| | 5b | 5c | 11b | 11d |
|---|---|---|---|---|
| Organism | number of reads | | | |
| Bradyrhizobium enterica | 631,733 | 119,186 | 1,670,372 | 1,361,453 |
| Delftia acidovorans | 5,028 | 7,532 | 174 | 55 |
| Stenotrophomonas | 2,891 | 3,790 | 200 | 88 |
| maltophilia | | | | |
| Delftia sp. | 2,133 | 2,992 | 472 | 174 |
| Propionibacterium acnes | 1,100 | 362 | 6,045 | 1,101 |
| Bradyrhizobium | 818 | 225 | 1,810 | 1,334 |
| japonicum | | | | |
| Bradyrhizobium sp. | 760 | 165 | 1,512 | 493 |
| Pseudomonas mendocina | 658 | 140 | 1,408 | 1,084 |
| Ralstonia pickettii | 523 | 153 | 1,136 | 771 |
| Rhodopseudomonas | 513 | 83 | 1,549 | 529 |
| palustris | | | | |
| Agrobacterium sp. | 443 | 91 | 207 | 99 |
| Acidovorax ebreus | 233 | 114 | 765 | 331 |
| Agrobacterium | 219 | 115 | 424 | 203 |
| tumefaciens | | | | |
| Streptococcus sanguinis | 214 | 100 | 160 | 274 |
| Rubrivivax gelatinosus | 211 | 196 | 241 | 166 |
| Escherichia coli | 208 | 129 | 256 | 207 |
| Burkholderia gladioli | 204 | 239 | 218 | 115 |
| Pseudomonas fluorescens | 149 | 189 | 72 | 18 |
| Xanthomonas campestris | 109 | 44 | 455 | 269 |
| Fusobacterium | 101 | 127 | 229 | 91 |
| nucleatum | | | | |
| Rhizobium etli | 101 | 36 | 499 | 312 |
| Mesorhizobium | 75 | 84 | 483 | 297 |
| opportunistum | | | | |
| Mesorhizobium loti | 72 | 129 | 15 | 4 |
| Mesorhizobium ciceri | 51 | 18 | 946 | 337 |
| Brucella suis | 28 | 16 | 638 | 181 |
| Pseudomonas putida | 13 | 2 | 174 | 252 |
| Alicycliphilus | 5 | 9 | 603 | 6 |
| denitrificans | | | | |

TABLE 2b
The abundance (number of reads) of a subset
of known human viruses is presented.

| | | | |
|---|---|---|---|
| 5b | 5c | 11b | 11d |

| | |
|---|---|
| Virus | number of reads |

| | | | | |
|---|---|---|---|---|
| TTV | 0 | 10 | 0 | 598 |
| HHV6b | 14 | 46 | 19 | 42 |
| CMV | 0 | 0 | 224 | 7 |
| EBV | 0 | 0 | 0 | 1 |
| KSHV | 0 | 0 | 0 | 1 |
| HHV7 | 2 | 39 | 0 | 0 |

### Example 3

### Additional Methods and Materials

[0155] Genome Assembly Methods

[0156] Sequencing reads from short fragment sequencing libraries (insert size 150-400 bp) were pooled from temporally separated biopsies from each separate patient (5b+5c and 11b+11d) as well as all four patients (5b+5c+11b+11d). All paired-end sequences were treated as single-end reads and were run through the PathSeq algorithm for computational subtraction of human reads after quality filtering. All non-human reads from these samples and pair-mates of these non-human reads were also included in the assembly, regardless of the quality score of the pair-mate. Two separate computational assembly methods, VELVET1 and ALLPATHS2,3, were employed, as previously described. ALLPATHS was developed as a tool for genome assembly using dual inputs of short fragment sequencing libraries and large fragment (jumping) libraries. In order to use ALLPATHS for assembly, reads were first assembled into a temporary genome. All paired-end reads were aligned using the Burrows-Wheeler alignment algorithm to this temporary genome and insert size was inferred based on alignment of reads pairs. 4,5 Paired-end reads were then split into “shorter” and “longer” fragment pools and were taken forward for formal ALLPATHS assembly. Both assembly methods assembled a total contig length (of contigs >2.5 kb) of greater than 7.5 Mb when applied to the pooled set of reads from all four sequenced samples. The ALLPATHS assembly generated a longer set of contigs for sequences obtained from a single patient and was thus taken forward for further analysis. Given the possibility that the two separate patients harbored slightly different organisms (either at the species or strain level) and the relative similarity of the total contig length generated by the ALLPATHS assembly of sequences from patient 5, this set of 99 contigs was taken forward as the draft genome.

[0157] Contig Statistics

### Contigs 99

### Max Contig 334,780

### Mean Contig 77,268

### Contig N50 141,525

### Total Contig Length 7,649,492

### Assembly GC 64.4%

[0158] Each contig of greater than 2.5 kb was analyzed for percent GC content and read coverage. Contigs were analyzed by BLASTN6 against the NCBI nt database and were defined by the top hit (that with the lowest E value).

[0159] The BLASTN results of each individual contig were evaluated by our genome annotation team (ASB, SSF, SY, DG, AE, BW). The contig corresponding to the SEN virus was determined to be unlikely inserted into the novel organism's genome and was removed from the draft genome. The vast majority of the remaining contigs mapped to members of the family Bradyrhizobaceae and all other contigs mapping to other bacterial families were maintained in the draft genome due to similar coverage and GC content. As there are gaps in the draft genome, there remains the possibility that a small subset of these contigs is not a part of the true B. enterica genome. Future efforts to isolate, culture and complete the genome of this organism will be revealing in this regard, and will also illuminate the question of whether this organism has a circular or linear genome and whether it has a single chromosome or multiple chromosomes.

[0160] Contigs were taken forward for further assembly and from the 99 contigs, 90 scaffolds or supercontigs were generated (by end joining of contigs). One of these supercontigs (3,621 bp) corresponded to the SEN virus and was excluded from further analysis.

[0161] Scaffold Stats

### Scaffolds 90

### Max Scaffold 533,022

### Mean Scaffold 84,997

### Scaffold N50 155,300

### Total Scaffold Length 7,649,768

[0162] SEN virus supercontig length 3,621
Total Scaffold number (minus SEN virus supercontig) 89
Total Scaffold Length (minus SEN virus supercontig) 7,646,147

[0163] As the B. enterica genome was assembled from a complex human tissue sample, the genome has been submitted as a “multispecies” sample to the NCBI, as it was not derived from a isolated, purified culture or a true metagenomic sample. The strain has been designated DFCI-1 (Dana-Farber Cancer Institute-1) for the institution and location of care of CCS-affected patients.

[0164] Comparative Genomic Analysis and Circos Plot Construction

[0165] In order to perform comparative genome analysis of B. enterica, genome annotation was carried out by PRODIGAL (as previously described and cited in the main manuscript). Gene annotations are available on NCBI.

[0166] The most closely related species in a phylogenetic analysis reported in the main text was Bradyrhizobium japonicum (strain USDA 110). In order to determine the homology between genes in B. enterica and B. japonicum, each PRODIGAL-predicted gene was compared to the B. japonicum amino acid sequence by peptide BLAST. The full sequence of the top hit was extracted and the full-length genes were then aligned using the Needleman-Wunsch global alignment algorithm. The percentage identity was then calculated for each gene. This value was plotted at the location of the gene on the circular genome plot in the main manuscript. A histogram of global sequence identity by individual gene is provided below.

[0167] B. enterica genes for which no homologous B. japonicum gene was identified or for which the global amino acid sequence identity was less than 5% were determined and are plotted in the circular genome plot in the main manuscript. A list of the genes that are specific to B. enterica compared to B. japonicum is below. Note that the PRODIGAL algorithm is a highly specific method that conservatively assigns gene annotations, resulting in a significant number of hypothetical gene “calls”.

TABLE 3
A list of genes present in B. enterica that are absent in B. japonicum
or have homologs with less than 5% identity to B. japonicum.

| | | | Is gene absent in B. |
|---|---|---|---|
| Gene | | amino | japonicum or <5% |
| identification | | acid | identity to a predicted |
| number | Prodigal-predicted gene name | length | B. japonicum homolg? |
| C207_02513 | Bradyrhizobium enterica 2-dehydro-3- | 174 | <5% identity |
| | deoxyphosphogalactonate aldolase | | |
| C207_05358 | Bradyrhizobium enterica 2-haloacid dehalogenase | 50 | <5% identity |
| C207_00881 | Bradyrhizobium enterica 3-oxoacid CoA-transferase | 33 | absent |
| | subunit B | | |
| C207_06559 | Bradyrhizobium enterica 3-oxoacyl-[acyl-carrier-protein] | 70 | <5% identity |
| | synthase III | | |
| C207_01707 | Bradyrhizobium enterica 4-hydroxyacetophenone | 129 | <5% identity |
| | monooxygenase | | |
| C207_02017 | Bradyrhizobium enterica 4-hydroxyphenylacetate-3- | 526 | <5% identity |
| | monooxygenase large chain | | |
| C207_00016 | Bradyrhizobium enterica 6-aminohexanoate-cyclic-dimer | 61 | <5% identity |
| | hydrolase | | |
| C207_06840 | Bradyrhizobium enterica acetoacetyl-CoA synthetase | 48 | <5% identity |
| C207_04517 | Bradyrhizobium enterica alanyl-tRNA synthetase | 48 | <5% identity |
| C207_04847 | Bradyrhizobium enterica alkanesulfonate monooxygenase | 103 | <5% identity |
| C207_04970 | Bradyrhizobium enterica antibiotic transport system ATP- | 71 | <5% identity |
| | binding protein | | |
| C207_02911 | Bradyrhizobium enterica ApaG protein | 49 | <5% identity |
| C207_03323 | Bradyrhizobium enterica aspartate ammonia-lyase | 174 | <5% identity |
| C207_01988 | Bradyrhizobium enterica aspartyl-tRNA (Asn)/glutamyl- | 64 | <5% identity |
| | tRNA (Gln) amidotransferase subunit C | | |
| C207_04254 | Bradyrhizobium enterica ATP-dependent Clp protease | 154 | <5% identity |
| | ATP-binding subunit ClpB | | |
| C207_06703 | Bradyrhizobium enterica ATP-dependent Clp protease | 61 | <5% identity |
| | subunit | | |
| C207_02710 | Bradyrhizobium enterica biopolymer transporter ExbD | 103 | <5% identity |
| C207_02204 | Bradyrhizobium enterica branched-chain amino acid | 112 | <5% identity |
| | transport system ATP-binding protein | | |
| C207_00214 | Bradyrhizobium enterica branched-chain amino acid | 59 | <5% identity |
| | transport system ATP-binding protein | | |
| C207_01742 | Bradyrhizobium enterica branched-chain amino acid | 123 | <5% identity |
| | transport system permease | | |
| C207_02874 | Bradyrhizobium enterica branched-chain amino acid | 338 | <5% identity |
| | transport system substrate-binding protein | | |
| C207_00321 | Bradyrhizobium enterica branched-chain amino acid | 257 | <5% identity |
| | transport system substrate-binding protein | | |
| C207_01678 | Bradyrhizobium enterica carbamate kinase | 320 | <5% identity |
| C207_01177 | Bradyrhizobium enterica CDF family cation efflux system | 155 | <5% identity |
| | protein | | |
| C207_03088 | Bradyrhizobium enterica cell division protein FtsI | 116 | <5% identity |
| | (penicillin-binding protein 3) | | |
| C207_01915 | Bradyrhizobium enterica cobalt transporter subunit CbtB | 64 | <5% identity |
| | (proposed) | | |
| C207_00003 | Bradyrhizobium enterica cobalt-precorrin 5A hydrolase | 138 | <5% identity |
| C207_05190 | Bradyrhizobium enterica cytochrome d ubiquinol oxidase | 633 | <5% identity |
| | subunit II | | |
| C207_06585 | Bradyrhizobium enterica D-threo-aldose 1-dehydrogenase | 84 | <5% identity |
| C207_01857 | Bradyrhizobium enterica DNA repair protein RecN | 66 | <5% identity |
| | (Recombination protein N) | | |
| C207_02942 | Bradyrhizobium enterica DNA-3-methyladenine | 63 | <5% identity |
| | glycosylase II | | |
| C207_00234 | Bradyrhizobium enterica DOPA 4,5-dioxygenase | 137 | <5% identity |
| C207_01169 | Bradyrhizobium enterica dTDP-4-dehydrorhamnose 3,5- | 111 | <5% identity |
| | epimerase | | |
| C207_00459 | Bradyrhizobium enterica FdhD protein | 140 | <5% identity |
| C207_06358 | Bradyrhizobium enterica Fe—S cluster assembly protein | 67 | <5% identity |
| | SufD | | |
| C207_03698 | Bradyrhizobium enterica filamentous hemagglutinin | 4428 | <5% identity |
| | family domain-containing protein | | |
| C207_01723 | Bradyrhizobium enterica filamentous hemagglutinin | 4282 | <5% identity |
| | family domain-containing protein | | |
| C207_01969 | Bradyrhizobium enterica filamentous hemagglutinin | 4010 | <5% identity |
| | family domain-containing protein | | |
| C207_04905 | Bradyrhizobium enterica filamentous hemagglutinin | 3769 | <5% identity |
| | family domain-containing protein | | |
| C207_02878 | Bradyrhizobium enterica flagellum-specific ATP synthase | 226 | <5% identity |
| C207_04305 | Bradyrhizobium enterica formyl-CoA transferase | 127 | <5% identity |
| C207_05832 | Bradyrhizobium enterica galactarate dehydratase | 82 | <5% identity |
| C207_02559 | Bradyrhizobium enterica general secretion pathway | 104 | <5% identity |
| | protein D | | |
| C207_07133 | Bradyrhizobium enterica glutathione transport system | 148 | <5% identity |
| | permease | | |
| C207_00007 | Bradyrhizobium enterica glycerol-3-phosphate | 895 | <5% identity |
| | dehydrogenase | | |
| C207_06841 | Bradyrhizobium enterica haloacetate dehalogenase | 46 | <5% identity |
| C207_07098 | Bradyrhizobium enterica hypothetical protein | 2910 | <5% identity |
| C207_06833 | Bradyrhizobium enterica hypothetical protein | 1855 | <5% identity |
| C207_06429 | Bradyrhizobium enterica hypothetical protein | 816 | <5% identity |
| C207_01070 | Bradyrhizobium enterica hypothetical protein | 599 | <5% identity |
| C207_02136 | Bradyrhizobium enterica hypothetical protein | 587 | <5% identity |
| C207_03202 | Bradyrhizobium enterica hypothetical protein | 545 | absent |
| C207_01463 | Bradyrhizobium enterica hypothetical protein | 543 | <5% identity |
| C207_03999 | Bradyrhizobium enterica hypothetical protein | 463 | <5% identity |
| C207_02931 | Bradyrhizobium enterica hypothetical protein | 437 | absent |
| C207_01798 | Bradyrhizobium enterica hypothetical protein | 431 | <5% identity |
| C207_05230 | Bradyrhizobium enterica hypothetical protein | 430 | <5% identity |
| C207_06785 | Bradyrhizobium enterica hypothetical protein | 415 | <5% identity |
| C207_01242 | Bradyrhizobium enterica hypothetical protein | 382 | <5% identity |
| C207_02843 | Bradyrhizobium enterica hypothetical protein | 366 | absent |
| C207_02120 | Bradyrhizobium enterica hypothetical protein | 334 | <5% identity |
| C207_04081 | Bradyrhizobium enterica hypothetical protein | 334 | <5% identity |
| C207_03341 | Bradyrhizobium enterica hypothetical protein | 327 | <5% identity |
| C207_07094 | Bradyrhizobium enterica hypothetical protein | 294 | <5% identity |
| C207_05219 | Bradyrhizobium enterica hypothetical protein | 288 | absent |
| C207_03599 | Bradyrhizobium enterica hypothetical protein | 283 | <5% identity |
| C207_01150 | Bradyrhizobium enterica hypothetical protein | 259 | <5% identity |
| C207_05854 | Bradyrhizobium enterica hypothetical protein | 255 | <5% identity |
| C207_00970 | Bradyrhizobium enterica hypothetical protein | 233 | <5% identity |
| C207_01966 | Bradyrhizobium enterica hypothetical protein | 225 | <5% identity |
| C207_06967 | Bradyrhizobium enterica hypothetical protein | 225 | <5% identity |
| C207_05333 | Bradyrhizobium enterica hypothetical protein | 206 | <5% identity |
| C207_06540 | Bradyrhizobium enterica hypothetical protein | 197 | <5% identity |
| C207_05378 | Bradyrhizobium enterica hypothetical protein | 196 | <5% identity |
| C207_01191 | Bradyrhizobium enterica hypothetical protein | 196 | absent |
| C207_06786 | Bradyrhizobium enterica hypothetical protein | 186 | absent |
| C207_00400 | Bradyrhizobium enterica hypothetical protein | 183 | <5% identity |
| C207_03995 | Bradyrhizobium enterica hypothetical protein | 176 | <5% identity |
| C207_02696 | Bradyrhizobium enterica hypothetical protein | 174 | <5% identity |
| C207_01068 | Bradyrhizobium enterica hypothetical protein | 160 | <5% identity |
| C207_01535 | Bradyrhizobium enterica hypothetical protein | 157 | <5% identity |
| C207_03228 | Bradyrhizobium enterica hypothetical protein | 152 | <5% identity |
| C207_04620 | Bradyrhizobium enterica hypothetical protein | 151 | <5% identity |
| C207_07089 | Bradyrhizobium enterica hypothetical protein | 146 | <5% identity |
| C207_01330 | Bradyrhizobium enterica hypothetical protein | 145 | <5% identity |
| C207_00316 | Bradyrhizobium enterica hypothetical protein | 144 | <5% identity |
| C207_06454 | Bradyrhizobium enterica hypothetical protein | 143 | <5% identity |
| C207_06934 | Bradyrhizobium enterica hypothetical protein | 140 | <5% identity |
| C207_06065 | Bradyrhizobium enterica hypothetical protein | 137 | <5% identity |
| C207_06412 | Bradyrhizobium enterica hypothetical protein | 130 | absent |
| C207_04600 | Bradyrhizobium enterica hypothetical protein | 128 | <5% identity |
| C207_02656 | Bradyrhizobium enterica hypothetical protein | 126 | <5% identity |
| C207_06022 | Bradyrhizobium enterica hypothetical protein | 125 | <5% identity |
| C207_00934 | Bradyrhizobium enterica hypothetical protein | 121 | <5% identity |
| C207_05116 | Bradyrhizobium enterica hypothetical protein | 121 | <5% identity |
| C207_05441 | Bradyrhizobium enterica hypothetical protein | 120 | <5% identity |
| C207_04449 | Bradyrhizobium enterica hypothetical protein | 119 | <5% identity |
| C207_06118 | Bradyrhizobium enterica hypothetical protein | 118 | <5% identity |
| C207_05934 | Bradyrhizobium enterica hypothetical protein | 115 | <5% identity |
| C207_01403 | Bradyrhizobium enterica hypothetical protein | 113 | <5% identity |
| C207_03963 | Bradyrhizobium enterica hypothetical protein | 111 | <5% identity |
| C207_05797 | Bradyrhizobium enterica hypothetical protein | 108 | <5% identity |
| C207_00550 | Bradyrhizobium enterica hypothetical protein | 106 | <5% identity |
| C207_04611 | Bradyrhizobium enterica hypothetical protein | 106 | <5% identity |
| C207_01406 | Bradyrhizobium enterica hypothetical protein | 105 | <5% identity |
| C207_01734 | Bradyrhizobium enterica hypothetical protein | 105 | <5% identity |
| C207_02902 | Bradyrhizobium enterica hypothetical protein | 105 | <5% identity |
| C207_04614 | Bradyrhizobium enterica hypothetical protein | 105 | <5% identity |
| C207_05167 | Bradyrhizobium enterica hypothetical protein | 104 | <5% identity |
| C207_01791 | Bradyrhizobium enterica hypothetical protein | 103 | <5% identity |
| C207_05570 | Bradyrhizobium enterica hypothetical protein | 103 | <5% identity |
| C207_01794 | Bradyrhizobium enterica hypothetical protein | 102 | <5% identity |
| C207_03993 | Bradyrhizobium enterica hypothetical protein | 100 | <5% identity |
| C207_04236 | Bradyrhizobium enterica hypothetical protein | 100 | <5% identity |
| C207_06932 | Bradyrhizobium enterica hypothetical protein | 100 | <5% identity |
| C207_06922 | Bradyrhizobium enterica hypothetical protein | 99 | <5% identity |
| C207_06562 | Bradyrhizobium enterica hypothetical protein | 98 | <5% identity |
| C207_05824 | Bradyrhizobium enterica hypothetical protein | 97 | <5% identity |
| C207_06950 | Bradyrhizobium enterica hypothetical protein | 96 | <5% identity |
| C207_04264 | Bradyrhizobium enterica hypothetical protein | 94 | <5% identity |
| C207_06139 | Bradyrhizobium enterica hypothetical protein | 94 | <5% identity |
| C207_01751 | Bradyrhizobium enterica hypothetical protein | 93 | <5% identity |
| C207_03614 | Bradyrhizobium enterica hypothetical protein | 90 | <5% identity |
| C207_04833 | Bradyrhizobium enterica hypothetical protein | 90 | <5% identity |
| C207_06299 | Bradyrhizobium enterica hypothetical protein | 89 | <5% identity |
| C207_01183 | Bradyrhizobium enterica hypothetical protein | 88 | <5% identity |
| C207_01430 | Bradyrhizobium enterica hypothetical protein | 88 | <5% identity |
| C207_02833 | Bradyrhizobium enterica hypothetical protein | 88 | <5% identity |
| C207_04597 | Bradyrhizobium enterica hypothetical protein | 88 | <5% identity |
| C207_03399 | Bradyrhizobium enterica hypothetical protein | 88 | absent |
| C207_04481 | Bradyrhizobium enterica hypothetical protein | 87 | <5% identity |
| C207_06845 | Bradyrhizobium enterica hypothetical protein | 87 | <5% identity |
| C207_01212 | Bradyrhizobium enterica hypothetical protein | 86 | <5% identity |
| C207_01529 | Bradyrhizobium enterica hypothetical protein | 86 | <5% identity |
| C207_07126 | Bradyrhizobium enterica hypothetical protein | 86 | <5% identity |
| C207_01077 | Bradyrhizobium enterica hypothetical protein | 85 | <5% identity |
| C207_01552 | Bradyrhizobium enterica hypothetical protein | 85 | <5% identity |
| C207_02712 | Bradyrhizobium enterica hypothetical protein | 85 | <5% identity |
| C207_03892 | Bradyrhizobium enterica hypothetical protein | 85 | <5% identity |
| C207_04468 | Bradyrhizobium enterica hypothetical protein | 85 | <5% identity |
| C207_03949 | Bradyrhizobium enterica hypothetical protein | 84 | <5% identity |
| C207_04454 | Bradyrhizobium enterica hypothetical protein | 83 | <5% identity |
| C207_05444 | Bradyrhizobium enterica hypothetical protein | 82 | <5% identity |
| C207_00280 | Bradyrhizobium enterica hypothetical protein | 81 | <5% identity |
| C207_05913 | Bradyrhizobium enterica hypothetical protein | 80 | <5% identity |
| C207_04376 | Bradyrhizobium enterica hypothetical protein | 79 | <5% identity |
| C207_01418 | Bradyrhizobium enterica hypothetical protein | 78 | <5% identity |
| C207_02008 | Bradyrhizobium enterica hypothetical protein | 78 | <5% identity |
| C207_06615 | Bradyrhizobium enterica hypothetical protein | 78 | <5% identity |
| C207_06707 | Bradyrhizobium enterica hypothetical protein | 78 | <5% identity |
| C207_00504 | Bradyrhizobium enterica hypothetical protein | 75 | <5% identity |
| C207_04314 | Bradyrhizobium enterica hypothetical protein | 75 | <5% identity |
| C207_05933 | Bradyrhizobium enterica hypothetical protein | 74 | <5% identity |
| C207_06935 | Bradyrhizobium enterica hypothetical protein | 74 | <5% identity |
| C207_07049 | Bradyrhizobium enterica hypothetical protein | 73 | absent |
| C207_00413 | Bradyrhizobium enterica hypothetical protein | 72 | <5% identity |
| C207_05375 | Bradyrhizobium enterica hypothetical protein | 72 | <5% identity |
| C207_05382 | Bradyrhizobium enterica hypothetical protein | 72 | <5% identity |
| C207_06111 | Bradyrhizobium enterica hypothetical protein | 72 | <5% identity |
| C207_00150 | Bradyrhizobium enterica hypothetical protein | 71 | <5% identity |
| C207_00595 | Bradyrhizobium enterica hypothetical protein | 70 | <5% identity |
| C207_01078 | Bradyrhizobium enterica hypothetical protein | 69 | <5% identity |
| C207_04557 | Bradyrhizobium enterica hypothetical protein | 69 | <5% identity |
| C207_06134 | Bradyrhizobium enterica hypothetical protein | 69 | <5% identity |
| C207_02575 | Bradyrhizobium enterica hypothetical protein | 67 | <5% identity |
| C207_03144 | Bradyrhizobium enterica hypothetical protein | 67 | <5% identity |
| C207_05053 | Bradyrhizobium enterica hypothetical protein | 67 | <5% identity |
| C207_02003 | Bradyrhizobium enterica hypothetical protein | 67 | absent |
| C207_01786 | Bradyrhizobium enterica hypothetical protein | 66 | <5% identity |
| C207_03465 | Bradyrhizobium enterica hypothetical protein | 65 | <5% identity |
| C207_04529 | Bradyrhizobium enterica hypothetical protein | 65 | absent |
| C207_04394 | Bradyrhizobium enterica hypothetical protein | 64 | <5% identity |
| C207_05648 | Bradyrhizobium enterica hypothetical protein | 64 | <5% identity |
| C207_05858 | Bradyrhizobium enterica hypothetical protein | 64 | <5% identity |
| C207_01792 | Bradyrhizobium enterica hypothetical protein | 63 | <5% identity |
| C207_04266 | Bradyrhizobium enterica hypothetical protein | 63 | <5% identity |
| C207_04616 | Bradyrhizobium enterica hypothetical protein | 63 | <5% identity |
| C207_06462 | Bradyrhizobium enterica hypothetical protein | 63 | <5% identity |
| C207_03940 | Bradyrhizobium enterica hypothetical protein | 63 | absent |
| C207_00554 | Bradyrhizobium enterica hypothetical protein | 62 | <5% identity |
| C207_01735 | Bradyrhizobium enterica hypothetical protein | 61 | <5% identity |
| C207_07090 | Bradyrhizobium enterica hypothetical protein | 61 | <5% identity |
| C207_03964 | Bradyrhizobium enterica hypothetical protein | 60 | <5% identity |
| C207_00944 | Bradyrhizobium enterica hypothetical protein | 59 | <5% identity |
| C207_02529 | Bradyrhizobium enterica hypothetical protein | 59 | <5% identity |
| C207_05937 | Bradyrhizobium enterica hypothetical protein | 59 | <5% identity |
| C207_01419 | Bradyrhizobium enterica hypothetical protein | 58 | <5% identity |
| C207_05381 | Bradyrhizobium enterica hypothetical protein | 58 | <5% identity |
| C207_07127 | Bradyrhizobium enterica hypothetical protein | 58 | <5% identity |
| C207_03618 | Bradyrhizobium enterica hypothetical protein | 56 | <5% identity |
| C207_04383 | Bradyrhizobium enterica hypothetical protein | 56 | <5% identity |
| C207_04477 | Bradyrhizobium enterica hypothetical protein | 56 | <5% identity |
| C207_06492 | Bradyrhizobium enterica hypothetical protein | 56 | <5% identity |
| C207_01534 | Bradyrhizobium enterica hypothetical protein | 55 | <5% identity |
| C207_02125 | Bradyrhizobium enterica hypothetical protein | 55 | <5% identity |
| C207_02301 | Bradyrhizobium enterica hypothetical protein | 55 | <5% identity |
| C207_03151 | Bradyrhizobium enterica hypothetical protein | 55 | <5% identity |
| C207_05406 | Bradyrhizobium enterica hypothetical protein | 55 | <5% identity |
| C207_02339 | Bradyrhizobium enterica hypothetical protein | 55 | absent |
| C207_02516 | Bradyrhizobium enterica hypothetical protein | 54 | <5% identity |
| C207_01148 | Bradyrhizobium enterica hypothetical protein | 54 | absent |
| C207_01785 | Bradyrhizobium enterica hypothetical protein | 53 | <5% identity |
| C207_05735 | Bradyrhizobium enterica hypothetical protein | 53 | <5% identity |
| C207_01140 | Bradyrhizobium enterica hypothetical protein | 52 | <5% identity |
| C207_04958 | Bradyrhizobium enterica hypothetical protein | 52 | <5% identity |
| C207_00534 | Bradyrhizobium enterica hypothetical protein | 52 | absent |
| C207_00542 | Bradyrhizobium enterica hypothetical protein | 51 | <5% identity |
| C207_02937 | Bradyrhizobium enterica hypothetical protein | 51 | <5% identity |
| C207_01699 | Bradyrhizobium enterica hypothetical protein | 50 | <5% identity |
| C207_05214 | Bradyrhizobium enterica hypothetical protein | 50 | <5% identity |
| C207_01531 | Bradyrhizobium enterica hypothetical protein | 50 | absent |
| C207_06225 | Bradyrhizobium enterica hypothetical protein | 50 | absent |
| C207_02152 | Bradyrhizobium enterica hypothetical protein | 49 | <5% identity |
| C207_05285 | Bradyrhizobium enterica hypothetical protein | 48 | <5% identity |
| C207_00588 | Bradyrhizobium enterica hypothetical protein | 48 | absent |
| C207_00722 | Bradyrhizobium enterica hypothetical protein | 48 | absent |
| C207_05494 | Bradyrhizobium enterica hypothetical protein | 48 | absent |
| C207_05703 | Bradyrhizobium enterica hypothetical protein | 47 | <5% identity |
| C207_01554 | Bradyrhizobium enterica hypothetical protein | 47 | absent |
| C207_01097 | Bradyrhizobium enterica hypothetical protein | 46 | <5% identity |
| C207_00969 | Bradyrhizobium enterica hypothetical protein | 45 | <5% identity |
| C207_01800 | Bradyrhizobium enterica hypothetical protein | 45 | <5% identity |
| C207_00634 | Bradyrhizobium enterica hypothetical protein | 45 | absent |
| C207_04590 | Bradyrhizobium enterica hypothetical protein | 45 | absent |
| C207_05503 | Bradyrhizobium enterica hypothetical protein | 45 | absent |
| C207_04915 | Bradyrhizobium enterica hypothetical protein | 43 | <5% identity |
| C207_05938 | Bradyrhizobium enterica hypothetical protein | 43 | <5% identity |
| C207_06288 | Bradyrhizobium enterica hypothetical protein | 43 | <5% identity |
| C207_06994 | Bradyrhizobium enterica hypothetical protein | 43 | <5% identity |
| C207_01562 | Bradyrhizobium enterica hypothetical protein | 43 | absent |
| C207_02714 | Bradyrhizobium enterica hypothetical protein | 42 | <5% identity |
| C207_05112 | Bradyrhizobium enterica hypothetical protein | 42 | <5% identity |
| C207_01514 | Bradyrhizobium enterica hypothetical protein | 40 | <5% identity |
| C207_00810 | Bradyrhizobium enterica hypothetical protein | 40 | absent |
| C207_01141 | Bradyrhizobium enterica hypothetical protein | 40 | absent |
| C207_06362 | Bradyrhizobium enterica hypothetical protein | 38 | <5% identity |
| C207_04129 | Bradyrhizobium enterica hypothetical protein | 38 | absent |
| C207_01374 | Bradyrhizobium enterica hypothetical protein | 37 | absent |
| C207_04916 | Bradyrhizobium enterica hypothetical protein | 37 | absent |
| C207_05693 | Bradyrhizobium enterica hypothetical protein | 37 | absent |
| C207_01743 | Bradyrhizobium enterica hypothetical protein | 36 | <5% identity |
| C207_04602 | Bradyrhizobium enterica hypothetical protein | 36 | <5% identity |
| C207_01872 | Bradyrhizobium enterica hypothetical protein | 36 | absent |
| C207_02486 | Bradyrhizobium enterica hypothetical protein | 36 | absent |
| C207_04189 | Bradyrhizobium enterica hypothetical protein | 36 | absent |
| C207_04202 | Bradyrhizobium enterica hypothetical protein | 36 | absent |
| C207_03601 | Bradyrhizobium enterica hypothetical protein | 35 | absent |
| C207_00591 | Bradyrhizobium enterica hypothetical protein | 34 | <5% identity |
| C207_04350 | Bradyrhizobium enterica hypothetical protein | 34 | absent |
| C207_06503 | Bradyrhizobium enterica hypothetical protein | 34 | absent |
| C207_06891 | Bradyrhizobium enterica hypothetical protein | 34 | absent |
| C207_00911 | Bradyrhizobium enterica hypothetical protein | 33 | <5% identity |
| C207_01059 | Bradyrhizobium enterica hypothetical protein | 33 | absent |
| C207_04209 | Bradyrhizobium enterica hypothetical protein | 33 | absent |
| C207_05684 | Bradyrhizobium enterica hypothetical protein | 33 | absent |
| C207_06783 | Bradyrhizobium enterica hypothetical protein | 32 | <5% identity |
| C207_02248 | Bradyrhizobium enterica hypothetical protein | 32 | absent |
| C207_03468 | Bradyrhizobium enterica hypothetical protein | 32 | absent |
| C207_06482 | Bradyrhizobium enterica hypothetical protein | 32 | absent |
| C207_07159 | Bradyrhizobium enterica hypothetical protein | 32 | absent |
| C207_03294 | Bradyrhizobium enterica hypothetical protein | 31 | absent |
| C207_00015 | Bradyrhizobium enterica hypothetical protein | 30 | absent |
| C207_00039 | Bradyrhizobium enterica hypothetical protein | 30 | absent |
| C207_01058 | Bradyrhizobium enterica hypothetical protein | 30 | absent |
| C207_01698 | Bradyrhizobium enterica hypothetical protein | 30 | absent |
| C207_01804 | Bradyrhizobium enterica hypothetical protein | 29 | absent |
| C207_03018 | Bradyrhizobium enterica hypothetical protein | 23 | absent |
| C207_06871 | Bradyrhizobium enterica hypothetical protein | 20 | absent |
| C207_03997 | Bradyrhizobium enterica indolepyruvate ferredoxin | 166 | <5% identity |
| | oxidoreductase | | |
| C207_02900 | Bradyrhizobium enterica light-harvesting protein B-880 | 64 | <5% identity |
| | alpha chain | | |
| C207_02901 | Bradyrhizobium enterica light-harvesting protein B-880 | 73 | <5% identity |
| | beta chain | | |
| C207_06138 | Bradyrhizobium enterica lipid A biosynthesis lauroyl | 256 | <5% identity |
| | acyltransferase | | |
| C207_04704 | Bradyrhizobium enterica long-chain acyl-CoA synthetase | 71 | <5% identity |
| C207_01846 | Bradyrhizobium enterica magnesium transporter | 51 | <5% identity |
| C207_00945 | Bradyrhizobium enterica malate dehydrogenase | 81 | <5% identity |
| | (oxaloacetate-decarboxylating) | | |
| C207_01039 | Bradyrhizobium enterica membrane protein | 179 | <5% identity |
| C207_04947 | Bradyrhizobium enterica membrane-bound serine protease | 174 | <5% identity |
| | (ClpP class) | | |
| C207_02895 | Bradyrhizobium enterica MFS transporter, BCD family, | 452 | <5% identity |
| | chlorophyll transporter | | |
| C207_03996 | Bradyrhizobium enterica MFS transporter, BCD family, | 168 | <5% identity |
| | chlorophyll transporter | | |
| C207_03721 | Bradyrhizobium enterica MFS transporter, BCD family, | 158 | <5% identity |
| | chlorophyll transporter | | |
| C207_02016 | Bradyrhizobium enterica muconolactone delta-isomerase | 97 | <5% identity |
| C207_01524 | Bradyrhizobium enterica multidrug efflux transporter | 69 | absent |
| | MdtA | | |
| C207_06828 | Bradyrhizobium enterica multiple sugar transport system | 174 | <5% identity |
| | substrate-binding protein | | |
| C207_03140 | Bradyrhizobium enterica NAD(P) transhydrogenase | 186 | <5% identity |
| | subunit beta | | |
| C207_07161 | Bradyrhizobium enterica nitrite reductase (NAD(P)H) | 64 | absent |
| | large subunit | | |
| C207_00317 | Bradyrhizobium enterica NitT/TauT family transport | 86 | <5% identity |
| | system ATP-binding protein | | |
| C207_03397 | Bradyrhizobium enterica oxidoreductase | 155 | <5% identity |
| C207_04149 | Bradyrhizobium enterica penicillin-binding protein 1A | 343 | <5% identity |
| C207_03586 | Bradyrhizobium enterica peptide/nickel transport system | 61 | absent |
| | permease | | |
| C207_04636 | Bradyrhizobium enterica periplasmic protein TonB | 55 | <5% identity |
| C207_04848 | Bradyrhizobium enterica permease | 104 | <5% identity |
| C207_04512 | Bradyrhizobium enterica phosphinothricin | 222 | <5% identity |
| | acetyltransferase | | |
| C207_00961 | Bradyrhizobium enterica phosphoglycolate phosphatase | 72 | <5% identity |
| C207_05411 | Bradyrhizobium enterica phytoene synthase | 65 | <5% identity |
| C207_01174 | Bradyrhizobium enterica protease | 492 | <5% identity |
| C207_02899 | Bradyrhizobium enterica reaction center protein L chain | 279 | absent |
| C207_02763 | Bradyrhizobium enterica RelE/StbE family addiction | 99 | <5% identity |
| | module toxin | | |
| C207_05676 | Bradyrhizobium enterica ribose 5-phosphate isomerase A | 52 | absent |
| C207_03424 | Bradyrhizobium enterica simple sugar transport system | 62 | <5% identity |
| | ATP-binding protein | | |
| C207_05162 | Bradyrhizobium enterica small GTP-binding protein | 171 | <5% identity |
| C207_03318 | Bradyrhizobium enterica starch synthase | 64 | <5% identity |
| C207_05284 | Bradyrhizobium enterica starvation-inducible DNA- | 438 | absent |
| | binding protein | | |
| C207_00516 | Bradyrhizobium enterica sulfonate transport system | 670 | <5% identity |
| | substrate-binding protein | | |
| C207_06059 | Bradyrhizobium enterica tat (twin-arginine translocation) | 101 | <5% identity |
| | pathway signal sequence | | |
| C207_05879 | Bradyrhizobium enterica threonine synthase | 238 | <5% identity |
| C207_02700 | Bradyrhizobium enterica TonB family domain-containing | 237 | <5% identity |
| | protein | | |
| C207_05118 | Bradyrhizobium enterica transcriptional regulator | 73 | <5% identity |
| C207_03226 | Bradyrhizobium enterica transmembrane sensor | 211 | <5% identity |
| C207_05463 | Bradyrhizobium enterica two-component system, | 42 | <5% identity |
| | chemotaxis family, sensor kinase CheA | | |
| C207_06398 | Bradyrhizobium enterica two-component system, | 31 | <5% identity |
| | chemotaxis family, sensor kinase CheA | | |
| C207_06941 | Bradyrhizobium enterica two-component system, | 31 | <5% identity |
| | chemotaxis family, sensor kinase CheA | | |
| C207_07005 | Bradyrhizobium enterica two-component system, | 31 | <5% identity |
| | chemotaxis family, sensor kinase CheA | | |
| C207_07110 | Bradyrhizobium enterica two-component system, OmpR | 137 | <5% identity |
| | family, phosphate regulon response regulator OmpR | | |
| C207_04538 | Bradyrhizobium enterica type IV secretion system protein | 99 | <5% identity |
| | VirB2 | | |
| C207_00251 | Bradyrhizobium enterica UDPglucose 6-dehydrogenase | 99 | <5% identity |
| C207_03021 | Bradyrhizobium enterica urease accessory protein ureE | 204 | <5% identity |
| C207_06301 | Bradyrhizobium enterica uroporphyrinogen-III synthase | 92 | <5% identity |
| C207_04870 | Bradyrhizobium enterica YD repeat (two copies) | 63 | <5% identity |

[0168] Contamination Analysis

[0169] Several limitations are introduced by the execution of a single center study that may increase the likelihood of contamination including (1) common paraffin baths used for the generation of FFPE samples, (2) a common nosocomial microbiome, (3) FFPE block handling by a single laboratory, (4) preparation of libraries using very limited DNA in a single laboratory location.

[0170] The experimental method employed in this single-center study was designed to minimize the likelihood that the results obtained were due to a contaminant as follows: (1) FFPE colon biopsy samples from normal controls and post-stem cell transplantation GVHD controls processed at the same institution were included and did not demonstrate appreciable B. enterica by PCR. (2) Additional frozen colon cancer controls were also included in this analysis and did not demonstrate appreciable B. enterica by PCR. (3) DNA extraction for the samples that were sequenced was started on the same day but was completed on successive days. (4) Two different type of barcodes generated at different facilities were used to generate sequencing libraries. (5) Samples 5b+5c and 11b+11d were sequenced at two different sequencing facilities. (6) Buffers and ultrapure water used in the extraction of DNA and generation of the libraries were subjected to targeted PCR to investigate for B. enterica in the stock solutions used (FIG. 8). (7) DNA extraction and sequencing library construction was carried out in a dedicated “clean facility” away from lab areas where organisms are cultured. (8) As samples were very limited, the reserved “top scrolls” from two of the samples (9d and 9e) were subjected to DNA extraction several months after the original extraction and B. enterica was present in both scrolls that were studied (FIG. 8). (10) All FFPE samples prepared for sequencing in our laboratory within four months of the CCS samples were analyzed by PathSeq for the presence of B. enterica. Single nucleotide polymorphism analysis was limited by the reported intrinsic low polymorphism rate of organisms such as Bradyrhizobium japonicum USDA 110 and relatively low coverage of B. enterica for samples 5b+5c. Despite this, it appeared that there were at least five to 11 SNPs at an allelic fraction of at least 40% between B. enterica reads from patient 5 vs. patient 11. Additional intrinsic difficulties in evaluation for SNPs include the lack of a completed genome and the high GC content of the organism, which can lead to more frequent sequencing errors.

[0171] PCR Conditions

[0172] PCR was performed using 10 μM forward and reverse primers, 0.2 ng of input DNA and the AccuPrime Taq DNA polymerase system (Invitrogen, Grand Island, N.Y., USA) per manufacturer's directions in a total volume of 10 μl with the following cycle protocol: 95° C. for 2 minutes, followed by 35 cycles of: 95° C. for 30 seconds, 62.1° C. for 30 seconds, 68° C. for 40 seconds, and finally an extension at 68° C. for 5 minutes. PCR was carried out on an Eppendorf AG Mastercycler Pro (Hauppauge, N.Y., USA).

[0173] Viral Reads in Sequenced CCS Samples

[0174] Samples 5b, 5c, 11b and 11d were carried through PathSeq analysis, as described in the main text of the manuscript. A detailed list of viral hits is indicated in FIG. 9.

### Example 4

### Identification of Bradyrhizobium enterica-Like Organisms

[0175] An environmental survey of patient care areas was carried out in order to establish a potential source of the infection. As the natural habitat of B. enterica was not known, the 16S ribosomal RNA sequence of the organism was used to query the NCBI nt (nucleotide) and wgs (whole genome sequence) databases. The “source” locations for the top 100 hits from each of the aforementioned homology searches were noted. Based on the results of this investigation, hospital-based water filtration systems were selected for testing. After PCR-based hospital environmental screening, various water sources from patient care areas were cultured on media that supports the growth of rhizobes. Briefly, 50 uL of each water source was plated on yeast mannitol agar (YMA) supplemented with either Congo Red (final concentration of 0.25 mg/mL) or bromothymol blue (BTB, final concentration of 0.25 mg/mL). Colonies of Bradyrhizobium species are described as excluding Congo red dye and thus maintaining a cream color and when grown on BTB, which is an acid-base indicator, secrete pH neutral to basic metabolites, thus keeping the BTB agar green to slightly blue in color.

[0176] Colonies that met the morphologic criteria expected for Bradyrhizobium species were streaked to isolation and were screened by PCR with Bradyrhizobium specific primers described above. A colony that grew after five days of incubation at 30° C., that was positive by this initial PCR. Genomic DNA from the organism was isolated and subjected to sequencing on a MiSeq platform (Illumina, San Diego, Calif.). The resulting reads were assembled into a genome of approximately 6.9 Mb in length using the AllPaths-LG software package. The draft genome that was assembled from this isolate represented an organism that was similar to, but not identical to B. enterica. This second novel organism was also determined to be in the genus Bradyrhizobium, based on a phylogenetic analysis (FIG. 10). It encoded a region of ˜152 kb that was identical to B. enterica. This region of the genome included all of the genes necessary for bacterial conjugation (transmission of genetic information, or “bacterial sex”, between different species of bacteria).

[0177] The identification of two novel bacteria within patient samples and the hospital in which they were cared for suggests that the hospital environment may be a source of many more novel organisms. As the conserved region in these two bacterial species encodes a “bacterial conjugation operon”, this region may be required, and is perhaps sufficient, for the evolution of novel organisms with pathogenicity to humans.

### Example 5

### Novel Approach for Identification of a Novel Viral, Prokaryotic or Eukaryotic Genome

[0178] The method used for the identification of a novel viral, prokaryotic or eukaryotic genome from sequencing data generated from a diseased tissue/body fluid specimen is described for the first time within this patent application.

[0179] This approach has been validated in the investigation of the gastrointestinal microbiome as demonstrated by the data presented herein, where a sequencing and computational method were employed for the successful identification of a new bacterium, Bradyrhizobium enterica, in a post-HSCT colitis syndrome.

[0180] Current microbiological methods used for diagnosis of human diseases in the clinical setting are biased to the identification of known organisms (with known growth, morphological, behavioral or sequence-based characteristics). Thus, the existing methods used bias against the discovery of unknown or unanticipated microorganisms. The method described by this work circumvents this inherent bias.

[0181] The methodological objective of “REVERSE MICROBIOLOGY”, the approach that has been demonstrated to be successful, is outlined in FIG. 11.

[0182] The first step of such an approach is to obtain diseased human or animal tissue or body fluid (or body secretion or excretion). Total DNA or RNA can be extracted from the sample (which is theorized to be a mixture of human and non-human microbial particles or cells as demonstrated in FIG. 12A.

[0183] The resultant DNA (or RNA) is subjected to next generation sequencing, which generates a mixed population of reads from human and other sources. These sequences may be quality filtered and are then taken forward for taxonomic classification (using a homology based classifier or alignment system; one possible approach is to use a program such as PathSeq (Kostic et al, Nature Biotechnology, 2011). Known microbial reads are assigned to a taxonomic classifier and the resultant data can be used for the identification of rare or abundant microorganisms that may be candidate pathogens. In most cases, a subset of reads will remain unclassifiable or “unmapped” (as outlined in FIG. 12B).

[0184] The remaining unmapped reads (or all nonhuman reads) can be taken forward for the generation of longer “contigs” or contiguous sequences that are generated by identifying regions of overlap between reads. This can be performed using computational methods that rely on “overlap consensus method”, de Bruijn graph theory based methods, or “greedy extension methods”. For the work described in the preliminary results section, we have used de Bruijn graph based assemblers in the programs VELVET and ALLPATHS. This results in the generation of longer sequences that are thought to comprise regions of the novel or divergent organism's genome (FIG. 12C).

[0185] Finally, the contigs are subjected to a host of tests carried out by a classifying program (such as GAEMR—www.broadinstitute.org/software/gaemr/) in order to determine which contigs likely belong to the same organism (as more than one organism without an existing draft genome may exist within the sample set) (FIG. 12D).

We claim:

1. An isolated bacterial strain comprising:
(i) at least one contiguous overlapping sequence (contig) selected from the group consisting of nucleic acid sequences of SEQ ID NOs: 1-88;
(ii) at least one contig selected from the group consisting of nucleic acid sequences of SEQ ID NOs: 94-349;
(iii) at least one open reading frame selected from the group consisting of nucleic acid sequences of SED ID Nos: 351-8212;
(iv) a bacterial conjugation operon of the SEQ ID NO: 350;
(v) a bacterium of ATCC Accession No. PTA-______1; or
(vi) a bacterium of ATCC Accession No. PTA-______2.

2. A pharmaceutical composition comprising a therapeutically effective amount of the bacterial strain of claim 1.

3. A vaccine comprising a therapeutically effective amount of attenuated or inactivated bacterial strain of claim 1.

4. A method of preventing, treating or alleviating a symptom of cord colitis syndrome in a subject comprising administering to the subject a therapeutically effective amount of a vaccine of claim 3.

5. A method of screening for an antibiotic agent against the bacterial strain of claim 1 comprising contacting a living bacterium with a candidate antibiotic agent and selecting an antibiotic agent that specifically inhibits growth of the bacterium.

6. A method for treating a bacterial infection in a subject comprising administering a therapeutically effective amount of an antibiotic agent screened according to the method of claim 5 to a subject suspect of or infected by the bacterial strain of claim 1.

7. A method of screening or monitoring water supply, water source, or a water filtration system comprising obtaining a sample from the water supply, water source, or water filtration system and detecting the presence of the bacterial strain of claim 1.

8. A method of identifying a novel viral, prokaryotic or eukaryotic genome, comprising
(i) collecting a nucleic acid sample from a biological sample obtained from a diseased subject;
(ii) performing a genome sequencing of the nucleic acid sample and generating a mix of reads;
(iii) identifying one or more unmapped reads; and
(iv) assembling the one or more unmapped reads into one or more contigs, thereby identifying a novel viral, prokaryotic or eukaryotic genome.

9. The method of claim 8, wherein the step of identifying one or more unmapped reads comprises taxonomic classification.

10. The method of claim 4, wherein the subject has a compromised immune system.

11. The method of claim 6, wherein the subject has a compromised immune system.

The application's sequence listing, which the Patent Office published only in electronic form, follows.

SEQUENCE LISTING (16021 sequences)

SEQ ID NO: 1 - DNA, 533022 bp, Bradyrhizobium enterica
  misc_feature (274531)..(274609): n is a, c, g, or t
tgcggattccgacgaagtcgcccgggtgtaccgatatgaagtcgcccggggattccgagacgatgtcgcccacctctccgatttgatctcgcccgggggcgaggcgttctagctgctgaggttctctggcattgggcaagccgcacggtcaactggaatcgcggcttgagcttgttgtgtttctgttgcgtttgctgtgggcatgtgggcaacgccttggcgttgtccaagcgcagcggcatgtccacagcgtcacgggctcaggtctttcgggcggattgccgggttcggcgcaggctctcgccagtaaggtcgagccgatgggcattgtggacgaggcgatcgagcacggcgtcggcataggtaggatctccaatgagcacatgccactggtccacggggagctggctggtgacgatggtggaacgatgaccatagcgatcttcgaggatttccaggaggtcgtgacgggcaccagcgtcgagcggctcgagcccccagtcatcgaggatcagcagatcgacacggccgagcccgcgcaataggcgcggatggcgaccgtcgccgcgcgcgagagcgaggtcatcgaacagccgcggaacacgttgatagagcacggagcgattgtcacggcaggccttgtggccgagcgccgaggcgagccagctcttgccgacgccggccgggccgcagatcagcaggttggcatggtcatcgatccagcggccctcgacaagcttggcgaacagcgggcggtcgaggccgcgcggggtgcggtagtcgatgtcctcgacgcacgcttgctgacgcagcttcgcatagcgcaggcgggtggcgagccgcttatcgtggcgcagtgatgcttcacgttcgagcagcagcgcgagccattcggcgtgaccgaggcttgcggcctcgccggttgcttcgatatcgacgaaggcattggccatgccgtggaggccgagggcgttgaggcggtcgagggtcggatgggtgagcaagggatggtctcctagttgtagtagcgcggtccgcggatgttggcatgcaggatcggcgcatcgtccgcggagcgctgatgagcgggacgccgatcgagattgttggcgaggatcgatttgaccgagccgtaggtgcgcgcgccgatgtcgatcgcccgcgcagccgcggcgtccagccgtccgcgcccataggagccggcgagcctgaggatgccgaggcaggcgcggaagccttgctcggggtgcgagcgctcgtcgagaatgaggtcgcacaaagcgctggtcgccggcccgatcgcggcagcgtcctgtcggatgcgcgcgatggtccagccggcgtagcgccgatggctggaggccatgtgctccggcacggtggtgtgtttgtgattaccgctcatgcgctgatgcgcggcgatccgctcgcccttgtggaagatctctacggtgcgggcagtgaaccgcacctcgacctcggcgcgcacaaagcgatgcgggacgctgtagtaatgcttctccacctcgacgtggtaatcgaggctgacgcggcggatccgccattcggcgagtacgtaggggctcgccggcaatggcttgagcgccggccgatcgacctcctcaagcagccggcggcgcgtcacgccgagccgccggatcggccgctcctcgttgagcctggtgagcagctcgccgatcgccgcattgacctcggccaggctgtagaaggtgcgatgacgcaggcggccgagcagccagcgctcgacgatcaggacggcttgctcgaccttggccttgtcgcgcggcttgcgcggccgggccggcaatatggcggtgccgtaatgcgccgccatctccgcataggtccgattgatctgcgggtcgtacaggctcgccttgatgaccgcgaccttggtgttgtcaggcaccagcagcgccggtatgccgccgatcgccgcgaaggcgccaacatgagcgctgatccagtcggcgagcccctgcgtccacgtcgcctgcgcgtaggtaaagctcgaggcgccgagcacggcgacgaagatctgcgccattctgcgctcaccggtgagacgatcgaccaccaccggcacgccgtcgccggcatagtcgacgaacagcttgtcgccggctgcgtgcgcctggcgcatcgtcaccgacaggcggccctcccaggcgcggtaaagctcacagaagcgcgagtaccggtatccgtcgggttcggcggcgatgtactcctcccacaggatcgacagcgtcacgtgcttgcgcttgagctcgcggtgcacggtcgtccaatcaggttcggcgatgcggcggtgaccctgccggttgccattgccggtcttggcgaacaggcggagttccagggccgcgtccgtgagctcgtcgggcaacggccaggtcagacccgcggcctcgaaccgccggatcgccagccgcaccgtcgagggcgccgctcctacccgtcgcgcaatctcgcggctcggcagaccggccgccttcatcctgatcacatcgcgcacacggcgcatcgcaagcctctccgtcggcatccagggtcccccttcgcaaagccgaaagggttgacctatgggagccagaagaggcctcgtcacccgggcgacatcatcccggaatggtgggcgacatcatctcggaatgggtgggcgacttcaaatcggaatggtgggcgagatcatctcggaatgctgggcgacatcgagcggaatccgcaaacacagcaccagcaccggaagttacccagcttaaggtcaacgaaaagaagtggaccgccaccttgatgaaggccgggtggacggtcctgccgaacgtcatctttgaacgccagcgtgccctggggctggatgcgatcgacatcaacatcatcctgcacatcgcgtcctattggtggacggcagaaggcaagccgtttccgtccaagcgaaccatcgcagcggccatggacatcgaaccgcggaccgttcagcgcaggattgctgccatggaagcggctagactaatcaggcgggaagaacggcgcagctcagcaaacggtagccagaccaatgtctaccacctggacggcctgatcgcggccgccaagccatatgcgctcgaaaaaatccaggagcgtgatgaaaagattcaggcaaaggccgcaagggcaagcaggaagggcaagcccaagctttcggttgtgaagggaggggcctaaccagcttcgcgccgtagctcaaccggatagagccctgccgttctttgaaatcctagctgacacttggagagtaggggcaggaggttgcaggttcaagccctgccggcgcgtccatacccccggtttttagttcactttgaatcgtgcaatcgtatttgcgattgcacggtcgtcctacaccgtgagtttgtcggtcgtgaccaagtctttcagcttctttgctgacggcgggattccaggcccaacgaccggcttgccatcggcttcagccgaggcgacagcttcgttcagctccagcagtgcttccaacacatcggccttcttggacatgccgtaagcgtcgcgtacggcgtcgtccagcgctttatgtgctttcttcagggcgtgttctccgggcccttcgatcgcccgatatagctctcgtagtgaaagctcatgcttcgcccgcagatgtgatcgcaagcgccgcacctcgaccgcccgcttggcgacgaggcgaaccgcctcggttgtcggctgctgaggccaggggaagctgtcgaagacggtatccgacgtatagcgaaagtctgccttcagcgttgagcagcgattgatgaaccactcccaatggatgcccgactggaggataccgaaagagtagtcatcttccagcgcgaacacgctcagtgcatcattcggatgaatggccgtcgaaacaaattcgaagatcggccggtgtgtgacccgtgcacatacgatgtatcgcgacagcggggcgagggtccgcatcaggtcttcgcgcgggtaggacatcagccaccagcgctttaaaaagttttcgtggtgcttgttgaccttcgcctcgggatcgtcgtccaaggcttccttatttcgtgcacgctccttctttgccgcttccttccgtgcggggagcaccgtctgctccagatgctcaaacggttgcttgaatgccttggccttcaaaagatcgcgcggctgaaagtcgatgacgtatctgcattcgagtttgtctacagcgccgaggaagtcgtcggcgatcaagaacgggaagagcacctgcgcgttcgccttgttggccttcatcatcgctttcgcttcggtcggctctagaaggaaacccttgtgaccgtgtgtctgaccctggtagcagccgcctttttcagcgttcgccttgatgcgttccgcttggctcacgtcagtcgaaaacgagagcgaggtattgatctcttccaaatctttgtagtcccaacccccggcggggtcgtttcccgactggatgtataggcgtttcttgccatcgtcctcgccctttacccagttcacgatcgatacgtggacgaccgcgtcgcctgaccacggcatagtcgagaccgcttcggtgatcgtgccatcatgcttgacgatatggtcaaggccgctgatgcgggaataattctggcgaatcgtgtttgtgccgaccaggcccgccctctgacccggcttaagctggtcgtgcgctttcctaaaccagtagacgcagtagtcggcccgtccgtcgatatccggaaaagcccctcgaatagtgttgagataggcgcgtccgaattcttgctgggccttgttcttgctctggtacggcggattgccgatgatcgtatcgacctcgggccattctgacagcagcgcgtcacggcacaggatatttccgtcgagattgtcgagaggaagagcatcatcttccgccaagggcaattcgatctggtcgcgctccagaacatcggcggcctcgttcaaggcgagctttttcgcgagcatcagcgtgacttttgtaagctcgacgccgaaagagtcccgatcaacgccaaaaaattgacgaggactaatgagtgacgtggcctgggcctgcttctgaatggtcttccagctgaactctttgtccagcctggccatgagtctgatttcgaggcgtaccatctctctgtaggcgacataaaggaaattgccgctgccacaggccggatcgagcacacggaagttgaggagcgcttttctaatctccaacagctccgtcattgtctttgcggcgtcaatacgctcccgccaggggcgcacgatcgtaggcccgacgatccgttgaatgtcggcctcgtgagtgaaatgcgcgccataggcgtgccgttctcccttatccatgctctgctggaagatggtgccgaagatcgctggatttatcttggcccagttctgccaagcggccccttcatccttcttgccgagcagctccagctctttcttggtcagctcgacgggcgcaaccgtggcaaaaagaccgccgttgaaatagggaacgcctttgtagcgaccgcccttggcagctgtcttgttgttcatctgctggaacaggccgccaaaaacatcgtatgagttttgcccgtgctcaaggcaatcctgcaccagtctcagggtcgttccggccggcatcatgtcgatgtcttcggcaaacatcgcgacgaccgcctgcaacacgaaacgctgcgcctgctctcgcggaacgccgcgtgcgaccatcgatcggaacagctgagcgacctttgctgcagcaatacgcgaaacctcttcgcggtcgttgccgaaaagagggtccggattgtccgcgaacaggaagtttagcgccgtgtagcggttcggcaggtcttcgagccgcacgatatccacgggctcgttgagctgcttgtcgaaatcgtaaatccagaactctttgaagttgcacagaacgacgtaacgagggcgattgggaaccgcgttcagccagtagtcgaaagcctgttggtaatgaagatgcagcttttcgctgcccttcttcatttcgataagaagtcgcggcttccacaccaggtcggcgaagttcgttcctttgcctgaagcctttttcactcggtattcgagttcggcaccggcctctttgtaacccttatggccgaaagcctggaatagccggtcgcaaaaaacctgagcttctcccttctcgtcacccttcagggtttttgcgtaagcgacgaatgcctcaattccctttgcgagttcgctcatcccgcttttctctcggtgtcagcgtcatgctccaaaagctgcacatctaggctcggaatctccggcatggccttgccggcgatggcctgaaggtctccgaccatgccaaccgtggagtcgacgaccgccaatatctgcgtctcgcgcttggcccactggcgccccatgaatttgcgttccctatcgagatcgtcgcgcatgtcgttgaatttctcgactacggcttccacccgctgcttgaatttggttccggtcaggtaatggtagacctgctccatctttgtctgctgcccttgctggacgagacgagagctgctcacgtcgaccagcgcttggcgcagagcgacggcaaccggcaaggcacagcgcgggtgagccacccatatgccgtcaaccaggtcaaaatgctcaatgtgtttgggcagggtatgagaaacgatgagcgccacatcggccccggagcggcgctgatcgtcgcgcaacttggccagccacccatcgctccaggctttggtgcgcttggtctcccacaggatgatgccagcaggctggccaagctggccattgacctgctggatcatatcggcaccaagttcacccttgccgacgggctcaatgacgtccatgggaaaacggctcttcagaagttcctcaagctcaagttcgagaacctcaccctgcgactgctgcgatccttgctcggccttacgcttcagctcctcgatggtccgcgtcatcgactctatggtctggtctttctccgcaacccgcagccgtgcggcctcatcggcttcctgccgggcttttgcgtgaatctggtcgaccgacgcttggacgcgcttttcgatggttagatcgagttcacgcttttcctcatcgagcgcccgctgcttgcgcatcagctcggcctgggcctgctgcgcttcggcaagcttgaggttgttggcctccaacgcttggcggagctcggccgtctcatctgccttcgccttcaattcggctgcggcagcttcgcgcgcctttttggcctcagcggcaaccaactggctcctctccgcggccaggcgttgcttgacttggtcatcgagcgtttcccgatccttagcgagctgttcgcgctgctggctcagctcctcggatttgcgcgcgacctcggcatccttgctggcaagctgttcctgaaaacgttggcgagtctccgcgaggaggggggccgccagtgactccgtcagccggatttcgtagttgcaattggggcagttgaggaggggttcgtgcgcagttccagccacggttgctttgaatgacatgaaccccccagtacctttaggccggaatgaacgtgatccggccggcctcgccgcgcttcctgtgcggctttaccgttatttcgacatcctggtcgaacgctgtcagcatccgcatcagcttttccactgaaaccagcttaaattgaccccggagcagcttggataagtcaggttgtttcatttcgaccagtctagcggctcggtctccttttgttgccttataaatagactcggcgtcccgcaggcgttgccgaatcaggtcaacgtgcctttgcggtgtggcaattcccctggtggatttcttctgaaacgcgtgcaggacgtacaggaccctccagccgcgttgtgtaggccgtccgataggtatcgccgtcaaagttgtcgcgaatctccagtacaccgctgaagcctttaagcggcttcgcattgcgcggatgttcgccgagctgcgcttcaaaaagggactggccgatctcgcttcaggcggccacggggaacggggtgcccccagcctgcagcttgacaatacaacctgacagacatccactgcacaatccatgattttatctatctatacctacaatcggtattggggtggccatgacaggcgacagcgatttatttgattggtgtgcggcacgtcccagctggcaacaggaagccatccggctcttgaccgccaagcccaagctggacgctgaagaactcgaccagcttgaggaggcagtaaagagggacgcaaggatcgctgcgggaacgtcgccggtctggcctgccttgacaaagacgcatctcaaggccggcaacaagttcgctcccgtcaccgttctgggctcgatcggcccgcttcgcaacatcgaccgtctggcggcggggcaaccaccgatcaagtttgctatcaatggcatcacactcatctacggggccaacggttcgggcaagagtggctattgtcgcgtcgccaagaaaatctgccactgtctgcatgacgtgaccttgcgcggcaacgtgttcgagccggcctcagccgatccacgcgaagtcaccctgaccttccgtgtcgatggggaaaaggcccgtaccgtcgtttgggatgatcggaatgcgccgccgcccgaactgggccgcatatccgtcttcgacagtgatgcggccgggctttatgtcgacgctgagcgcaacatcgagtttttacccttcgaactcgcactgctgaccaatctcgctgaggcggtccgcaccctagacgggcgcttcagggccgaagaggcgcgattggtcaaagcccaccaggccccattgccgcagggatatgacaagcccacgaaaatctcgaccatgctggcaaggctgaaagctgacgaacagctaccagacgaggcttccatgcggtctttcgccgtgtgggaggagaaggacgaggctgatcttcaggcaatcaagctggagctggggagcgacccggcacttgttaagagggtcaaggaggcggccaagtcagcggtcgatacgtttgtcgccgatgcgaacgctatctttaaggccctcggcaacgatggcctagcggccctgaaagaggcgcggcagaaggctgctcagtcacgggacgccgcgaaagcagccgcttccgcccttgcagctgaatcagcggtcccgcagctgggcagcgatacttggcgtcagatgctgatgtatgcgcgcgattttgcggccgaagcgtttcccaccgttgagccgccccagctggctaatgccaatacgtgcgtgctctgtcatcagccgctcgatgcgcaggcacaagaacgcttggccgcttttgatgcgtatgttgaaggccgcgccaatgccgacgctgaggccgccaaaaaggattttggcgaaagggccaaagcgatcctcgacctcaaaatcgttggcggtcaggacatcaaggacaagctggttaatttcgtcgaagcatcgaaaccccgccaagcgctggtggatcggcttgaccagttttacaccgccagccaagagcgccacagtcttgcttcattagccattaaggccgtcgactacgcgagtcttggtggtctcccagatctagaccgcattgtgatcgacgatctggtggcagaagccactgtcctcgcgaaagagatcgacgacctgaaaccgacgccggatcaggccgccaaacgcattcagcgtcagcaaaagctcgatgaacttgaagcgcggaagaagttctccgccgatattgaaacgttcgtggcgcggcgcaactcgcttgagctgctggtcaagaccaaggcttgcacgacagcctgttcggtggccggcattacgtcgctcattacgcgtatgcggcgcaaggttttgaccacatccctgcaaaatagccttcaggacgagatcggcgccctcgacctcgggcatctgccgctaaaactgtctgaccggggagaggtgggcaagagcaaagtccagatcgggctggaggcgaagcagaaggtcggcaagaacagcgacattctgagcgaaggggaaaagcgcgcacttgctctggcaggctttcttgccgagctgaaagaggtcggcgtgaggcacggcatcgtcgttgatgatccggtatcgtcgcttgaccacgcccggatggaggcggttgcaaagcggctggtgaaagaggcaaaagcccgtaggcaagtgatcatcttcacgcacaacctgttctttcatcacgccgtattcgaagaagctaaggatatgaaggtccccctgcggcaagaatggattgccaagcatggtgacggacgcttcggcattatcgatgacggccagcaaccgtgggtttcgatgagcgttacaaagaggcttccgatcatcgatggtctgctcaaagcaaagaagccaacgtattcggaagccgacgaggccgagcgatcgtttgtgactagtatctacaccaagatgcgcgagacctgggagcacaccatcgaggaagttctattcgccggcgtggtcgggcgatttcgaccaaacgtggccaccatgcaattaagagcagcccatgtcgacaagtcggactatgagacggtgtacgctggaatgacgcggtgctccaagtactccggccatgatcaagccgcaggcgtccccgccgatctacccaagttcacggagatcgaggcggactttaacaagctcaactcatatgtggttgcggcgaatacccgccggaaaaaactcgaggacgaaggccgcaattctgaaaagagtccgatgccagctgacactctttgaagcatgggtcattgaccctcgggcggaattcggtcaccgcaaatgccgcaatctttatgagcttccgtgcgcggaataactctggtttgtccgcagttcgggcaggaagccttcatgcctgccggcacgaaaattggttccggctttttgactggcggccaacccttgtaggtgccgggtacaaaccggacttgccactgacgatcctcgttctttcggacagaatagccgttgtcccgcagtgaatccttgttggcgtgccaaataggccaaaaccccggcttgaccggcccccatttcgcatgccgcggcgcccacctgggtttcgacatcaagcctcctgcctatcgatacaatcgagagcagttaagacattcaagtgctcgggaactagtgtcgcttcacgcgactggtaagcgggtcggccttattatccagtatcttcagaatcccgaccgctttcagccgagcgcttctcatccatgtctcgtcgattctaccattgaccaccgccgcctctccagcggctgccttcaacacggtctctatcgcttgcgctgcatcgttgatcgcgacggcgtacatttcgtgaccgatttgatctttgtccttggtgaccaagaccgtcaccatccaacgcgccatgtgaatttcctggttagcccgtgaggggcgcgtcggcacatacgatccgccatttcctaaccagttgcgtccacgggtttcaaccgggatatcgtcgagcagctcacgttgaagccggaggcaacttcctccatccggcttcgccggaagcgggctctactcgcttcgctctccgagccgcctgcggcgcctcggcccttcgggtacccttctctaccgatctcgtcgctgcatccggtcccgcgtgccgccttcggtgtcgctatgctcatgctcctgcggggggccgttttctgctgaggcgatgcggcattggcgcgctgatcgagcctgcggccttaaggcgaagcccgcccggcgacgcatgcgtataacgcgaccaagacataggtgaccttgccgtgacgagcggccgctggttttgcccgtcataccgccgacccgggcgggtcttccttgacaccgcgggcgacgatccgcagcgtcgcgtcgggtagaggccgctgcagcttttagcgcttcgtccgaaggagccgtcgtccaagtctcaacctcttccggcgtcgtcaggatcaccggcatcgccttcgggtagacggcgccgatctcggcgttcggctccgtcgtgaggaatgcgtagaggtcattcgtggtctcgccttccttgaccttccgcacggacgttcagttgatccagatgccggcgaagcaggcgaggggacggggctcatcgagcgcgaaccagatatcgccgccttcggccttgttgaactcactgaacgaattgaacggtaccacgcagcggttttcgacgccgagccagcgggtccaatgtttgctcttcacgttgcggatgttggtcgtgccgttgtccggctccattctgagcaattcattgaaatcgacggtcttgcccttggcctgcagttcttcggcccgctttttagtggcggccatcaacgcctttgatgacgacggcattccccaccgcgcggtggcgagctcgcggccctggctccgttgcggacgatcggcgcctggtagtccggaaacacccccggcatcggtgccagattgccaacgtatcggttcacgacgcgaaacggcgcgatgatggcagcctagtttgtcgtgatcgaatagaggttatgccgacgtcggcatataaagattgcacatttcagcggtcgctctcggcgggcaacgacatcgccaggccgcggcacttcccgtgaccgaacaccacttggtttgcatgtccagccgtcacgatgacttcctcaccccgttctgttcaaatgatcgcatcacgatgccgtcgagaatcttgccggcagcggcccgaacctttcgctcagtatctcgaggcatcggtggcagcttttggctcgccacgagatcggtaagttccctatgtatatccgtacggaagccacgcgggtcatccgccatttccgacagaagctgaaatagcgtcatgagcatgaactggatcgccatgtcggctcccatctgctcggcttggtcagccgtgatgaaagaccacgtgttctgatgtttcatcgctatttcaccacacctgaccctatcctgtgtaggtccgaaagcgtccgcgcgtgtaggcatgcgatacggcgttcctcaactccgctatctccgattccaggagattgttcgcaatgattagcgcgcgaacagccgcacgcggatcgccgtcgcagacggcgatcgcctggtcgacggcggcttcaagaccgttgtcgtgttcgttcggctgggagaccgaggacatggtctgatcttggttggccgtcgatgatgcatgttcgtattttgttctcgtggagtcaagtgcgctggacctactcccaacgaggtgggccaggtcgcctccgtcggcctgattcgaatttgcccgcggctagtggttcatcacagtgattttgacgttttgataccgagccattcgaggatcggcagggtttccggcggcacgaggatttcgatgcttctggggacgccgggttgacgtcggatgaagccgtttcgttcgagggtgacgatcatctggtggaccgaaggcgggctgacgcggaagtggcgctggatgtcggcttcagcgggtggacgtccgaacatgtgggcgtaggtatggatgaaggccaggtaataaccctgcttctcggtgaggcgcgcgcctgatttttgactcatcgttggattcgtcccggcctccgacaaggaggcaaagcatgaatgtacgttatcgggtcgaattgagccaagccgagcgcgacgaactgacggagatgctcggcagcggcaagaacgccgcccgcaagcttaagcgggcgcagattttactggcggccgatggaggctgccgcgacgaggagattgcccggaccgtgagtgtcagcctctccaccgtcggccggaccaggcgccgcttcgtggaaggcaatctggagcgggccctgagcgaggagccgcgtccgggcgctgagcgcaagctgaccggcaaggaggaagccctgctggtggcgaccgcatgcgccaagccgcccgctggctgcaaacgctggacgctgacgctgctggccgacacgatggtcaagctcaccgatcacaacagtctgtcgggcgagaccgtgcgtcgccggctggccgagaacgacctcaagccgtggcgcagggacatgtggtgcattccccatgtcgacggcgaatacgttgcccgcatggaggacgtgctcgacctctacgccgagacgcagaatcccgcccggccgctggtctgcttcgacgagacccccatccagctgatcggcgaggtgcgccagccggtcccggcccaaccgggacagcgcgagcgctacgattacgagtatcgccgcaacggcaccgccaatctcttcgtcaccttcgatccacatcggggctggcgcaacgtcaaggtcaccgaccgccgcgccgccgtggactacgcccactgcatgcgtgatctcgtcgacgtccattatcccgacgccgcctgcatccgtgtcgtgcaggacaatttgtcgatccacaagcctggggcgctgtatgaggccttcgcgcccgccgaggcccggcgcatcctgcgccgcctcgaattccacttcaccccgaagcacgccagttggctcaatatggtcgagtgcgagatcaccgtgctacagcgtcagtgtctcggccgccgcatcgacgatcccaaaaggctccgaaacgagatcgcagcatggcaaaagaggcggaataaaacccgagcccgcatcaaatggatgttcacaacagacaaagcccgcaccaaactcggccgcgcctatccagccaccgccaaagagtcataatcactgtgatgaaccactagcatggttctgtggtagaaggaacttgtgcgggggtgtgcatcgatgcccatctatcgcctactacaaaattctccgctgggcccggatgaaatagcggttttgaccaatgcttatgagcgcaccttgcgcaagctcagcttggttgatcgcggtgatcccatcgcagaattgatcgccaaaatagttattgaacttggtcagcgcggcgttcgcgacgcgaaacaattatccccctcgccattaaagagcttggcgtcgaataggcggtaggggagccatgctatcggcagtgattatgggtttggtcggacttgtggtggtgatcgggattgccatcctgataagccatttcaacgcccgcgcgtgaacagtcgccatcagaaagttaagaccgcctcagcctggccccttcgtcggacaacacgaagcgcagatatgatggcgtttagcgcgacgccaaacgcggcggccggggaatctatgactttaccgcggctagatccgcgcaaacggaaagccctccgactgttcggacgacgcaaatgcccatcgctgatgaactccagtgcggcgcgttcaatccacaacgacggtgacctatccccacagtcgcgcaggtggctctggcgtggtttgggcgactcacgctaacccatcaatctcaaccgcctcactgcaccaaaaggacaaaaatggttgcagccaaccgtgaactgccggcttctggttatgcgctcgaagtggacggccgactcaaaaccgaatttgcaaccaaagacggcgcaagggcaggtggagaagaactaaagaaacgttttcccatgcttcagatcaggatctatgacgcgcagacgaattcgcgcgaggaaatttagctcaagtctaggcggattctctgcttgtgcgcatccgctagccgcggaccgggctctcgtgttggggtggacggcccccttccgccacactgcgtggcaagatgaggtcgtcgctgacccaaacgaaggagccgcccgtggaaacgattgttcgcatcggtttggatacgtcaaagagcgtatttcagttgcatggcgttgacgggaccgagcagccggttttacggcgtaagttgaggcgcggacaggttttggagttcttcagtcgtttgccgcctgcgcttgtcgcgatggaggcgtgcggggcatcgcactattgggcgcgggagttgcaatcgctcgggcacgaggtggtgatgatcccgccgcaatatgtcaaaccgtatgtgcagcgcgggaaatccgacgctgcggacgccgaggcaatttgcgaggcggcaagccggccgaaactgcgcaaaaactttgtgcctatcaaaagccccgagcagcagggcgcacagatggtggcgcgcgtgcgcaaccagttcatcggtaggcggacccagctcgccaactcgatccgcggctatgccgcggaattcggctttacagcgcccaagggactttcgcggcttcaacaattgctgatcgacattcaggctgacgcgacagtcccggagttgacgaaggagttggtggacgctttggcaacagaactgacgcgcgtcgatgaccagatcgccaagctcgacaagaagctcatgcaactacaccggagtaacgagatgagccgacggctggcggctattccgggcgttggtccgatcggcgcgacgctgctgtcgatcaaggtcgtggatgcacgcgcgttcaagtcggcaagaaattttgccgcctggcttggcctgacaccaaagaatcactcgacggccggaaagaaccggcttggcgtgattacacgcgccggtgacggcatgttgcgaaccgttttggtggccggcgcgacggctgtgatcgcagatatgcgccgacgggaaagtcgctcctggccttggctgaaagacatcatcgcacgcaagccgccgaagctggtggccatagcgttggcaaacaagctggcgcggatcgcctggaaactgatggtcagcggcgagcggtaccgacctgcaagcaacgtcatgccgatgccgacatagacttgaacgaaatgcagagcttggcgccagaccggcaggtttgacgctgggggcggaacttgcaggacaggaagaggtggtacgttcggcgcgagccggtcagtgaaatgctccgctcggtttaccggcagaaaatgccgctctcgtgtttggatctcactgtccgcgaagcccatcttggccagtggtcgcaagacctgaaaacaggccggacatatgagcgcaagcgatccgagcatgctgccagagccaatccttgcaagtcgggggccgtccacatatgaaccgagccgctgacgcttctcggccgtcccggcttcgatcccttgcgcgatacggtgtcgctcgccggaggctctcgcgttaggggccgccggcattgcatgccggcgccgctatcactgccccgaacgcgggtgccttgttaaccggtctcgcgactgcagtcgcctcggtgcccgcgggcattgcatgcccgcgtcgctatcactgccccttcgtcggctgccttctctcttgcctccgctgcgcttcggcctcaaagggacggcgctgaccagtcgtatggcaactctgcgcgtgccaacggtgtgctcggttcttcggttcgagggtggcgtggctgccaagccaattgtattggggtcgtcgcggggcgtcggcccgccttggcgcatttgcggcggcgcagccggctggcgagatcgtgcacgaaggtggccggcggatgcttcaccgccgcgaggttgacctcgctcggcgtcttgcagcgcgcgcacctgatctcaagccaggggtggcctccatttacggcgaatgcgcgctccgtgtccccgtcaccgtcgcggagagtgagagtgcgggccgggtccgacgcgacgggttgaagatcgggggagaggcctccggcgcccgtcgcggagaaccgcgatgtctggacataccgcccgagttcgtgccggcaacgaccgaacgagcctttacaccgaaatcactgacaagatcatagccgagctggaggccggccgttttccgtgggttcagccctgggggacggcgtcgatcaaggcgccgctcgcgatgccgcgcaacgcgtcgacgcagcgcggatattccgggattaacgtgctgatcctatggggtgccgttatcgagcacggcttttcgggacagagctggcttaccttccgccaggcactccggctcggcggccatgtcagaaagggcgagcggggaacgaccgtcgtctatgccgatcgcttcaccccagacgacgaacgtcggcgcgccacggaggccggcgaggagccgggtgccatcccgtttctcaagcgctttaccgtctttaacacggatcaatgcgatggcttgcccgaggatgtcgctgctttggtggtcccgccgccaccaggccagattgagccgcgagccgaggccttgatcgcggcgaccggcgcggatttccgcatcggcggtgcgcgcgcctactacaacacgacgggcgatttcgtacaggtgccgccgccggctgcctatttcgaaccgatcaactggcaccggaccgctttccatgagctcggtcattggaccggccaggcatcccgcctcaaccgcgaccacaccggttcgttcggctcaaaatcatacgcgcgcgaagagctggtcgccgaaatggcgggtgccttcgtttgtgcctcgctcggtatcgtgccgaccgtgcgccacgctgactacatcggttcctggctggaggtgctgcgcgaggataatcgcgccgtcgtccgtgcggcgagcgcggcatcgaaggccgccgatttcctgctcggctttctgccgcccgcgatcgattccgtggttgggggcagcgaggaagctgcatgacggatccgcacgctgtgcccgtatctgtcctcagttgatgctgcgcgtcagagagtgagaggcgtgccggcttgtctgtgacgggaaggaggtcgggagagagtctttcggccgcccgtcatggagaatccgacatggcatgcgtcgtccagaagatcaaactcagtccctcccgcgatattcccttcaacaagctggtgctgagccagtccaacgtccggcgcgtagaggccggcgtctcgatcgaacaactggcagagagcatcgctcagcgcacgctgctacaaagcctgagcgttcgtgcggtcgttgacgccgacggccaggagaccggtatgttcgaggtgcccgccggcggacgccgttaccgcgcgctcgaactgctggtcaagcagaagcgtatggcgaagacgcaacctgtcccctgtgtcatccgggatggcggtatcgccgaggacgattccctcgccgaaaatgacgagcgggtcggactgcatccgctcgatcagttccgcgcgttcaagctgctacatgacggcggcatgagcgaagaggatatcgccgcgcggcacttcgtctcgccggcgatcgtcaagcagcgccttcgtctggcgtcagtctcgccgaagttgcacgacgtctatgctgacgatggtatgacactcgaacagttgatggcattctcggtcacgtccgaccaggcgcgtcaggagcaggtctgggacaacatcagcagatccggcaatgacgagccatatcagatccggaggatgctgacggagaacaccgtgcgcgcttccgaccgtcgcgcccagttcatcggactggatgcctacgagcaggccggcggcgccgtgatgcgggatctgttcgcgcacgacgatggcggatggttgcaggatgtgccgttgcttgatcgtctcgttaccgaaaaactcaaagtcgaggccgaaacgatcgccaaggagggctggaaatggatctcagtcgccgtggactttccctacggccatgctagcggcatgcgtgagctagagggcaaacctgtcgatctctcacctgaggagcaggccaccatcgacgccctcaacgccgagcaggcgaagcttgaatccgactaccaggatgccgacgaattgcccgaggaggtcgatcagcgtctcggcgaaatcgagcaggctttgatggcattcgaagaccggccggtgctctacgatccgacagagatcgcccgagctggtgtcttcatcagcatcgattccgagggacgcctttccgtggaccggggttacgtccggccagaggacgacgtgccggcaactgatgctgatatcgagcagagcgccgatccgtcgtcgaccggagggcaggaggcaggtgcttgcattcggcgagcggtgatcgcggttgcaggcagcgctgctgatgccgacgaagatgatgaggatgcggccaagcctttgccggatcggctcatcacagagctgacggcgcatcgtacgctggcgctgcgggacgcgctggcagaaagtcctgcgatcgcgttccaggcagtgttgcacaactttgtgctgactgccttttaccggttcgcatcatcaggaagctgccttgagatcgggcttcacacgccgacctttcccgcccaagcccctggcttaagggaaagcgcgtccgcgaaggccgtcgaggcgcggcatgagtcctggaaagcacggctgccgaagagcgagaaagatctgtgggacgcactcacagccctcgatggcggtgcgcaagcgtctctgttcgctcactgtgcgtcatttgcggtcaacgccctctatgagccggccaaccgctacaatcagggtcgcgtctccgctcacgccgtccgcacgcggctcgaccaggccgacgtgctggcccgcgcggtgggcctcgacatggtccaggctggctggagacccactgtcgacaattatctcggccgggtcaccaagcctcgcattttggaggcggtgcgggaggcaaggggcgagtcttccgcgcagctgatcgaccacctgaagaaggccgacatggccaaggaggccgagcgccttctcgatggttcgggctggttaccggagccgctgcgtctcgtcgaccccgccgcgtcgccagcggaagaggagggtgaagcgggtccgctgcccgatttcctcgccgacgaggaggaaggggagaacgccggcgacgatgatccgcaacagctcgatgcggctgagtgacatcacagagcgggatggctccggctgtcccgcagttttggggaccggtgcagagcgccggtcccctttttattggcgatggctgagaggtagaggcgggccgggaagggttttgagtcgccgcggtcttaaaggagagcgccgagcggttcagcccattcctgctctcccgagaaatcctcccatgaccgaatctctcgccggcggcgccgtcgcgccgctctcgatccgtgccaccgcagttgtcgcctcgagtgtcatcagggctgcgcgacagcttttgaccgatctcgagcgcagccgccggatcgatgccgctgtcctgcgcggcgccatggaggctgccttcggcgcctccgatgcgaccggggtctggaactggaagacggcctacaacgcctgcgaggcggcgaccgtcctgttgctaaggcgatatggcgccgtcatgcgcaccaaggcgacgtcgccagccgcgatgctgccgatgctgatgaggatcgcgagcctccttccgactcagacacgccgatctgtggagagtgaatccctccagcagttctccactcctatcgggctggcgtttgtagccagccgagcggccgcgatcacgcctactgacgtcgttctcgaaccttcagctggcaccggccttctcgccatcctggccgaacttgacggcgcctccctggtccttaacgagttcgccgagagccgtgctggcattctcgcgcagctgtttcccggcgcctccacgacccagtttgacgccgctcacattaacgaccacctcgatgccggcatcgtgcctgatgtcgtgctgatgaacccgccgttctcggctgcggtccatgtcgatcgacagatgcgagaggcggcactgcgtcacatcggatccgccctggctcgacttcccgaaggcggacggctggttaccatcacaggcgcaaacgtcgcgcccgacaatcccgcatggacctgttccttcaagcggctgcaagaacaaggccgtgtcgtattctcggcggcaattgacggcgccgtctatgccaagcacggcaccaacgtcgacacccgtctgaccgttatcgatcgagtcccggctgacgacgtcgcctcgttcccagtatctcccggcattgcgcccgatctgccgactttgctcggctgggtccaacagcacgtgccgccgcgtcgtccaatggctggcacagcggctggcgtggtgccggcaattgccagccctgcaacgcctcgaacagtacgtgcctacgtcgctcagcgccagtcggctgcagccgtgccggcaattgctcccgtggcgaccgaagtcgcctacgagccggtggattggacgcccacggatggcggcagcatcaccgattcgctttatgaggcttacacactgcagtcgatccgtattccaggcgcgcaaccgcatcccacaaagctcgtgcagtccgccgcgatggcttccgtcgcaccgccggagccgtcctaccggccgcacctgccggctaacgtcatatcggatggcatcctatccgatgcccaactcgagagcatcatctacgccggcgaggcgcattccgcgtttctcgcagcgcctggacagtcgatgcgacttttgacgtcgtggcggccgcgcgcgacgacgcggaaaatgccgttcgctttcgccggggctggttcctgggcgatggcactggcgcggggaagggccggcaggtcgccggcatcctgctcgacaactggctgaaaggtcgccgccgcgcggtctggatcagcaagtccgacaagctcattgaggatgcgcaacgcgactggtcggcgcttgggatggagcggctcctcgtcacgccgctttcccgtttccggcagggcacgccaatccggctcacggaaggcatcctatttaccacctacgccacgctgcggaccgacgagcgcggcgagaaactttcgcgcgtgaggcagatcgtcgaatggttgggctccgattttgacggagtgatcgtcttcgacgagagccacgccatgcaaaatgcggttggtggcaagggcgaacgcggcgaccaggcggcctctcagcaggggcgtgcgggcctcaggctccagcacgccttgccgaatgcgcgggtggtctacgtctccgcgactggcgccaccacggtacacaacctcgcctatgcccagcgtctcggcctatggggcggcgaggattttccgttcgcgacccgggccgagttcgtcgaggcgatcgaggagggcggggttgcagcgatggaagtgctggcgcgcgacctcaaggcgcttggactctatgccgctcgctcgctgtcctatgagggtgtcgaatacgaactggtcgagcaccagctcacagcggagcaggtccgcatctatgatgcctatgccggtgcattcagcatcatccataacaacctcgaggcggcgatgcgggccgctaacatcacgggcgagaccggcacgctgaatggacaggcaaagtccgcggcccggtccgccttcgaaagcgccaaacagcgcttcttcggccatctcttgacctcgatgaagacgccatcgttgatccgctcgatcgagcgcgatctcgacgccggccacgctgccgtcattcagatcgtctcgacgggcgaggccctcatggagcgacggctcgccgagatcccgaccgaggagtggggtgacgtccaggttgacatcacccctcgcgaatatgtcctcgactatctcgcccattccttcccggttcagctctacgagcctttcactgactcggagggaaacctctgctcccggcccgtctatcgggacggccagccggtcgaaagccgggaggctgtcgtacgccgcgacagcctcatcgagaagctcgcgtcattgtcgccggtgcccggcgcgctcgaccagatcgttcagcgatttgggacggacatggtggccgaggtcacgggccgctcgcgccgcgtgatccgcaagggccagcgtctcatcgttgagaaccgtgcggcatcggcgaatctcgccgagaccacggcgttcatggacgacgtcaagcgcatcctcgtgttctccgacgcgggcggcacgggcaggagctaccatgccgagttgtcggcgctgaatcgcaggttgcgtgttcattacctgctcgaacccggctggaaggcggatgccgccatccagggcctcggccgcacgaaccggaccaatcaggcgcagccgccgctatttcggccggtcgcgacagacgtgaaggcggagaagcgcttcctctccacgatcgctcgccgcctcgacacattgggcgccatcacccggggtcagcgccagaccggagggcagggcctgttccggcccgaggacaacctcgaaagccagtatggccgtgatgcattgcgccagctctacatgctgctggcgcgcggcaaggtcgagggctgctcgcttgagagattcgaagatgcgaccggactgaagcttatggatgccaacgggctcaaagatgagcttccgccgatcacgaccttcctgaacaggctgctggcgctcactatccaactgcagaatattctgttcaccgccttcgagcagctactgaccgcccgtatcgaaggcgcgatcgcatcgggtacctacgacatcggactggaaaccctccgtgctgaaagctttgtcgtcactgatcggcgaacgatctatacacatccggtgacgggcgccgagacccggctcctcacgatcactcagcgccagcgcaatcatcctgtaagcctggatgatgccctcgaccgcctgtcggatcagcgtgctgtcccgctgatcaatgagcgctccggacgagccgccgtgcaggtcccagccccgagcttcatgctcgatgatggcgagatcgaacgacgcgtccggttgatccggccaatggagcagcacagcctccccctgaagatgatggcggaaagccattgggttgaagccgatcgcgaacgcttcgccgcggcctggcaggtagagcttgccgaggtggccgagttcaccgaaagcacgatccacatcgtggcgggcttgttgctgccgatctggaagcggctgccgaacgagtcgacgcgggtctatcggctgcagacggatgctggcgaacgcgtcatcggccgcaaggtctcggcagcctgggtcgcgaatgtccttgccgttgacgagcccaagctcgcgaccgacaaggcctttgccgcgctgatggaggggaggacggtccttgagctcgccgaaggcctccagctccgccgtgtccgggtcatggacgcatatcgcatcgaactttctggattcaacgacgcgatgcgcgaccggctgcgcgcgtacggcctgttcggggagatcatcacctggaagctacgcatgttcgtgccaactgacactgatggcatcgaagtcctggcgaaggtgctcgaccactacccaatcgagcgcatcgccgaacgggaggctgcgtgatggcccgcgacgcctccgaactggcacactgcctcgcgcgcgaagccgaagcggtgtgccgttattatctctccaacggcaggcgccaggggcggtactggctggttggcgacgtgcacaatacgccgggccgctcgatgttcgtgcggctccaggactcaccgaagggacccgctggcaaatggacggatgccgcaaccggcgagcatggcgatctcctcgacatcgtcagggaaagccttggtcttcctgacttccgcgccgtcgccgaggaggcaagacgctttctcaagctaccccgggctaaaccggaaggtgcctcaaaaccggctcgccccatcaccgcggttggctcacaagaggccgcaagacggctgtttgcgatctcaggtccgattgagggtaccgtcgttgagacttatttgcaccgtcgcggaatagcccgcgtgtaccatggtggcagcctgcgcttccatccgcgctgctactaccggcctgacgagcatttgccgaccgagacctggccggcaatgatcgctgccgtcaccgacctcgatggcgggatcaccggcgtgcaccgcacctggctcgatccggacggctttgatcgcgttcggctcggcaaggcaccggtcgacacgccacgacgagccatgggcgacctgctcggtaacgcagttcgtttcggtgtggctgacgacgacgtgcttgtcgccggcgaaggcatcgagaccatgctatcgctacgctgtgtgcttccgacgttgccgatggccgctgcgctttcagccaatcacctctcggccatgctgctgtcgtcgagtttgcgccggctctatatcgcccgcgacgccgatgctgccggagacgcggtccgggcaatcctgacgcagcgcgcagcagccgccggcatcgaagccatcacgttgtcgccccggcttggtgatttcaacgaggatctctacatcttcggcctcgatgctctccgtacggctttgcggatgcaactcgtaccagaggacgtctcccgcttcctgctcttgtcgaccgctgtcgcataggcgcgttttgtttcgacgccgacagctcggtcgaggcggtgccaatgccgaagaggcgcgcgacctcggccttctagagggcgatcggacggcaagcggcccgggccgccaatggctgcggtgcggctattttccgccggccctgcgggcctttgcatcgcgaagcaaaatagccgcacctctgccatcctccgctggcgcttcggccctccgcttcgctttcgggttctggcccgctccgcccgccgcctgagtgatcgccacgaaggccgcgatgggcgcggccgatccggcaaaggacctcttccatgaccgaccatgacgacatcgaaccgccgcacgccgcctctgcaaccgaccacgtcctcagcgaattgcagctcttcggctaccgtccatttgacgatgagccagatccgagaccgctacccgagggcaagatgatcgccggcgcagtcgccgatatcttcgacgccttggttgccaccttgagcgatacgcggctcgagccggaccttagcgatttgctctggtcgaccgtcaacctgttccatcgtgccgcggaccgaattgatcgccatctcgatgacaacgaacaggctcaacgcaagagccagcgcgagcagaatggttcggaagtacgatcggtcgaactcgagcgcctgacggccgaaggcatcacactgatcgagcgccgcaactgcctggagctgttccgcgatcaggccatcgagcactttgagctccacaccggttcaccctggcgcccccgctcgggttcgcttgtcaaccatcgcacgctcacggcggcaatgatcgactcccgggatttcatcgcagccaagcgccgcgcagagaccgaggtcttgttgccacctgggcccaagatcgcactcactggcggcctcgacttcaacgaccacaccttgatctgggatcgtctcgacaaggttcacgccaagcatccggacatggtcctgatccatggcggctcaccaaagggtgccgaactgatcgcctccaaatgggcgaccaaccggaaggttccacagatcgccttcaagccggactggaccaagcacgccaaggcggcgccattcaagcgcaacgacgccatgctcgaactcgtgccgatcggcgtcatgcatttcccgggcacgggaatccaggacaacctggccgacaaggcgaaacgactcggcattcccgtttggaaatttggcggcgcgtgagcgccgccttgccaccttccgaaccaccaaggcggagttgcaagcgccgcaactccgcctcgtttcggttgcatatccagaatcgcgccgcggtggtggtggaaggcgcgaccgttactcctttgcatacggagccaccaccatgatcgcccttggacttgtcctcaacaccgtcggcatcggcttgttctgctggctgatcttgacgctggccgtgtacgctttgccgttttttgtcgccgtcagcgccggggtggcggcatttcatagcggcgccggcatcctcggtgcgccgctcgtcggcattgtcgccggcggcgtgacgctcgcgattggacagaccgcattcgcgatcgcgcggtttccgatcttgcgtgcagccatagcggccgccttcgccttcccagccgcgattgctggctatcatgtggtcttcgcgatgtcgcaactcgggatgccctcgctggcatggcgtgaggtcttcgcgtgcctcggcgcggtctttatcggtggtacggcgtggacacggttggctgtccttgcggagccccgtccattggagtcgggcagggtcgtgccaagcgcatctccggcgggtctttctgccgctacgcacgacggatagtccctctccacctgcctcctcgatcagattcgcgcagatcggagcgttgaaggagggatcgtcgaactcgagcgaacgtaagcgttccttcgtgcggagcccatagcgagctgcgtcatctcggcccggcccatatagttgcgatggtgaggcccttcggtcgcggctatttgtcgtctgacaattccgccgtttcctgcatgtcgtttctttctctacgcctggaaattccgacttcttgcacattcgaaccgaaattggccaagtcttctccccaggtcgtggttcagcacgcggacgcacgtggcctctttgatggcttgatctggccgaagaccggctgcgcctcgatcgtctgagccgcaacgccgtcgctcaagactttcttcccctgggctacgcccattcctcgcgaggcaagaaagtctttacgacgtcgtcctccgcttcgctccggcccgcaaccgggtgcgtcgccgatcgtcctcggcctgtccatcgccatcgaggccgcggtggtcgcgggctcgaaacacaacaggagaagtgacatggctaacatcggttctttcaagaaggtcggcaacgatttccagggcgagatcatcaccctcagtctgcaggccaagggcgtccgcatcgtcgccgagcagaaccgctcctctaacgagaacgcgcccagccaccgcgtctttgtgggccgggccgattatgcgaagcgtggcgttatgcggagtggtggcgtctgagtgcaggttttccgcgggtttcgggaccgccgcgctccgcataatatcgtgagagaagcagcggcgcctcgcgcagggcgaggcgccgcaagcttgcgggtcagcgcgaccagaccagcgcgtagccgtcatcgaccgcgacgaggttggcgtagatcggcgctgagaaggacgggtcgtcgagcttcaccgaatgatagacggtgttctccttggaggtccgctgccacgcggcacctatctcgacgttgccggccatcacgcgcaggctcggagccttctcgttctcggacggttcggccggaaggaagcgcgccttgatgttgagcgagagcgtcttgatggtgccgctgtaggatccatcttcggcgcgggtgaaggtgccaatctgagccatggtgatctcctgttgttgtatccaagcccgcgaccatcgcggccttgatggcgatctttgagcgccgcaacgaccggcccgcagccttggcccgcagcgaagcggaggatggcgggctgagcgatcttgttgcctcgcgaggaatgccgccgcttggcggcaggggaagaagatcgcgaacgagccattgcgggtaaaggtcggcgagcgcagcgagcgtattgtggcgcgtgatctgccagcaaaaggccgctatggtttaggcggaagcagccccacaggagagcatcggctcaaaggcacttcacaactgcggcaatgacggcggcgtcacggcagcattccgctctcccggtgcaattgagcgccattaagcctcacccgtaagaacgcgaagaaccggcctatgcgcgctggcagcaacagcgagaatgcggcacgcgcaggacaaaatgacgccgccgagtgaggtgcgccgactcggtccaaacagccccgatcttctgtggacagacggccttgtcgtgacgccaagcgctcggaccgtcgcagaacgccgcatgctgtggcctccaagcaacaaaggaggcaatcatgtcgaagcagaaacgcaagcattggaacagcgtagagagtcggctgcactttgcgaaaccgtatgtcgatggcttcgagaactggcttcaagaccatggatacacgccgagcaccattgaagagaaggtgagactactcgcaggctggaccgactggatgcatgcggcgggttttgcgctcgacaatgttttggacgggctcactgcatccgcggctgccttcaaagggaagaagagcatccgcgcctacgccggcgcaggtcggctgttcatccgctatcttcaagatcgagaaacccttcccagatcggcaccaccgccatcgccgacagagatctggccgctccttgcggcattccggcgctggatgcgcgaccagcgtggtgtggtcaactcaacgctcgatacctatcagtcgaccctggtcgatcttctcgaagcgctcggcgacaatccaacagcctttaccgcccatgcaatccgagcctttgtccttgaacgtgccaagccgcacagccgcgggcgcgctaaatcgattgccgctgcaacacgggcgttcctccgcttcctggtggcgactggacaaagcccggtaggacgcgattatgccgtccccggcttcgccaactggcaattggcgtcggttccgagattccttgccgcagacgatatcgcccgcgccatcgcagcttgcgagggcgaagggcggttgcgcgacaaggcgatcgttctgctgcttgcccgtctcgggttacgggccagcgaggtggccgatctgaaattggccgacgtcgactggcggaatgggcgcattaccgtcgccggcaaatccagacgcgaggagtggcttccgctgacccaggaggtcggcgatgcgatgattgcctacatcgagcgagtcaggccaccgttgtcgacgccccgtttgttcatcaccgaagccgccccggttcgaccgctgacccgcatcgccatcaaatgcatcgtgcgtcgcacgctgctccgagccgggatcaaaagtgcccatcaaggagcccatgtgttgcgccattccgcagccacgacgatgcttcggcatggcgtcagtttgacaggcgtcggcgccgtcctgcgtcaccgatcgccggcaatgacgatgcactacgccaaggtggacttcgccctcttgtcggagatcacgcagccctggatcgggaggctgccatgctgagcgatgacgcggaacgttacatcgagcttcgccggactcttggcttcaagctccgaaagccgtcgcgacaccttcaatcctttgcgcgctttgcgacggaaaagggcgagagttatgtcagcgccgccacagcgctggaatgggcgacgatggcgccaactcggtgcacccggcatcgccgcctcggtgacgtggtgcggttcgcgcgctttttgcgggccgagaataccgctcatgaggtgccggtcattctctttgccgaacgcgcatcgcggcccgttccctatatctacacgccggatgaattgactcggatccttgagggcgccggccaactccgccggcaaaagcccaaccccttacgtcggcagctctatgtgatgctgttcggattgatcgccgccacggggctgcgcgtatccgaggcgctcgaccttcggttcgacgacttactggccgacggtgtcttgcatatccgcgacaccaagttcggcaaaagccggctcgtgccgttgcacccgaccgtggtggaggctctcgaccgctatctcgacaggcgccgccttgtcgcgggatcggacgatcacctgttcccctcggcgaagggcaagagactcgcctccagcacggtgaactatacattccgctgtgtcctgcggtttgcgaatattgctccggagcggccccggcggccgcgcattcatgaccttcgccatagcttcgcgacgcatgttctggagcaatgcaacaccgagcgcgacgcggtcgcccgacacttcgtcgcgctggcgacctatctgggccacgtcgatatcaagcacacttactggtacctacaggcgacaccggaactgatgaccgacatcgccgccgcggccgaaacgttgatcatgggggagcccatatgaccctccttgctcctctgatcaccggcttcctgcgcgactacatgccccgtcagcggggctatagtccgcatagctgcgaggcttatgcctacagcttccggctcttgttcgccttcgcggcgaagcgcatccagacaaaaccctcgcagcttcttatcgaacagctcgacgcggcattgatcctggactttcttggtcacatcgagcgcgagcgcggcaatggagccgccacccgcaatctgcgccttgcctcgatcaagacgttcatgcgctacgttgaataccaggtgccttcggctctggagcagatcggtcagatccacgccatccccgtcaagcgccacgatcagaagcttatccgtcacctggtcatggtggaggtgcgcgcgatcctgaatgcgccggacctcacgacacgtctgggcgtacgcgatcgggcgatgatgcatctttgcttcgcggccggactgcgtgtctcggaactggttggggccatgatggcgaatctatccctgcagcggccgccgagccttctggtcctgggcaaaggtcgcaaggagcgatgtcttccgctttggaaagaaaccgcagccgatctgcgggcgtggttgaccctgcggggctcggttcgtgtgcccgagctcttcgtcaatgccgaaggagcgccgatgacgcgggccggcttcgagtacgtgctggagaagcatgctcgggcggcggccgagacgtgtccgtccctatgcaaccgttcgatatcgcctcatcagctgcgccacagttgcgcggtgatcatgttgcaggccacacacgacatccgaaaggtcgccttgtggctgggccatgccgatatccgcaccacggaggtctacctgcggatggatccctccgaaaagctggaggcggttgaagcggtcgttccgccggagctgcggcgcggacggttcagagcgccggatgcgttgatcgcctctctgttagcggacacatcgccgccgccggcgtgaaaaagccgagcttcaccgagtggtcgcggtccgtcgatatcctcggtgcagcccttgctcgcttgcattgcccacccagttccggcagttgtcgttcgatcgcaaaccggcgagcgaatgccttgagccgtgcgtgatcgttgacgatgcggcagcgccatcatcgccgtggtgttggtatactgggccatcatctccgttgctgtgcgcagcctgcgaacacgcggaccttttgatgtcggatcacgccccgggatgcggtcgctgcgcttcccggcctgatccccgcaacgcttgcagcaacttctttccccgctgctgcgcagcttcctcgcgcgacaaacaagttgccttcagccgtcctgcgctgcgctgcgggccttacggctgcgggtcggccgtcccggggcttcggatcgccatcaaggccgcgatggtcgcgggcttgaaacagaaaacggagattatcatggcccagatcggtaccttcacccgcggcgaagacggcgtgttcgccggcaccatcaagaccctctcgctcaacgtcaaagcgcgcctcgtcccagccgacgaatccaccaacgacaaggccccggacctgcgggtgctggtgggcaacgtcgagataggtgccgcgtggcaccgcacctcgaaggagaacaccgagtaccactcggtcaagctcgacgatccgtccttcccggcgccgatctacgccaacctcttcaagggcgagaccgactacaccctcgtctggtcacgctgaccgaccgctaccgcgacggttcgcccgccgagccgtcgcggctcttccctcgggattatgtggagcgcggcgagcccgaaacccgcggaaaacctgcactcagacgccaccactccgcataacgccacgcttcgcataatcggtgttatgtggtgcaccacataacgccgagatcggagcagcctggtcgaagcgctccgaggagggccgcgactatctctcgctcaagcttgacgatccttccttcaacgcgccgatctacgcgaacctgttcgacgacgagggtggggaaggctacagcctgctgtggtcacgctcgcgtaagaacggcgactaaagcgtagagctcgctccgccccgcccgagttcctccgggcggggcttctgtttggttcactcttgggagatcgcgattgggtgaagctaagcatccaagcttcaacgctccgaccacgccaatatgctcgacgacggaaacgcctacgatttgtttccgcgcccagaccgcttcagcaagtctcccggctccgatcccaatgcttcggcaatttgtccaagcacagtaacacttgccgatacgtcgccgcgttcgatagcgccgacgtaacgagcgcttaagcccgcacgctcggccagttcctcctgcgtcatttgtagctcgtggcgtctccgacgcaggtttaccgccatgatctccttgagatccatagcgacatgggaacccgaaccggaacgatcgttctaggaacgatcgttcctattcgccacgagatatgctattcaatcaatacgcggaggcggacggtcgttcttgatcccggtggggatgcaatgccaagtcgggctggtggagccgatcaaaatagggctaaagtaagtctggcgaacagttatggcttgcagtgagttggaatcattcgctctgtgacgaacgcatgaaaaaaccacttccagatcccgacgtggccgacgtagctccgacagaccccgttctcacggtgtacgatgaggagcacgtcatcacgtatctacgaatgctcgatgcggacgcggaaggagcagactggcgcgaggtggctcaactggtactaaagatcgacccagagcttgagcatgatcgcgcaaggcgtgcgttcgatacccatttggctcgtgcgaaatggatgacggagaaaggatatcgtcatttgctgcgcggcggcgcatcaaatccgaatctttgaagcccttccgtagaggaatttactccctgatttccgtgtttgatccgatgcatcacgcgatgcaggatcagggacttcctcaaccaaagctggtcgggtttatcgcgtttcaatttcgcagtgcgatggggacgcgtaatgccaaaattcgattggagatcgccagacgcctatgatcgcgttcaagaggcggaaatcaccggactagcgtgggaatgtctccgccgtaatcccgatttcggagctgattgtcgtagcgccttagaggcgcttcccaaggcaagcccggaattccgccagcgttggggcttgtcttttcgtagctgaccccagccattcctgcctcgaacagaccgtcttctgggcgccggaagttctgccgacggtcgttccggtgcggcctgtatcgcacgcggtcccccaagcgagcgtcgccctggatctcggcagcttgaccgacggtcagctgcggcaaggccctgatggttggcacgcagtattgcgtttgcagaaggtagaacatcgcgtttggttcaaggaagcgccggtcgttgccggtacctatgcggtcgaactgccgctcgaccctgactttgaattccgcgcggatgcaggcaagcggctgtggcgcgccctcaatggcaggcctccggggccgccgctgcatgcgctttccacgcatcgccggcgccggctcgcgcttgctctgcgcgcgctcgatgcgcgcacggacggcagtacctaccgggaaatagcagaagtcctgttcggcgccggacgcatttccgaacgcgactggaagactcacgacctgcgcaatcggaccattcgcctggtccagagcggtcttgcgctgatgcgtggcggctatcgcgcattgttgcgtccgacatctcgcaaaaaataggacgcgcttcaggggtatcgaaaatgcgcccccttatcttcggcatcccccttcgaggctctactccgccaatgtgtccgttgacgcgccgccaaactcgctggcgctccagacgaccgcggagtttttcagatgggcgatcctaccgccggcttgccgccacgatacttgcgcaccgccgaggcggcccgattcctcagcctttccggccgtaccctggaaaaacacaggacttacggcaccggaccggcttaccgaaaaatcggcggtcgcgtcgtctatgcgctcgacgacctcaaggcttgggccgaccgtggcaccaagacgtcaaccagcgatcccggtgccggcaccgtgctgcctgcaaagcggcacgcacccgttccttatgcggggaaggagcggcgctgacagatgtccgagagcaatttctcagcacgggggcgccgtcgctctgagcgcgatcaactcgatctatttcgtgcattgcccggcgacttggccgcacgcgatgcgcaagatttgatggcctatccgttcttctcgctggcaaagtccaggcggatcattccgatcgattttcgcgtcgggaccatcctgatccgcgtcgaggccgtgccagagcacggcatggcgacgatctgggacgcggacgttctgatatgggcggcttcgcagatcgttgaggctcgcgacgctggcctgaagacatcgcgtctgatggccgcgacgccatacgagatcctgacctttgtcgggcgcggcaccagcgtgcgtgactatgaccgtctcaaagctgcactcgatcggcttcagtcaacgaccgtcgtgacctcaatccgccagccgacggagcggcggcggcatcgcttctcctggatcaacgaatggaaggaaacggcagattgccacggcaagcctcgcggacttgagttgatcctgccggattggttctacacgggcgttctgaacgatgcgctcgtgctgaccatcgaccgtgggtatttcgatctcaccggcgggctcgagcgatggctttatcgtctcgtccgcaagcacggcggccgtcagggcggaggctggagcttcgacgtcgtacaccttcacgccaagtccggcagcctatcgccggtcaagcactttgcttatgacctgcgccagatcgtgcgccggcagaccctgccgggctacgaactcatcatcacgcaggatccaaacggcgcggagcggctgaactttgcacctactgcgatcgacccgctcacagagcggctgcgaaagcgcgggctcgtacctcacccaggggaaaagctgtgaattcgctcgtgctatcggggaccacaactctcgtgccatcggggaccggatcctcgtgctatcggggaccagaatcgcactcaacgccttggcgcacaacatcttctcgacctcgtaactctactaacagggaatccttcggattccttctaacggacctcgacggccgggatgcggtgccagcaggacagttgccggcccaacagcggcgcgacgaccagaaccgcactcctcctttcaggcctgcgctccagcatcccggtatccagggtgcggttgtgcgtgccacacgtccgacactgacatggagtcgcaagtgaatgacgttacgactgtcgagcttctctggctcgaaaagcggattgagaaccggattcggtttggtcatccgatctctgaaaagatcgtcgaccttcatcggcgtgtcctctcattcgcgcccggcagcatctttgcgttcgtgcgctggacgtccaacgacttcgggaccgtgctgtcccggatcgacatcttgcgtgcggcggcaccgggccagcgctactcaaccgtcccttggatcaaccctggcggcgagagtctgctgcgactatctggctggccaaaggtcgagcgcgttctgcagctgatcgatgcggtagaggcactcgggatcgaccctgcggacgctgcgcctgactactggcaccacgttcacaaccggctgtcagtcaacgaggcgccgcgaacctatacgcgcggtcgtcaccaggcgtggttgcatcgccggaaggtgacgtcatgaccggccgaatgacgaccattctcgcgacgtttggaagcgtcgccctcgtgctggccggaagtgaaaaagagacgccttcctacatttggaacgcctcggagagcgtacccattggcctgtatcgattgcaaccagtcgaccgactgagcgtcaccgacctcgtcgcaattcgaccgccggagccgctcggaacctttctcgatttcaatgggtatttgccgatcggcgtgccgatgctgaagcggatcctcgcgctccctggacagaccgtctgcagaaccgggctcaaaattgctgtcgacgacgttgaggtagggcaggcgagggaacgcgacgcccgcggtcgacccttaccggtctggcagggatgccgtctgctctcgaccggtgaagtctttgtcatgaattggcagtccgaggactcgcttgacggtcgatactttggaccgctccctgcatccgcggttatcggcagggtggtgccggtgtggacgcatgaggagtgatcatgcagatcggcagcatccctccgacctatttcggctcattcttgcacactctgatcttccctcaccggggcggtccacaacaggcagagcggccgcacaggcagcgacgcaaccggtgcaagctgttattgccgggtcagattggaggactacgtccgcgtcggatcattgcacgccttgtcacggccatcgtgcctcggtttgcattcgaaacgctgcaacacgatcatgacgctagactctcgggtttgctactgaaggaccctcgctcacgcggcaagagttcgcggaggagtacgatattaaggtgctgatggcatacgggcgatgccttcggcccgcgctctactcgtcgcttcgctcctcaccgagccaccctgcgggtgtctcggccctccgggtaacgatcgctatcgcaaacgctcgcttcgctcgcaaacagtggggggcttcgcaaatcaactgccaaagtcgcggcggctctttcgcaatgaatcggccaccagccgacgttcgggcaggcgcaattggatgatccaccgcaatgaccctaactgcattttgtcgcaaatcgccgcgagtaccgcgaggctgttggcttggaagttgggccctgggaaccagcaaccgaggagggcaggataaaagccgcaaggtgcggccggtcggtcggttgggaaatgtcagcaatctcaatcatgctccgaacattgcgaaggaccggcgcaacttgcgagtttcgccatggcgctgttcttgctcggttttcgacaccttgcggcgggcaagatgagccgcaacgacgatttccgcatccgtccaggccgtatccgttcgacgcgcgcgcccaaggcaaaatcgtttctcgcgcaggccctcagagccgcgcagaaggcaggcggtctctcacacggcggagtcaggaggagtgggtccttcgggcgcggccgtgcggcgagcgttgccgcggcacggctcctcaacaaccgcgcccggggcgccatggtcaaggcgcgtgtcgtacgccggatgcggtcgcccggcgcactgcgagcccatatcggttatctcaaacgggacggtgtcacccgcgatggatcgcccggtgagctcttcgatgctgccggggacgatgcagacggccgggcttttgcggaacgctgcgacggggaccggcatcatttccggttcatcgtctcgccggatgatgccactgagctggaaagcctgcggagctttacccgtgagctgatggatcaggcctcgcgtgatctcggcacgcggctcgactgggtcgccgtcgaccactggaataccgagcatccccatatccacattctcgtgcgcggtcgcgcggacgacggttccgaccttgtcatcagccgcgactacatcggaaccggcctgcgggcgcgcgcaggtgatctcgtcacgcgtgagcttggcccgcgatctgagctcgagatacggcgcggtctcgaggcagaggtcacgagcgaacgctggacgcggctcgatcgggtgcttgcccgggaagcgggcagggcggaaggggtggtcgatcttcggcccgaacgcgatgtcgcgcgcgatccgttgcgggagatccggatcggccggatgcggacgcttgagcggctcggacttgctgaaccagccgggcccgcgcgctgggttctggccgctgacgcggagcagcgcttgcgtgcgctcggggagcgcggcgatatcatcaagcggctgcacaagagcctagccaaggatggtgcatctcgcgcgccgtcatcctgggcgctcgagggcgaaggccatggcggacccgtgatcggccgtctcatcgcccgcgggctggatgacgagttaaggggaacagcgtttgccgtggtggacgggatcgacgggcgtgtgcatcatctgaagctccccgacatcgatacagccggcgacggtccgatcgggggcattgtggaactccgtcgttttgaggatgcgaggggccggccgcggatcgcgcttgccgtccgctccgacctcaacctcgaccaacaggtagtggccgaaggggcgacctggctcgatcggcgcctcgttgcccgcgaacctgccgatctctcgcgagccggtttcggtgccgaggtccgccgcgcgcttgatcgtcggattgatgcgctggcggaacggggcctcgtgcgccgggacggagacaaggtcatcatcggccgcaatcttatcagtaccctgcgtacccgcgagctcgattcagcgggtaagcgtttggctgaagaaacggggctggcgcatatgcccgccgaggcaggccagtcggtttcgggagtttatcgccgaaggctgtcgctcgcctcaggccggtttgctatgattgacaacggcctgggcttccagctcgtaccctggataccgtcccttgagcgcgaacttggcaggcaagtaagcggcatcgccggtcccggcggcgtcgactggagttttggacgcaagcgcgacctttcgctctgacccgccgatctctgcgctacggcgcgcgcgaccgcgattgcctggatattgtcgttgcgtgggtgcacggggcgagcgcttctgggcctatgtccgcgaccaagattctctgggggcagctgttccttgtctcgatcgtcgtgctcgcctttgtttggacggcgaccgagtggacggcctggcgtctcgcctaccaaccgcagctcgggcccgcctggttcatggtcgggcgctggccgatctatcagccgcttgctttcttcatctggtggttccagttcgacgcctacgcgccaaaaatattcatcgagggggcctgcatcgccgcaagcggcgggttcgccgctatcggcatcgcgatcatgctgtcggtctggcgggcaaaggaagctcagcaggtgaccacatacggctcggcgcgctgggccgacgcacgtgaggtcaggcgggcgggccttctggggaccgacggcgtcgtgctcggccgctttgatggccgatatctccggcacgacggccctgagcatgtcctttgctttgctcctacccgttcgggtaagggcgtcggcttggtcattccgactcttcttacttggccgaactccaccatcgttcacgacatcaagggcgagaatttccagctcacctcgggctggcgcgcgcgctttgggcccgtgcttctgttcgaccccaccaaccaggcaagcgcggcctataaccctctcctcgagatccgcaaaggcgactgtgaggtacgggacgcccaaaatattgctgacatcctcgtcgatcccgaaggcgcgctcgagcgccgcaatcattgggagaagaccagccattctttgctggttggcgcgattttgcatgtcctttacgctgaagccgacaagacgctcgccggcgtcgccaacttcctgtctgacccatcacgcccgatcgagacgacgctgaatgcgatgttggcgacgccgcacctcggagagcgcgttcatcccgtggtggcttcggcatcgcgcgagctcctcaacaagagcgagaatgaacgctcaggtgttttgtcaaccacgatgagtttcctggggctctatcgcgatcccgtcgtcgccaaggtcacgggacggagcgactggcgcatccgcgatctcgttgacggaccccggcccatctcgctctttcttgtcgtcccgccatccgacatcgcccgcacaaaacccctgatgcggctggtacttaatcagatcggacggcgattgaccgagagcctggacaccgatcggcgacgacagaagctgcttctgatgctcgacgagtttgcagcgctcgggcggttggatttttttgagagccagcttgccttcatggcaggctatggcattcgcagctttctgatcacccagagcctgaaccagctcgaacgcgcctacgggccgaaccacgctatcctcgacaactgccacatccgggtcgctttttcgaccaacgatgagcgcaccgccaaacgcgtgtcggacgcccttggaaccgcgaccgagatgcgcgcgatgaagaactatgccgggcatcgcttaagcccttggcttgggcacctcatggtcagccgccaggaaacatcgcggccgctgcttacaccgggggaagtcatgcagctctcacctaacgaggcgattgtaatggtctcgggggtgcaccccgtgcgcgccagcaaggtccgatactatgaggatacgcagctaaagcgccgggtcttgaatccatcccgcgccaatccggtcgccctggtcgcgcaggcagacgattggtcaggccgtccgcaaatcccgccctctgccgaactcctcgcgaaggtgacgcggagatcccgtgatcccaacggcggcattcgccgtgagcccgagctgccgcagcacgaggatgtcgtcattggggctcccctggccgagaacgagttcgatgccgcgccagatgatggcgacaccgatgcggtgcaggcgagggctctgagccgttcgatgcagggcatcgcgcgttccgtcaccatcgacccggaggatccgatggatctctaggctagtgagcatgaaaaaggcccaactcagcatctatctcgatccagagaccttcgctggcctggaggccttcgcaaagcgtcacagcaagtccaagtcgctggtcgcggaggctgccatcgcctccttcctttcgcccgacgaatccgaccggagggaggccgcgatcgccaagcggctggatcggatcgtgcgcgtcctcgaacggctcgaacgaaacgataccgtcacgctggagacgatcgcgctgttcatccgcttctggctgacatcaacgccagcgctgccggagcaatcgagcccagcagcgcgcgccaagggcgcggagcgctatgatcgttttgtcgaagctctcgggcggaggctatccagcgggtcgaccatgctgaaggaggtgagtatcgaatcgcacgacggggagaacgccgtgcgtggcaacgacgacgccggcgccggcgcgagctaatcagcccgccgatcccttctttcgctacgccaaggtacgatcgctatcgtcgacggttgcagcgccaacgatgctgctcttctgttgcctccatcagactcaatcaccccttggcaaaatccgtcgcaccgcaatcgttgcggccttgatcggtgcgctcagagtacggagaagagcgaaaatgcagctccacggcgaacccgagttggaggccagccaggccgcggtggcaaaatcgccacctcacaaacggaattccgcggcaacccgcaaggtaaccgtccggatcaccgagaagattcacgagcaactcgaagctgcgactgaacgtccgggcgtgggcaagagcatgatcgtggaggctgcgcttgcacaatttctgaatccgcgccctccagaaaatgcggtgcatgacggttttgacgacatacacgcccgattcgattctctggagcgcaatttacggacaatcgctgagacggtcgcgctgcatgcgcgatatcacctcgccgtgatgccgccgctgtcgcaacagcaacagcgagaagcctgccagctcggtgatgagcgcttcaaggtcctggccgagcaagtcgatcagcgggttcagcaggaccgttcgcttatccaggagacgatcgatcgcctcaatgcgacacgatttaacggcttgaaatcgataatcgatcaggatgagacagtcgacctcaagccgacagacaccccaaacggcgccggtttgcgaggcgatgcaaatataaagcaggaatcatccgctgccgcccaggagggcggcagcaattccaactttcgtcacctcccgaacgccttctgctggccggcatgatcaagctggatacgaagacgcaatacgagcggcgacaagcaccgaaccggacgcggatgaatgtcaacacgtcgatgatcacctgagccggaagtggtggcgcctgatcctggccgtcttcctcccatttgccgctggctattatctttccttcctcttccgaaccatcaacgcctccatctctccagcgctggcatccgaatttggacttgatgccgcaaagaccgggctgctcgcatcggtctatttcctcgtcttcgcaggtgtccaaattcccattggcgtccttctcgataggtatggaccgcgtcgtgtccagggcgtgttgctggtgatggcggccggcggcgcgaccctgttcgggaccgcaacgggattttcggagcttctggttgcgcgcgccatgataggacttggggttgcagcctcattgatggcagggctcaaggccgtggtcatctggtttcccagggagcgtatcgccctcgtcaacggctgcatgatcatgctggggtcgcttggagccgtcaccgcaacggcaccgaccgattgggtattggattggatcggttggcgaggtcttttcgaagtcctgacttttgcaacgatcgccgtagctgccttcacttactttggcgtaccggaaagctccagcaatgaagcagcgtcgacgacctcccggcttactttgtggtctgtgtattccgacgcgcgattcctgagacttgcgccactgtcggcagcctgcatcggctcgtcatgggccctgcaatctctgtgggctgcgccctggcttacggatgtggaagggcttgatcggcatagtctcatgacgcagctgttcatcatggctctcgcaatcagtttcggagcgttgctgctgggcgtgatggcggatcgtctacgcagacgcggcacaacaaccgaaatcctgatagctggcatggcaggggtgttcattgcggccgaacttgcacttattctccgggtgccaatgccatcgctactgccctggtgtgccgtgtcagttatgggagcggcaacagttctcagctatgcgatgatcgccgattattttccgcaaggccttgccgcgcgagcaaatggggcgttgaaccttgcacattttggttcggcgttcgcggttcagtacgggatcgggcttgttgtcggacaatgggcacctcaagacggtcattatccggtaatggcgtatcagtttgcgtttggtctcagtgcagcctttcaggcagccgcattgctctggttcgctgtgccttggctccgaacgttgagcaggcacctttacgcgtcgcttacgcggccgtttgcagagcgagacagccaagcggaatttgtcatggtgcccgtcgagggatctatcctcgaggcgcgtgaggcggtggaatggtagactggccggcctgtgcctggtttccaagccgtcttttgcggcgatcggtgctacgttgggatttcgacattccccactttttctttttctacgccaggccgcgaaccaaacatcccgcttgttgcgcgaagaggtttactgccttttctaattgatcccactgaggtcgttcaggcgacttcatttgtggggacggtggtgacaatccattccattcaatcggaggcaatatctcgcggcgcgcgcatgctgcgcactgcacttggccccgcgatctcgcgctttctggaagatccttcagtcgtcgaggtgatgctaaaccctgacggccgattgtggatcgaccgtttgtcgagcggtctgacggacaccggtgagatcctgtcagcgccagacggggagcgcatcattcggctggtcgctcaccacgtgggtggtgaagtgcatgcgggtgcaccccgtgtatcggccgagctacctgaaactggcgaacgttttgaaggtttgttgccgccagttgttgcggctccagcgttcgcgatccgcaaaccggccgtcgctatctttacgcttgatgactacgtcttggcagggatcatgacgtcagaacaggctatagcgctgcggcaagccgttagttcacgcaagaacatcctggttgccggcggaacatcaaccggcaaaacgacgctcacgaacgcgctgctcgcggaagtcgccaagacttccgatcgcatcgttctcatcgaagacacaagagagctccagtgcaaggcgccaaaccttgtcgctctgcgcaccagggacggcgtggtgtcgctttcggatctcgtgcgctcatcccttcgcttgcgtcccgatcgtattccaatcggcgaggtccgcggggccgaagctctcgacctgctcaaggcctggggtaccgggcatcccgggggaatcggtaccatccacgcaggcagcgcgctcggagccttacgccggctcgaacagctcatccaggaggcggtggttacggtaccgcgcgccctgatcgccgagaccgtgaacgtcatagccgttcttgctggccgtggcgctgatcgccgcctttccgaacttgctcacgtcgccgggctcgggacgtcgggcgactacagcctctcagcatcaggagaccagtgatgaactgccgatcgcctctcggccgaagggccgttacgaccgcatcaattgcggccttctgcctgttcgcttcgccggcctggtccgcaggctcgaatatgccgtgggagcaaccgctcaatcagatcctgcagtcggtcgaaggcccggtcgccaagatcgtcgccgttatcatcatcatcgtgaccgggctgtccctggctttcggtgacacgtcgggcggttttcgtcggctggttcagatcgtgtttggtctgtcgatcgcgtttgccgcatcgagcttctttctgtcgttcttctcgttcggcggcggagtggtgatctgatggatgagcagatcccagggtttgttgcgcccgtgcatcgcgctttgaccgagccgatcctgatgggaggcgcaccgcgggccgtcgcaatcttaaacggcaccttggccgcggcactgggcctcggtctgcgcctttggcttgccggtctcctgctctggttcatcggtcatatggcggccgtctgggccgcgaaacgcgacccggagttcgtcgaggtcacgcgccggcacattcgtatccctggtcacctctccacgtgagtccttccatgatgaatcttgccgaatatcgttcctcgaatgcgcgcctggccgacttcctgccctgggccgcccttgtcgacgagggcattgtccttaacaaggatggctcgtttcagcggacggcaaaattccgaggccccgatctcgacagcgcggtacctgccgaactcgttgccgtcgccgggcgcttgaacaatgccttgcgtcgccttggatctggctgggccctgtttgtcgaggcacaacgccatgccgcgggggcctatcctccgaacacgttcccggatgtcgcatccgccttggtcgacgccgagcgcagggcccagttcgaagaggccggcgcccattacgagtccagctactatctgactttggtttatctgccgcctgccgaaggagcggccctggccgagcggctcctttacgagggcagcaaccggcccgtcggtgcagacgcacgtgaggtgctggccgggtttgtcgatcggaccaaccgtgtcctgcagctcatcgaaagcttcatgccgaaatgtggctggctcgatgatcaggaaacgttgacctatctccactcgacgatctcgaccaagcgtcaccgggtgcgcgtcccggaaatacccatgtatctcgacgcgctgcttgccgatcagccactgaccggcggtcttgagccgatgctgggcaccgcccatctgcgggtgctgaccgtcgtgggatttccgaccgcaaccgtgcccgggattttggatgatctgaaccgactggcattcccttatcgctggtcgacccgggcgctcatgctcgaccggaccgatgccgtgaagctagtgacgaggattcggcgccagtggtttgccaaacgcaagtcagtcgccgcgatcctgaaggaggtaatgaccaacgaggcgtctgcccttcttgataccgacgcccacaacaaggcgatcgatgccgatgcggccctccaggaactaggcaccgatcaaatcggggaagcctttgttacggcgaccgtcaccgtctgggacggagatccccgggctgccgacgaaaagctccgcctggtcgaaaaggtcatccaggggcgcgatttcacctgcatgatcgagaccgtgaatgcggtcgaagcctggctcggcagcctgccgggccacgtttacgccaacgtccgccagcccccgatatcgaccctcaacctagcccatatgatccccctgtcggcggtttgggcgggcgaggtgagggaccatcacctcaaggcgcccccgctgttcttcgccaggacggaaggatccacgccgtttcggttctcgctccacgttggcgatgtcgggcataccctggttgttggtccgaccggggcgggcaagtcggtgctcctggcgttgatggccctgcagttccgccgctatccggacggacaggtcttcgccttcgatttcggccgctcgatgcgcgcggcggcgttggccatggacggcgactggcatgacctcggtggcgcggtagcgggcgaaacggatggatttatgtccctgcagccgctggctgacatcgatgatgtctccgagcgcggctgggcggcgcaatggatcgcctcgatcttgtcgcgagaaaagatcgacgtcaccccagagaccaaggatcatgtctggactgcgctgacctcgctggcgtcggctccgcacgaggagcgcaccctcactggcctctcggttctcctccaatcgaatatcctgaagcgggcgctccagccctattgcctcggtggtccctatgaccggctgctcgatgcggagaacgagcacctcggtagctcatcggtccaggtctttgagaccgatggattgattggaaccgccgttgcgccggcagtgctggcttatctattccatcggatcgaaggccgcttcgacgggcgtccaacgctgctcatcatcgacgaaggctggctcgcgcttgatgatgcggactttgccggcaagctccgggagtggctaaaaacccttcgcaagaagaatgcgtcggtggtgtttgcgacccaatcgcttgcggacatcgatggctcggcaatcgcgccggccatcatagaaagttgtccgacccggattctgctgcccaacgatcgcgcgatcgagccgcagatcatgacgatctaccggcgatttgggctcaatgaccggcaaatcgaaatcctggcgcgggcgattcccaagcgagactactactgccagtcacgccggggcgatcgcctgttcgaactcggacttggcgaggtagcgcttgccctcaccgccgcttcctccaaagccgaccaggctttgatcgagcaggtgttggctgaacatggccgcgaaaacttcgtgagtggatggctgaaggcccgtgatgtcgcttgggcgaccgatctcatcccacacctcgctgaactgggggcttccaaatgaaccgcttccgccgtgttgctgccgctggcgtggtggcacttgccgtgcttgtcggttccaaaccggccttcgcgcagttggttgtgtttgatcccaacaactatgcccagaacgttctgaccgccgctcgagccctgcagcagatcaacaaccagatcacatcgctgcaaaatcaggcgcagatgctggtcaatcaggccaggaatctcgcgagcttgccctattcgtcactgcagcagttggagcagtcaatccagcgtacgcagcaactgctcgcccaagcccagcgcatctctttcgacatccagcaaatcgatcgcgcgttctccaccacgtacgcgccggcatctcccgacgccacggaccaggcgctgatcgcgaatgcgcaggtccgttggcaaaactcggttgcaggctttcaagatgccatgcgggtgcaggctacggtggtcagtaatctcgacaccaatcgcgcccagatgtcgacgctcgtcaccgccagccagggcgcgaccggcgccctgcaagcgagccaggctgccaatcagcttcttgcgctgcaggcacaacagcttgccgatctcacggcaacagtcgccgctcaaggacgcgcccaaaacctggaatctgcccagcgaacggccgctcaggaccagggcagggagcaactccggcgcttcctgacgcagagccgaggttaccagcccacaatagtgcagatgttccaccaatgagtgatttcagggcgttcaaggcgctgtctctcggcgtgacaatctttgtcgtcgtgctcgctgctgcttgcaccatccacctgcgtgacgacgacaatcagcctcagcctgcctcttcggtcgtccgagaaggcgatccccagacagccgagctcgagcgatgtcgttcagttggatacgagcaaaaagacagacttgccgaatgccgaaaggtttgggcggaacagcgccgccacttcctaaggcagaacatcgacactccgcgcaatcccgcccggcccgatccagacgccacaccgcctgcgtccgtcaaggatcagagccgtttgccgcccggtttgtttccggcacctcagccgacggagcgatagatgggtggtacaggcatcatcgaccagtttctggaaacattcacccgctatatcgactctggcttcggcctggtgggaaatgaggtcggacatctcgcgtccacgcttgttgccatcgacatcacgctggcgggattgttctgggtctggagctccgatgaggacatgatcgctcggctggtcaagaagaccttgtttgtcggcgtcttcgctttcctcatcgggaactggaatggcctggcccgcatcgtcttcgagagctttgccagtctggggttgagggcctctggcacgggcttgtcgtccgcagatttcttgaggccaggacggatcgcccaggtcggcctggatgccggacggccgatccttgaatcgatttcggggctgatgggctacgtcagcttcttcgagaattttgtacagatcgtggtgctgctgtttgcctggatcgtcgtgctgctgacgttcttcatcctcgccatccagctctttatcaccttgatcgagttcaagctgacgaccctggccggtttcgtgctgattccgttcggcctgtttgggaagaccgccttcgcagccgagcgcgtactcggaaacgtcatctcgtccggcgtcaaggtattggtgcttgccgtcatcgttgggatcggatcgaccctgttctcccagttcacctcggggtccggcggtaaccagccgactatcgaaaatgcgatggcactggtgctcgcggccctctcgttgcttggcctcggtatcttcgggccgggaattgccaacggcattgtatctggcggtccgcaacttggggccggtgcggccgtcggaaccacgatggccgcaggtggtgtggttgccgccggagcagcactcgcagcaggcggggctgctctcaccggcagcatggttggaggcgcggcgaggggaggcagcgcgctcataggcggcgcggcatccgcctttcggacgggcgcgcagaccggggaggcgggcgccacttcggcagcgagtcccctgcgatcgctggccgcccgctttggcagatcaaatgccgcgggcgatgaagccggcggcgcggatgcgtcatctggaggcgcacccgcctgggttcgccgcatgaaacgtggacaggctgtcagtcatggtgtctcggcgacgacgcaggcgctgcggtccggggatcgcggcggaggtggggcctccgtcgatctcaaggattcagagcgctgaggtcagcaccgtcggagcacctctcagaactcttcaaacgtaccaaacgctactcacgcccgatttctcgtacgtcgaggtcaacatgttcaaacgatcggccgttcattatggccgcacacctcagccggttacgccttaccaaaaagccgcgcaggtttgggatgaccggatcggctcggcgcgtgtccaggccaggaattggcgcttgatggcctttggttgtctgttcctctctgccggcttcgccgctgctctcgtctggcagtcagcacaggggtccattacgccttgggtcgttgaagtcgatcgcctcggcgaagcaaaggcggtcgcgccagcaaattcgacctacaaggcaaccgacccgcaaattggcttccatctcgcccgcttcatcgaacatgtccgcggcctcccgatggacgccatcgtgctacgcgaggattggcttcgggcgtatgatttcacgaccgatcgcggtgccgccgcgctgaacgactacgcccgcaacaacgatcccttcacaaaagtcgggaagatccaggtcgccgtcgaagtatccagtgtcatcagagcttcgcccgacagcttccgtatcgcctggatcgaacgccgctacgagaatggtcagcttgccgcgaccgagcggtggagcgccatcgtcagcgttgtcgtggaaccgccgcgcgacatcgatcggctgcgcaagaaccctctcggcatctacgtcaacgccatcaactggtccaaggagttttgacagtgatgccgacaaatcaacgttcactgcgaatgaaaacggggagtggatttccggctctcctgatttgcgcctgtgcccttgctgggtgcacgacattcaagccgccgcagatcagctatgacgacgaaatcccgccgctgcccagtcaaccggcgcttgcagacgatcggccgcgctcccttcacgtcccacccgcttggacgccggcacggggcggcaaggagaaggaagccgaagcccccgttgaacggatcgaaagcgccaacgatgcggcccgcgtacagcctcggaaggcggggtatttcaacgctgtgcaggtgtttccatatagcccaggcgcgctctatcaaatctatgcggcgccaggacagatcacggacattgccttggagccaggtgagaaattgatcggctccggacccatctccgcgggcgacacggtgcgctgggtggtcggagataccgagagcggcagcggtgacatccggcgggtccatatcatggtcaagccgacacgagcggccatcgaaaccaacctcgttctcaacaccgatcggcggacgtatctgatcgagctgcgctcgcgtgaaaaatcatacatgccatcggtctcctggttctatcctgaagaccgagccgcgcgcggtcgtgcgcttccgccaaaacccttcattccggatcctgcccaacggcgctatcgatacaccttcgagggcgacaatcctccctggcgccccgtcagcgcctttgacgatggccgcaaggtctacatcgagttctcgccgggcatcgggcagggcgaaatgcctccgctgttcgtcattaactccgacggcaagccgggtctcgtcaactaccgggcattcggcaacgtcctgattgtcgaccggttgttcgcggccgccgaactgcggctggggggcgaggaacagcaaaaggtccgcatcatcagaaccgatgggagatcttgatgagcaacaccgaacaggaggccacaaaccggacgggtgctccgccggcgctcgagacagaaacgagttcttttcggttgcggccggagcgcccgcacgtcacgcggctctcgcgcaaagcactgatcgggggcacggcgctggtgctgatcctcttgaccgctgccgttttcctggcgctgcaaacacgcgagaagcgggctcccgccccggacgaactctactcaaccgatcaccacaatgtggcggacaagcttgcgagcttgccaaaggactacggttcaattcccccggacgtgccacgactagggccgcctttgccaggtgatctaggccgtccaattgtcgcggcacaggcccaaaacggcccgctagcggttgacgccgagcaacaacgagcaagccaggaaagtgaagctgcacgaaccagcaaagtttttgccaatacggtgacccgaccatcgcctggccaagcggcgccagccgagacctcgccaacgggagccacttcaactgacgacgcatttgcccagaacggtcaagaccgtaaactcgcgttcgtcaatgctttgatcgatcgacgcaccactagtcctgaccgtttggccaagccggcttcgccattcgtaattcaggccgggaccatcattccggcggcactcatcactgggatccgctccgatttgccgggccagatcatcgcgcaggtaaccgaaaatatttttgacacgccgaccggtcgggctcgtcttgtcccgcagggagcgcgcttgatcggtctctatgatagccgagtatcgtttggacagtcgcgcgtccttctggtctggacgaggctgatcatgccgaatggtcgctctatcgtactcgaaagacagacgggggcagacaccgcggggtattccggccttgaggatgaggtcgacaaccattggaaggagttgctcggagcagcggccttatcgacattactcggtgtgggttcagagcttggatctggcgccgacgctggatccagcacggccgttcttcaggcgctccggcatggggccgccaattctctcaatcagaccggacagcaagtggtccgacggaacctcaacattcaaccgacgctcacaatccggccaggtttccctgtgcgtgtcatcgtcaaccgtgacttgatgcttgagccatacaaaggatagggagtacacatggcgaaactcaagctcggtgccatcgcggacgataaacccgtgaagttgacgatcgaacttccggcagccgtacatcgcgatctgcttgcttacgctgaaatcctcgcgcgcgagagcggccagtctgcgtatgatccggtaaagctgatcgcaccaatgttggcgcgattcatggcgacggatcgcgcttttgcaagatcacgaaagacgccttacggagccaccggaccgaggggatagcgctcgccaagcaatttcaggaggttttggagagcagggttttcgttgtccgctcgccaaaccgctgaaaagccgatgcggctcgaccccgttccgtcgcgcaactcccgataaactagaccggaaaaattggccccgatatcggactccagcacgagactgatgccgaaccccacggcgatcaagctcttgatgaccccgcggctgacgtcatgacgttcgatccgcggtcggtcatcgggagagattagctttgcgttcaagagatcctcaagctcgcgccctggatcgtagtggctgagcaaaacagtctgattccgtagatccgtccagtagatgacttcgcgcgcagccaaaggatgctcactcggcagaacggccagaattcgttcactccagagtggcgttgttttgctatcgagggcttgcgggtcgcccgttaggatgctcacgtcaatgacactgttgcggagcgcggttgtgagccgcgttctcgacctctcgacggttacaagctcaacgtgcggaaaaagcttcttgaagtcgagtaatgttgcgcgcagattgcctgccgtcagcgaagtacagaacccgatgacgagacgacccgcttcgccagacccgtgcgctcttgttgatgcagtcagcgcctcgacttgttcaagtatcgagcgcgtcatgcgcagaaagtgacgacctgccggcgttgctcgaacgccaccgcttgaccgctcaaagatgacaacgccaatcgagtgctcaaggagctggacagaacgactgagtgtcgattgcttgatcgacaatgcatgggcagcttgccgaaaactcccgtaatcttcggcagcgatcgcgtgttggagttggctgaagacaacggtcaggcgtcggcctccgacaggtggaccggcaaaattcgtatcgtccatatgagcgacaccttcatgctcaagttgcgtcgagttagatcgtgcaaaacattaagacaattgttggttgtaagatgacgcggcttgctccgtgaacaaccgagccacgacgctccaagcaaggcagagtattgctcgaatcggcgaattgtgaagcgaccgagtctagaaatccacgagcgttacccgcagacagttcggagaaaatctcgtccaaccgtcgttgcttgcaccccgccgctggatcgctcgaagtcggtcataccgagtgaatgttcgagctggctaatgcaacggctaagcgcggattgccgaagcatcaagacttcggacacgcgccgaaagcaaccgtgacccgctgctgccacagcgtatcgaatactctgcagatcaacgtcggacgtttgactaggactaggttttctgtgggataatattcgctgaccattcttgccgctactgaacattcgtgccattagaggacgcttcaactcacccactcttgcgctacggcggcctggtgtctgcagcgctcgggagccccgagaagctgccggttgaacgcaatgcgcttgaaccagtaatgaaggccgagcaggtccgtaaatccgatgccgccgtgaatctcggtcgccagacgggagatttcgcggccggcatcacctagatgcgcctttgcctgcagcgcggcaacgcgagcttcctcaggagacccatcctgagcgtgagccgcgtaccacaccagcgagcggcacggctcgagcatggtgatgatgtcggcgagcgtatgcttgacggcttgaaacgagccgatcacgcggtcgaattgcacccgctccttggaatagagcagcgccttgtcaaacatggactgcgccgcccctagcgtgtcggccgcgagcatgacgcggccagcgtcgagcacggcggtcgccgctgccttcggatcgttggcggcgccaaggatctcaacccccgcatcatgcagtaccaaagccgtcaacggtcgtgtgcgatcaagactgcgatgcgtgcttacgctgacaccgggttccccgaccgcggcgaacaggccggcacggccgtcatcaaggtagacaatgaaatgcgtcgcgtttccgccatcgagcacacccgttacgcatccggacagcatatttccggcgaggcggacagccgcctcgccggtctgccccgacatgccggcgaacccgaccccgatccggacttcgccgcttgcgatccgcggcagccatgctttctgctgggcgcggtcgccactggcaatcagggcgaggggggccatgaccagcgcagccgcgaatggcgtcggtgtcgcgtgatatccaagcgcctccgcggcaacagccgcatcaagcagcgagaggcccagacccccaaagtcctcggggaccatgatgcccatgatgccctgttccgtgaggcccgaccatagttcaccatcgaagcccaagccgccctccgcgatcttgcgcaacttgctcatgggcagtctttggtccagaaatccgcgcaaggaatccgctagcatcaattgctcttcgctgaggccgaactccatgcttatcctctgacggttggcggggcggatttcggctcgcgcggcagacccagtccgcgctcgccgatgatgtttttctggatattcgatgagccgccaccgatgatgaggccgatgtcgtacatgttatctatctgccaggtggtggcttcgtcgtcttccgccgcttcgccgaccggttcgtaagcgagccccgccgcgccgagcacgtcaacgaccagcgatgacagccgatacgcaatcatcgtcccgttcagtttgacgatcaggcgtttgacccccgaatcctctcccttcgcctgctcggtcattaatcgaagaccgtggtatttcgaggccatcacctcgccctggagtttgagcaatcgctcgcgatactcggggatgtcgatgaatcggcagccatcgagcgtcgtttttttcatcaattcgacagccctcgccagacggtaggtcagcttgttggcgtcgccgagcagcatccgttcgtacttcaaggtgacattggcgacatgccagccgtcgccgcgtcccatcacaatctggtcggttggcacgcggacatccgtgaagaacgtctcgttgaactcggcgcggccggtcatcgtgaccaatgggcgcacctcaatgccaggcgcattcatggggacaagaaggtaggacagcccatcgtgcttgctcttgtcgagctcagtacggcagaggaggaacatcatgtcggcgtagtgggcagaactcgtccagattttctggccattgacgatgaattggctatcctcgacacgggcgctggttttggcggcggcaaggtcggagcccgaaccgggctccgaatagccctggcaccaaatgatgtcaccgcggatggtaggcccgatccattgaatgcactgctccttcgttccgacctcgagcaatgtcggcaccagcatggaaatgccctggttcatgatgcccggagacacgcccgcgttcgagaattcttcggcgatgatcgccaattccaggatgtcgaccggcaggccgaagccgccatattcgcggggaatgttgcgggcaaaataaccgcgctccagcagaagcttctgccaatccagggctcgcgcgtcaggccgcttccgtccgccccccgttttcggcgaaaggtggccgtatttctttacgaagccgcgcgcttcctcctggagggcgcgatgtcgggcgctgtagcggaggtccatagagacgctctttcccaggcgcggtttgtgcctgttactctacacggaaaggactagccacggtcgattgaccgcgctacggattaaatctaacatctgttcgaaatagtcgtgccttgggcggccggcgtcaagtagaaagcttgaatgattgttccgtcgtcacggaaatcgttcaggggttgcgagcctccgtgggagctttgcctatgtcactgaaagaaaaggccgccatcactggcgtgggagagaccgagtacacgcgcatgtcgggcaagagcatacttgcgcttcagctcgaggcttcgttgaatgcgattgcggatgcggggctcagtcccaaggaaatcgacggcattattccatactcgaattcgccggtcgtagccgaagactttgtcacgaatttcggtatatccgacctgcgcttttcggccactgcgccgctcggcggagccagctgcgtcgcggccatacaatgtgcgctgctcgcgatcagcggcggcgtgtgcagcaacgtgctgatcccgatcggtcgtaacggctcgtctgcgggtcgcatcggcacgcgcgttcagcaaatgccccagttcaaggtcgttggtgagcatgagatgccggtcggcgcgatcgccccggcacagctatatgcgccgatggcccgtcgccatatggaactgttcggcacgacgagctcgcagcttggcgaaatcgccgtgtctacccgtcacaacgcaattctcaatggccatgggatgatgacgaagccgctgacccttgaggatcaccagacgtcacgcatgatctccgatcctttgagactttatgattgcagcctggaaagcgacggcggcgcggcgatcgtggtcagtggcgcggaccgggcaaatgatcttcgcaaaccaccggtctacgtcatgggggtcgccgaaggccatccggattcaccgagcgtcatcacgcaacgcccggatatgacgcgcctcgggatcgcgaaggctgcgccgaaggcgtttgccatggccggtgtttcgcctggagatattgacgttgccgagatttacgactgcttcacctacatcgtgctgtgtcaacttgaagacctcggcttttgcaagaaaggcgagggcggtccgtttgttgcgagcggagcgattcggcttggaggaaaattgccgatcaacacccacggcggactgctttctcaggcgcatatggtcggcatgaaccacattgttgaacttgtgcgtcaactcagaggcgaggccggcaaggcacaagttaggggagccgagatcggccttgtgactggatacggcgatatgggcgacggatccgtcgcgatcatgcgcaaaggatgatcgcaatgactgcggagacctacctcaagcccgttcctgagccgacccatgagtcgaagccctattgggatggcctccaaaatggacggctgctccttcagaaatgcgggcaatgcggaaaaatccgtcactatccaaggccggtttgtgacgtctgttattcgtttgaagtgaaatggatcgaggcctcgggccggggaacggtccacagctggaccatcacccatcacgccttcaatcccgggttcaagctcgatttaccttacattctggccactatcgacctcgaggagggcgtacggatgcaagtccctcttcgcggcgccagggagacggacgtcaaacttgggctgccggttcgtgtcattttcgaacaggccaagcccgatctggtgactcccgcctgtgtaaccgcgtcgtgaccatcaccacccggagcggcatcaagatgaacgtggacattgacgcactgcgcaagcacatcgggacgaaaatcgtcgagcacgatgtcgccacccaggcgccgctgcgcggacttgcggtgaccttcgatcggcaggaccagattccagggcccggggatccgatccagccggggtggcatctggtgtatttcatgccgctgtcgcccaaggctactctcggtgacgatgggttgccgatctctggcggcgttctgccgccgatgccgtttccacggcggatgtatgcgggaaccgaactgaccttccacgatccgatccgcctcggcgatgcgctcaagcgcgagacggagttcaccgatgtctcgctacggtcgggcggtaccggagcgttgatattcgcgacgcagacccgtcgcattttcacgcctcgcggcctttcgattgtagaacaaaatcacacagtgttccgcgaagaagtgaagcctggagagaagagcgtcacaccgaaaaggaacaagccgccagccgatacaccgtggcgccgaacgattacgacggacccggtttccttgttccgctattccgcgctgactttcaacccgcaccgcattcattacgaccgggactatgcgatgcgcgtcgaaggttatcccggccttgtcgtgcatggaccctactcgcagcagtgcctgatcgaccttgcgcgcgatcacgctccggaaaaaacgctaaaatcgttttcgcagcgcgcccgtgcaccactgttcgacacggcgcctttcagcgtcgttggccgcgccgttgacggcgaaaaaggagcggagctgtgggccctcacaccggagggaaccatcgccatggaagtcacaatacgatacgcgtgagaacaatggttaatgaaaaagttgttttgacggatatcaatgattgtggccaatcatcgcttctgtgtaagcagttatgccccgaagcgcgcgtcagcttaaagaagctccgccgcaaagctgatgatgtttaagcagccatgtgggttgacttcacgatagacgatctggcgatccttcaggctcagctacggctgctcatggcgcaacccgcgagtgtagatcgtgcggccgacgagtgggatcaaaagagcgcaggacgggcaatttgagaatgatcgcttctagggttggcaaaattgcgacgttgacgtcggacaacgtgaatagctgcgctccgcttctgcatttcgcacatgcgaccggcttcaatgcggaaacgtatcgacgctttctggagcagctatcagcaagcttccgtgtcgtcgcgtccgacgcgcgtggacatggacgcaccacattgccagcaattccggaaaggctaacaagttgggagacctatgaattggatcttgaggagcttcttggcgtttacaaggagcctgccttcctcgtgggtcattcgatcggtgcaaccgtcagtgtgatgctggcggcccgacggccagacttggtgctcggggtgggcttgctcgagccgtcatttgtcccgttcgagagggcgtatcgagttgcgagcgagcggcgggaggggcgcatcgtggacttcgatattgcaatccaggcgcgcaagcgccgatcgacatgggcgtccctgccggagatccgcgagtcttatgcaaagaaagcaatgttcgccacttggcaagacggatttcttgaagattatcttgagggtgggttggtattcctagctaacgatcaaatccggctggcgtgtaatccatcctgggaagctgcaaccttccaggccgcgacgaccgatttttgggacattcttccacgttacaaaggcaagttactgttggcctacggctcgcgatttagcactgtaagtgatgtcgatgcgaagaagattgtcgaacttgcacctcaaactcgcgtattcaattttccggagaatagccattttcttccaatggaacggccagaagcactatctcggctgattatgagtgagtttgataattcctagcgtggctatcgccgcggatcgattgagcgattttactgttgcgccggcgcgacgattgccatgaggccgcccaacgtgattgcgcgcgactggatcgtggcgccaagcatcggttgttcagcggaaaacatgcggcgccattccattggaaatcacggagacgacccgggaatcaatcgcggaaaagtggacattgacgataactgcttccaacccacataacagccatgtgttgatcactcttcagactactgggacacgtttggcggcgacggcggccggtgaaatgacgtcgatgtcgatcggcacccgccagcgctcggtgtagcgcacctggggcgccgcgttgctggccggtgcgccttccagcacaaagccatcgaagccggcactcatcacctcgttgcatttctgcacatagaccgggaagccgccgatatacggcatgaagacgcgcggccggccggggatgttggtgccgacataccaggagctgcaggtcgatcgcagcgaaacagtcgatacgtcagtgacgtgctcgacccaggcgtcctcgtcctcgcgcttcggctcgatggtcgcggccccgacgtcgcgcatgtgggccatgcagtcggccagccagtcgacatgctgctcaatcgcctggatcatgctggcgagcactgagggactaccgggaccggtgatcgtgaacaaattggggaagccggcggaggcgatcccgaggtaggcgcgcgggccggcgcgccacttctcggccagcgtcaaacctttgcggccggtgatcgcaatcttgtcgaacgaacccgtcatcgcggcaaagccggtggcgcagacggcggtgtccagtggatacgcgaccccgtcgacctcgatgccgtcaggcgtgaagcgttcgatcggcgtcttggacacgtcgaccagtttgacgtgctccagattgtaggtctcgaagtaggaagtatcgacgcagagccgcttgcagccgaacacgttgtccggacacagcaggtcggccgtcgccgggtccttcacgatgccgcgaatcttgcggcgggcgaagtcggcgatggtgtcgttggcggccttctcgaacagcagatcgccgaaggcgccgaggaagggcaggccgccgcgggtccaggcttcctcgtattgccgttcgcgctcttcgggtgcagcctccagcgccggcttcatgttgaaaggaaaatagaagccggtcgggcgtccgcgtgccttggcccgcaacgccggataatccgccttggccgcctgcaaatattcagacgtcaggctctcgttgcgcgccggcacggaccacgtcgccgtgcgctggaataccgtgaggtgcgccgcctgctgcgcgatgattgggatcgactgaatcgccgaggagccggtgccgatcacgccgacccgcaatcctgtaaagtcgacgccttcatgcggccattcgccggtgtggtagatcggaccgcgaaagttcttcatgcccctgaagtttggccggttcggtgccgacaggcagccgaccgccatgatgcagaatctggccaaaaccctgtcgccgcggttggtctcgatcagccagcacccggcgtcttcgtcgaacgtcgccgcggtgacacgcgtgtcgaacacgatatcccggcgcaggtcgaaacgatcggcaacgtggttggcgtaggaaaggatctcggcctgcggcgcgtatttctccgaccagttccactcctggtccagctcctcggagaaggagaatgagtactgcatactctcgacgtcgcagcgtgcacctggatagcggttccaataccaggtgccacccacgccactgccggcctcgaagacccgtgccgagaagctaagcccgcgcaggcgatgcagcatgtacatcccggcaaagcccgcacccacgataacagcgtcgaaaaccgctcccatttcgcctgggcgctcttgtcgcgttgtgttgtcggcaatcatgactcgtgtcgtctcctttgcaggtcgactaagctaatcgagataagttcgttctccgcaggcgccagagggttcgcaaataaagcccgagaaatgcatctcgtaccccggctcgcctattaagtcctgagtcttatattttggtaggcgggcagggcaatccaccagtggccgaagctggtacatggcggatcgaaacgcagagctggctagctatatgccgcaggcggacggcatcggagatatttgcaatggaatggaatcagcgccaacttggccggcaacgtcggtaaatcgacttcgccggccagagacagttcatttttgcgtctcagatttggcgaagtccgccgactgttccttcactacgctccaaacctcgtcttgaaagccagcgatccaatcggtttgtgcaacccatttctctccatcccacatttcaatgcgtgtcttgccgccgccgccatgatcctgtgccgtgactgtaataggtgcaatcagcccgttagcatcgtaatttttcagactctcaagaccagtcttaattttatcgggtgttagcggccagccgccattcttgatcgcaagccgtgcgccttcgaatgcgatcgagtagatcgcaagaccagtgttgtaatagacgtcctcggtaaatttgcgatcaccgttgcctttgcccctgtcgtaaagctccttgataatctgctgaaccaacggctgatatgagccgccggcgacgttggtgccgcgtttcaatcccttagcgacatcgggtccaatattcttgatatcgacctcgttgagccaattaacagcgatatacttttcaatcgagatcccattgcgcttcatctcgcgcgatgcgatcacatgcatattcgacaggctccagctcacaatccagtcggggttaagacgacggatctgcgtccatgccgaggcctgatcgttgcccggcagcggatacggcacgagctgcaactcgaaaccctccttctgcgccagcgtcttcagaataccgatcggttcctgtccgaacggataatcgatataaaagaacgcgaccttgacgcccttcagatttccgccggacttttgtttgatgtattcaatgtcattggcggcctgaccccagtaggtcggcccgatcggaaatacccatttgaacacgttgccatcgaccgcatcccctcgaccgaccagtgactggatcaggatgttgccatccttcataatgcgcggaaggaccgcgcgcgataccggcgtcgacaacatgtcgaacaccatcacgccttcgcgcttcaagcgttcgtagcattcgatgccgcgctgcggctcgttgccgtggtcctgcacgataatttcgatcggatggccttcgagacctcccttcgcattgagaaggtcggcatagtcgcgcacagcttgggcaatctgcggcgtgacgaacgtataggccttgctcaggtcatagcacagcgcgaagcgcacaggatcggccgcggctgccggcacgacgttgagcagcgccaacgctagtccgcctagtatagatagtaatctcattttagcgatccttccttggttgactgagcgaactcaggaaattcttaatcatcccagctttatcgaacgacgcacatctggtgatcgtcaggtcagccaacgtttccgccggctataatgtttgatgtcacgaaaattcttgttttgcgcgcctcccaggtaaaattcctgaatgtcgggatttttcttcaatgcagccgcactgtcgtgcatcacgatgcgaccgctttcgatcagatagccgtgggagacaatttcgagcgcggcaatggcgttctgctcaaccagcaatatcgaaagtccttcatcgcggttgatgcggccgaggatctggaagatctcagccacgagaaaaggagccagtcccaggctgggttcgtcgagcatcaatagttttggctgggtcatcagagcacggccgattgcgagcatttgctgttcgccgccggagagataacccgacgcgacggtccggcgctcgtgcagacgtgggaaataactgtaaacccggtccttgttgcggttcatgtcctggcggctatgcaacgccgaagccgcgatcaagttttcgtcgggcgtgagatgttcgaacacccgacgcccttcgagcacgtgggcgatccccagcttgacgcggtcctgcggcatcaggccgccaaggctttggccgcggaactgcaattcgccccgccgcacctcgccccgctcggccgtgagcaaaccgctgatcgatttcagcgtcgtactctttcccgcgccattggcgccgagcagggccaccattccgccctcgggcacatcgatcgaaacacctttgatcgcaagcgaaacgtggtcgtagacgacctcaatattgttgagggacagtatcttagcggcaatgggtgcattcatggcgttcgtgcttcccgctatttcttcgtgtagccgaaaggccataccagaagatagtcccgaatgttgttgtagatcttcccaagccccagcggttcaatcaggagaaacccgataataagcgcgccatagaaagcttggggtagatgagccagagtttcgatacccagcgagaacccgaacttggttgccgcccaggagatgaaactgttcataacgcccggcatcagcagaatgaacgcggcgccgaaataactgccgatgatgctgcccagcccgcccacgatgaccatcgccaacgcctgaattgagacgtcgacggaaaactgctcgggggttacggcatggtaaaatgtaccgatcaggatggctccgctcacgccaccgatgaacgaggatgtcgcgaacgccaccagtttgaagtagaagctgttcacgccgatgaccgcggctgcgtaatctttctcccgaacagcgaccagagcgcggccgagcgcggtgcgccgcagattgagcatgaaggacgtaaccagcacgcaccagacgagggcgacgtaatagagtcctgcatcggaggtgacagcccagcccagcaggcggatgtcaggtgcctgcaacgtggcctgtgtgccgccgctgatcgcgggtacgtgcgaaatcgtccagtccatcacgaactgcaaggcgagcgtgctgagcgccagatacaggcctttcacgcgcagtgcggcaaaagcgaacacacttccgataaccgctgctgttattcccgcgaggacgatggcaatctcccacggtatgcccgcccttgtggcatgaaccgcggcgtaggcgccgattcccatcaccgctgcgtagcccaaatgaaattgccccgcccatccgaggatcaaattgagaccgagcgcgcccgcagtccagacaagccaaggcagcaagtaactgctgagataaagcgtgttcatgtagatcggcgcggccagcgccagcaatagcagaataccaatcatccatcgatcggcggggatcggaaacagtgcgcggtcggcgctgtaatccgtatgaaaaatcccggcttgacggaatagcatgatcctagaccctctcgatgtcgtggcgaccgaaaagtccgtgcggtcggatcaagatggtcaggatcagcattgccgcatcgacaagatcgcgactcgcgccacccaacaggggatcgagaacgctggatgcaattccctcgacgacgccgagcaggacgccggcgagcaacgcgcctcctatactgtccagtccgcccaaaacggctacggtcacgcccttgagcagcagttgcgcgagcgattgatcgacgccctgtaccgaactccagagcacaccggcaatcgtcgcgaccaccgccgacatggcccaagacagcgcgacgccgcgctcgaccgaaatgccgaccgaccaggccgccgtataatcatcggaaatcgcacgcaaaaccacacccatccggctccggaagaacagcacgaaaaaaccgaacatcgcaattgtgaccaccgctccaaaagcgtaagcacgattgatcaataatggaccgagaaaaagcggggcatcgctgatgcccagattcatgggtcgcgtggtaccgccccaaatggtcatcgagccggctcgcaggaaaatctccaggccaagcgtcatcatcaggatcatgatgatggggcggccggcgaggcgccgcagcgccacccgttcgatggccattccgatgatgaacattgttatgatcgccagcgaaatcgcggcccagatcggtgcgcccgcgctgttggcgaacgcgagcaggacataagcggccagcatcgtcatcgagccctgtgcaagattaggcaccgatgacgatttgtagatcaggacgattcccatcgcgacaagtgaatacatcaagccaataagcgcgccgttggcagcagattccatcaacgatatcgcgtccattcttcaggcctcctgtaccgacagtgtgcgttcgatgacgccgacttcgcctgactcgtagctgacctttgccttcatcagcactgtgttttgatgcccgtagatggcgtcgatgatcggtttgtagcgctcctccacgacgttacgtcgaatctttcgggttctggtgatttcgccgtcgtcggcatcgaattccttgtgcaggcagacgaatttccgcaactgcaagccgtgcggcagtgcactgttaacgtgcttcaccgcggcggcgatcagggcgatgacctgcggcttctgcgacaggtcggcataggagatgtaggaaatgccgcgcagttcggcccaaaggccgacagcttccttgtcgatgcaaataatggctgacagcgtatcgcggccgcttccgagtaccgcagcatccttaatgtacggactgaacttgagccggttctcaatatagttgggaatatagcgctcgcccttcgcggtgtgcacgatgtccgacaggcgccccagcaccacgaggtgcccgtcaggttcgaggtaacctgcatctccggtgtgtaaccagccgtcttcgaggctttcgcgcgtggcctcgtcctgcttgaagtatccgctgaacacgctgcccgagcggaccaggatttcgccggcgtcgcttatccggatatcgacgcccggcaggggacgtccgacggtgtggagccttacctcgttgagatcctggatggcattgtaggcactggtttcagtctggccatagagttggcgcaatttgatgccgagcgcgcggtaaaagacgaacgtatcctcgcccatcgcttcaccgccggtgaaggcgccacgcagccgggtcaggccgaattggtccttgatcggtccatagaccagccactcgcctattgggctcaacaaccactgcttgagtgtcggctgaccgccttcgagcttgcgtttttcggctgaaatggccaacgccataaaaaacttgtagaccagcctcttcagccacgaggaatcttccatgcgcacctggatggtggtcaatagattgtcccagctgcgcggtgcggccagatagaaagtcggcgcaatctcgcgcaggttttgcagcacggtctcctgccgctctggaatattgatcgtgaagtgcagggcgattccggcgcccatcgtcaccgcgaagtcgccaacccaggccatcggcagataggccagaatgctctcgccgaactggaacgctccgcctcgataggcatttcgaacgccggccaacaggttacgatgcgacagcaccacccccttgggcttgccggtgctcccggaggaatgcacgaacacggccgggccctcgggctgcgcgcgggcgatcagctcgtttcggagattggggttgcggatgactagctccgcgccctttgcctgaagcgtgtcccatgagatcaggcctggattggcgtaagcggccagtccacgcggatcgtcgtagataatatgctcgatcgtcgcgccttgctcgcgcagatcgagtattttgtccacttgttcctggtcttcggccagcgcgaaacgcgcgcccgcctcatgaacgaagtggcgaatttcatcgagggttgcatcggggaaggccggcatcgcgtacccaccgagggcgccagcggccagcatccccgcgtagagccgagggcggttgtcgcccagcaccagcatgacgtcgcccgccttgaaatccagttcttcgagaccagcggcgcagcaaagcacgatctcgagcagctgctgccacgtcgtctgattccagatgcccttgtctttctcgcgcatcgcgacacgatcgggaaagacttcggcattctgcgccagaacgcggatcagcgtggtatcggtttcgaaattccaggccaaggccggttcagcgcgcgacatgcgcacccccgatgtatgcctcgatcacccttgggtcggcgacgacgtcggccggcacgccgctgccgatcatttcgccatagttcaacgccagcatgcgatcgcaaatgcccgtgatgacgtccatgtggtgctcgatcagcagcacggtgacattgcgttcatcgcgtgcatccaggatgaagcgcgccatgtattccttttcttcctggttcatccccgccatcggctcgtcgaggataaggaagctgggctcggcggccaaagcgcgcgccaattcgacccgcttcttcaggccgatcggaatcccgtcgaccagttcgtcgcgtacgccttcaagctgcagaaaatcgatcacgtcttcgaccgcggcgcggttcaacgtctcgtcgctgcgggcaagccaccaatagagcgccgtacgtcctacactgggtttcatgtgaatgtgacggcccagaaggatgttatcgagtacgctcataccattgaagagcgccaggttctggaaggtgcgggcaactcccaacgtcgcgacatagtgtggcgccaggcccgtgatgtcccggccgttcagcagaatatgtccacgctgtggcggataaaatccggtgattgcgttggtgagggtggtcttgccgcatccgttggggccgacaaggccgaatatctcgccgcgctcgatccgcatatcgattccgttcagcgcgacaatgccgctaaagcgtcgctcgacagaccggcattcgagtactggggcgtcgccgccgcgatccttgagggtcaacttgaatcccgtttgaaggtcaatctgttaagaacactttcagtttccaaatctaacgtctgttaggcatttgggcaactgaagaatggtgcgttgcaattggccaaacgaccgtacacgcctcattgtgcgagatatgcgccccgcccactggctaagagaactcggctggtatcggtcacgcgtacgtcggcagtgcttatccggcgccccagtttgaccaccatgccgcgagcgagaactgtcccgcgggtggccggccgatgataatcgacccgaagatctgccgtagcacttacaatacccccggctgcgcgaacggcgtaaaggcccgttaaatcgatcagggctgccaggattccaccgtgagttgcttcgattgcagtattggcaacaaattcctcgcgccaaggtagagaaatttcgatttgttcacgagcgaccatgatggctttcaatcccagccaccggtggaacggcgaaatcatcaacgccttttgaaattcagcaatagtctcttcgttgggggggccagtctcattcactcgttcgctcctatgtattttctttcagcaatcaagcactgacatgccaccaccggctatcactggttcattccttcgacaaagctctcacaaaatgggtcgacttcgattgcggggctaatcgtcgcgtgtatcgccattacgttgtgatatctgcggtcctcgaaagaaactgacgacggcctcagtaaatgcatcatttcgatcgccaacgaccatatgacccgcgccggcaatatcggtgtacgcagagtggggagcaagtcgaagaaactcttgcgcagcatccacgcttaccaaattgcttgatcctccacgtatcaggtgaatcggcagcttaaggtttttggcagcgtcggtcagtcggttttcggactggcccactttgccatttgtcacagaagttatgaagcgcggatcccagtgccagcgaagacgtccgtcatcgcatcgtctcaaatagcggtcgaggctctccgagcctttccgtcgccgtcgatttggcaaatagttggcgatcgcctcggcggcttcatcgggcgaagcaaagccgtccgccaaatgtgccctcatgaaatccaggacgtgcgcaacgccgaccggctccatatttggtgtaatatctacaagcgtaagcgaagtgaaggatcctgagcgaagttcaccttcggctatcaagcccgccaggccgccgagggaagcgccgacgagagctggtttctcgtctagttgatcagacatcgcaaggagatccatcgcaaagtcgtcgagttggtaagagcccgatggcgaccatgcactttccccgtggccacgcaaatccatcgcaattgcactatatcctgcctgcatcaaggcccgtgcagttcgagtccacgccaagcgggtctggccccctccgtgcgccagcaaaatcggcgaaccctcaccaaacacgtcggctacaatcgcgtgtccctgagccccgcaaaaaatcttctgttttttcacttgcgtcctcaactatcgtcacaccgcgctcaagttgttccttattgaaacggcacctcgaaataacgcgcaacacctggcaatcgccaagtcctctctaagagttgtcgaatttgactgcggcgcgatcgatttcgcccttggcggtcctcggcagttgatcgacgaaaacaatgtgctttggcttcttgtagcgtgcgatctttccggcgacgaagtcgatgagctcgtcggcggtgacattcgcgccagttcggcgcacgcagatcgctttgatggcttcgctccactggggatcaggcacgccgatgaccacgacgtcggcgatatctggatgttggagaatcgcgttttcgacctccgccgggtagacgttctccccacccgtcttgatcagctctttctcgggagcacggccggcataccagagatagccatcggcatcgaaatagccgatgtcgccggtgtgatgccagccattacggaaggtgtgggcagtatcggcgtcgttattccagtagcctttaaaaacggtgggaccacgcaccacgatctcgccggtttgtccggtgggccttggtttgtcggcgctgtcgacgaccgtaatggtgcgccagaacagggggcgcccagctgatcctggccggttgcggtagggcgacagcgttgcgaggcccgatgtctcggactgtccgaaggctgcccagaataccgcgtgggggcacgctttctcgaagcgttcaatcgtcgccggggtatccagtccggtcacagcacgcaacgtcttcaattcgtcgcccttggcctgatccatcaggcccgccagcatcggcgcgaactccgacatgacggtcaccctctcggcggcaatgtcgcaaaccgcctgttgcgggtcgaatttcgaagcgatgacgctggcgccgccagcctgctgtaccgtcagcatcaggccaaggccggcgacgtggaacagcggcagcacaccaagattgacgtcgcgctcggtcaggctccaggcctgcaccagcgagctgtgcgccgttagaaggttggcttgcgacaacagcgcgccgcgcggccgcccgccgacggcggcggtgtgaatgattacgaagccatcatcggcgctgaagttcacgtcagacatcgacgcgtccgaagccgcaagatttgcgagcggcgcaaacggcgcagtgtgcttgccgatgccaaaatagctccggaccgaaggtagcgacggttttagagccgcgataatctcctggtattctgcccccgccacaaccagcaccggcgcaccgtcggcgaggacgtagccgatttcttcggcgttgagccggaaattaaccggcagcaggatcgcgccgagccgtgcgaccgctccgatcacatcgatcatttcgagcgagttttgcgaaaggatggcgacgcggtcaccggattttacgccctcgcgtgctaggcccgccgccagccgctcgacccttttcagatattcacgatgggtgatgcgctggccttcaaaaacgaacgcggtgcggtcgggaaaaaattccgcattgcggcggtacacgtcgaggaaagtaaattctttcaggggcatcgagtcctcgatgttatgcacgatctatctaccgcaaagtgctccactcgaagaaggtcttcgaagccgtcgctcgcagcgcgctttgtcaactctcgaattttggctcacgtttttcgagaaaggcagcgataccttcctgtgcgtctcgatgcatgaataggagcggaaaaccatcgatggcgtgccgtatctcatctccaccgaggccgcggttgtaaaacgatttggccatctgcaccgcaagctttggttttgatgcaattcgttcggcaaatgccagggcgtccgtgagcagatcgccgtgaggaaccacacgtagtacgaggcctagtctgaatgcctcatccgcgctgattggatcgccgaggatactcatttctttggccttggcgcggccgaccatatcgtgcaggcgtacaatcgcaaaaccgggcagtagtccgagcttgatctccggtaccgcgaagcgtgcgcgatccgatgcgatgataaagtctgaagcgatcgcgagttcaaagccaccgccgaacgcaataccattgacggcggagattacgggtttgcggcaattttccggtgccgctaataccgccaaagcctcgatcataaacttgcgtactttgtccggatcaaagttgaagccgctaatatcggcgcccgcgcaaaatgccttgtccccgttgccggtgatgatggcgacgcggacgttgtcgtctgcatccactttcttcaggccatccagaataccctcacggatgcctgtgctgagtgcgttaagcttgcccggctcgtccagcgtaaggatggcgatcttccctttagtttcatagttgacgctgcctagtctcatcgcagtctcccttacgttatagcgccctgtctttagcgaaacgcgctgaaatccggcttgcgcttctcgaggaatgcattggcgccttcctgctgttcttgtgtcgtaaaataggcgggtgcgacctcgcggacgaggtcatccatgtcgcgctccatgatcggcgccatgtgatagtagaatgagcgcttcagaatcttcaggcaagtggggctcaaagccaggagttcgtcgcaatacttccgcacctcgacgtcaagttcggccatcggaacgacggaattggccagtccccagtcgagcgcttgtttggcggtgtagcgtcgcgccagcatccagagctctcgcgcgcgcttgtggccaagcacattggcgctgtgcgagacgatgtagcctccggccggggagccgacacgtggaccattctggccaaagatcgcatgctccgcggcgatggtgaaatcgcagaaataggcgatgtggtgtccgccgccaatcgcgtaaccgttgacacgcgcgatcaccggtttcgggcattcgacgatgtggcggttaaagttgaatttcagtccttcgagcccgctcttgccgccggcgtccttctcccagttgacgtcgccgccgacgcagaacgcgcgctcgccggagccggtgaggacgatgacgccaactgttttgtctgcggttgcctcgaggatcagccgctccatctctacgatgttatcgccggtaaaggcgttgagggtctttggccgattgatggtgatggtcgcgacgtagtccttgacgtcgtacaagatctctttttcggacacgatggaactccattttgttctggcgaaattaacggccgacgtcagccgatcatggtgtatccgcctgacaccgacaggacctggccggtgacatgacctgcggcggcggacgagaggaacactacggcattggcaatatcgtttgggcgacccagcttgcgcagcggcagcgccttggcgactttctcgaattgctccgccgtgaacattgagtctggctttgtccacatgctgttggcgccgacttcttccgtatccacgggaacagtgacgccaggacaaacgacgttgcagcggatgccatagcggccgttctctttggcaatggtcttcatgaaagaattaacggcggccttgacgccaccatagaccgcctcgcgcggctcgcccgagcggcttgcgtcggaactgatcgacacgatagcgccggcacccttcggaatcatgatatcgagcgcacatttggtgcagttaagcacgccgacgtagttgatcttgataatcttgtcccagaactcgggcgttgtttgcgtaaagaacatcagctgatcccagcctacgttattgacgagcacatcgaccgtgccatgcttatcggtagcggccttgaacatggcgtttacctgatcgaaatcggtcacgtcggtcttgattacctgaatgctggcagcgccgttcttccgcgcaagttcggcaactttctccgcctgcgcctggtcgagatcgccaaccgtaatgttggcgccctcggctgcaaacccgagcacaatggctcggccgatgttggagccgccgccagtgacgacgaccgatttgcccttcagattaaaatccatacttgccactcccggttctgtcattgaattacggttgctgctctggctccacgaccacgacaaccgcgttgcgctcgacggtctcgcccggccggcaattgactgccgtgaccacgccatcggtttcgcaattgatccgcaactccatcttcatcgattccagtacggctgcgacatcgcccgccttgatcgtatcgccgactgcgacgttgaccttcaggatcatgcccatcataggcgcacgcagctcgccgctggtttcggcgacagcgctgatgtaggtaagataggggattgccgtcagcgtgtggacgccgcggcgatggtggacaaagatggtttggttttcctgataaatgcgcaccgtctcacgccgcgcgccgacaatcgccgtgaagcagtcgtctttgagcgggatgagtctgaccggtagcttctcgtcgttgacgccgacaatcatcgagccgtcggccttgagcggtgcgaatcggatctccgcgcttgcgcccgcggtttcgaggtgcaggatcggaatcggtgacaatccgtcgccacccgcggccatgtgccatccagtcatttcgcgcgactgccacggcccccttgcgaggggctgtcgttgccggatcatccagaagtaggcgcccagcgccaacgccccggcgtccagattctttgccttgtcgaccaactggtcgatttgctcgtcgatcaggcgtgtgtaaaaggtggcactgcgcgtcgctggcaggccgagcaagcgcttgagaaatccttgattggtcgtaattccgaaaatcgaggtcgcgtcgagagcccgctcgagtttatcgagcgcctcattgcgcgtttcggcgtgggcaatgagttttgccagcatcgagtcgtaatacggcgtgactaccgacccgctttcgacgcccgtctcgacgcgaacgccgtcggcgggaaatttgacgtaagcgaggtctcccgtgcaagggagaaaattatctgccggatcctccgcacaaatgcgcacctcgacggcatgcccgctacatgtcaccgcattttgtgtaaacggcagcccttctccggcggcgatgcggagcatcacctcgacaatatcgatgccggtgaccatctcggtcacggggtgctcgacctggagacgcgggtttacttccagaaaatagtaggtgtctccgctcaggatgaattcgacagtgccgaccccgcgatagttcaggcgcttgccgagccgcaccgcgtcggcggccattttgtcgcgaagcgttgcggcgagattgacggcaggggcttcctcgatgagcttctggtgacggcgctgcagggaacattcacgctcgagcaggtgaagcacgttgcctttgccatcgccggcgatctgcacttcgatatggcgcccgcgttcgaccagtttttcgacgatcagtccgggatagccgaacgaattcttcgcctcacgcatggccgattcgatctcattggcaaggccatcgagatcggaaacggcacgcatacccttgccgccgccgccggccgctgccttcagcatcaccggaagcccgacttcctggacgatccgggcgatctcggcagcatcctcactgggcttcttgctgccggggacgataggcacgtcggccgcctcagcctctttcttggcagaggccttgtcgccgagccgttcgatcacgtccggcgtcggcccgataaaaaccagacctgccgcctcgacggcgcgggcgaacgtggcgttctcggccagaaatccgaagccgggatggatggcctgggcgccggtcgctttcgctgcggcaatcaccgcatcgatccgcaggtagctgtcggacgcggcggcgcctccaatctctatggattcgccgatcatcttcacatgcaaggcgtcggcgtcggctgtggagtgaatgccggcaaccgcgaccccgagccgatggcaggttcgcgcgatccggcaggcgatctcgccgcgattggcaatcaggattttcttgaacacggaacgatatcctctgtcatcacatcctgaacacgccgaagtctgtttcctgctgtggcagacggccggcgagatcaagcaagagggccatcacgtggcgggtctcgagcggatcgatcaccatgtcacaccaggtgttgcgcgcgaagttgtaggcgttcgcaaaatcctcaaaagtcttgcgaaccggagcgcgataagcctcgcgctcttcgtcggtccagctcgtgccatcgcgcttgtggatatcgtccttgaccatcgcgagcgtgttggcggcctgatccggccccatgatcgcggagcgcccgtgcggccacatcatcatcgcatgaggtttgaaggcacggccgcacatcgccagatagccggctccgtaggaattcccgatgatcagcgtgtatttcggcacgttggcgctggccattgcggtgatcatctttgcgccgtgcttggcgatgccgccttcttccgcctcgcgcccgaccataaagccggtgacgtcggccatgaacagcagcgggatattgcgcttgcagcagaggtcgatgaagtgagtcgccttcagcgcgcattcggaaaacagcaccccgttgttacagagaatcccgatctcgaagcccattatgcggccaaagccggtgatcagcgtctcgccatatagcggcttgaattcgtgaaactcactgccatcgaccaaccgcgcaacaatctctcgattgttggtggggatacgcgggtccgtgctgatcagcccataaatatccttggggtcgaagcgcggctctcgcggtggcgccacgttccaccgttgcatgggaatgtcaccgagattggcgacgatatcgcgggtaatcgcgatcgcgtggctgtcgctttccgccagatggtcggtgacgccgctgacgcggctatgcatttcaccgccgccgagcgcttcgacgccgacttcttccttggtcgcggcatagaccagttgtggtccgcccaggaacatggcgccctgattgcggatgatgacggtctcgtcgcagagcgccggcatgtaagcgccgccggcggtcgagggcccatggacgattgcgatctgcgcgataccctcgctcgacatccggatctggttgtaaaagatcgatccgaactgtccgtcgtcgggaaaaatgttgggctggtccggcaggttggcgccgccggattgcaccatggtgacgcaggggaggcggtgttgccaggcgaatttctgtgcgcggacgtgcttcttgcaggtgatcccgtagtaggtgccgcctttgaccgtggcgtcgttggcgatcagcatgcaggcgcggcccgacaccattccaacgccggtgacgatgctgccgccgggcggcacgccgtcatacatgccttcgcccgcgaactggcaaaattcgaggaacggcgagccgggatcaattagcgcagcgatccgttcgcgaggcagtaattgcttgcgctccttgtgcagcagccgcgcccgttccggaccgccgaccattgcagctgcccggcgctcatgcagatcggcgattctcaagccgtaagcgtcccggttacggcgatactcttcgctcgcagcggacacatcggacttcatgagagccattgcagacaacctcgttctttggggggatctctgaacaattgaagacgaatcgccggtagaatcgcgcctcaccgttccgggtcttgctctaataactgcgaggcaagcccatcacgtgctcgccgatgtagttgagaatcatttcgcgattgagcggcgcggtcttcaacagccgcaccagcggatagatatcgaagatgccgtactccttggtgaacccgttgccgccgaagcattgcagcgcggtgtccaccgccttgatgccggcgtcggctgcggcaagttttgccatgttggagaattcgccggcttcgcggccctgatcgaagatccaggcggcttttagtgtcatcagcgatgccaattcgacatcggtgcgggcgctggccaggggatgctgcaagccctgataagatccgatcggcacgttgttgaaaacccgccgctccttggcgtattcgactgcccggttcagggcatagcggccgagaccgcaggaaatcgaaccgacaagaatgcgttcgggattaaggcttttgaacaaaatgccgaatcccttgtcgacttcgccaacaatgtcctccggcccaagatcgacttcgtcgaaaaacagctgccattgtgtttccggggccggaatgctcactggaatgtattgcttctgcacgcccttggctttcaggtcgaccacaaacagggtgaagccatcggttttcttctgaacctcggtatgcgctgtcgttcgcgtcaccaccagcgcgtagtccgcgccatcggcgtcggtgataaatgtcttctgaccgctcagcgcgaagcgattgccacgcttctttgctatcgtggaagtacgaatcgtgttggttcccgcgtcaggctcggtgatcgcgaagcaaaagcgcgtcttgccgccacacgcatcgggcagatagcgcaatttctgcgcttcgctgccgtatttggctatgaatcccaagctcattgccgcgccgacgacgaggtttagcagtggaatgccattgtttgacaagccctcaaggaacaggtgcatctcgaccatgccttgtcccgagccgccgtattcctcaggcaccatcgttccgacgaagccatcctccgcaaccttgctgtaaagggcttgggggaatacgtgcttgtcggcgcattccatccagtatttgcgatcgaattgcttcgcaaccatatcgccgtattcgtagatttgccgctgctcgtgcgtaagatcaaagtccatgtgggaactccgccgccggccgaaaccgcgttgttctaagttgagaattcgaaaccctctcgggaacaccgtcgagtttattgtttgcgaggcggccggctgtcggtcggcagcatcaattgcttgctatctttaggcagaagcggctaggatttcaacctaacaatcgttcgaaaacgaacgaatgttagaaaataatgaagaccgtcgagcccgcatttcctggcttgtgatcagttttggggaatagccaattgaccgcgatgaaatccgctgtcgcgaccgggtcggacgagttcaagctcaatcgcgctcattatctggcgcggatcgccgatctccaaaggcgtcgggccgaggccaatcagggcggctccgccaaggctcgcgccttgcataaatcgcgcggccagctgctgccgcgcgaacgcatcgcggcgctgatcgatcccggttcgccgtttctcgagttcggccacctggcgggcgaggggatgtacgacggcgtgccgccgggcgcgacaattatcacgggcgtcggacaggtctgcgggcgcggttgcatgcttatcgccaacgatgccacagtgaagggcgggacgctgttcggcatgacaacgaagaagcatacccgcgcccagttgtttgcgtggcaacaccggctgccctgcatcaccttggtgcaatcaggtggcggcttcctgccggacatcgccaatatctttccggacgaagggcaggccggatcgatcatgtacaatcaggtaaagatgtcggccgagaatatcgcgcagatcgccgtcgttcacggcccttcgaccgcgggcggcgcttacattccggcgctgtgcgacgaggtggtgatcgtacgcgaccagggcgcgatgtttctcggcagcccgcaactggtatttgccgcgaccggcgagaccatcgagatcgaaccgctcggcggcgcggagatgcacagccggatcagcggcgtcaccgaccatatcgccgagaatgacagccacgcgctggcgatcgtgcgtaatatcgtcgccaacctgggagagccgccgcgattgcgctggacggtcgagcagggcgaaccgccttgccatgcggtcgaggaaatctatggaatcgtcagcgctaaccggcgcatcccaacggacaaccgggagatcctggcgcgcctcatcgacggcagccgctttcaagacttcaagcatcttcacggcgaaaccatgctatgcggatttgcccgcatccacggtttcgaggtcggcatcctggccaataacggcgtgctgttttcggaaagcgcggtcaagggggcgcacttcatcgaactttgctgcaagcgcgacattccgttgctgttcctggtcgatgtctccggctttatggtcgggtccgcagtcgagcgtcagggcattgccaagcatggagccaagttcatgaccgcgatggcctgcgccgatgtgccgaaatacactatcattaccggcggctcttatgccgcggcttatttcgcaatgctaggccgcgcgttcaaaccaaacgctaccctgatgtggccaagcgcccacgccgccttgatgggaccggagcaggcggcgacaacgctaacgatggtgcgcgacaatatccatcagcgcgaaggcagttcttggaccgacgaagaacgtgaagagttcaagcggccgatcctgagggacttcgaggcgttcgccgatccctataactacgcccgccatttgtggtgcgatatggtgatcgaacctgcggagacccgcgaggtgatggcgctgctgctcgacctcgccggccggacgcctgccaagccgacgagattcggggtgttccggatgtagctgctcgcctgtcaggctaagcccgccggaagcgcggcagcgtcacttcctcgctgattttttcgcagacgagcatgacgtccatgtcgaacgtgacctcttcgggcttgccgccggtataggtgctgatcatccgcgggccctcctccagatcgatcaacaaaacagcgtagggcagatcggttttgaaagcgggtcccggtgcgcgctgtaccacgctgaaggaatgtaccttgccgcgcccgcttgccggtcgatgggcaagattttcgccgccgcactgccggcacatcgcctgctggtaatattgcacgtggccgcaatcggcgcagtgctgcagcagcagcacgccgtcgtgcaggccgcgccagagggcggcggaatccgcgtcgggcgtcggcaccggcttcttcatggcgtcttcggacgagatcacagcgtgttctccgtgcccagaatggtggtggcattggttgcgaaacccgcgccgaggctgtgcaccagcccgagttccgcgcccggcacctggcgttcgccgcattggccgcgcaactgcgcgatgacctcatgaaaatggaacagcgatcccggcattcccgaatgggcgaacgacaacaatccgccatgggtgttcgatggaatctggccgccataggtcatatggccgtccgcgacgaaacggccgccttcgcccttcgggcaaaaaccgagatcttccagcatcatgatgacggtgccggtgaagcagtcatagacgccggcgacgtccatgtccttggggccatagccggccatttcgtaagcctttcggctcgacgcgaccgcgccggtttcggtcagcgagggcatcaggaaaatatgttcgtgggtgtagcattcgccgccgcccagaatgtagatcgggcttttgatgccgagcgccttggcatgttcggccgatgtcagaatgaatgccgcgccgccatccgatatcagcgagcaatcgagcttgtggtagggcgtcgtcaccatagctgagcttagcacgtcgtccaccgtgatcgggctggtctgctgcgcaccgggcgtgcgcatagcatgacgccgctggaccacggcgacttccgccaactgttccggtgtggtgccgaaatccttcatatgccggtgtgccgtcatggcaaaggtattcgcgacaggaatgccgaacggcatctcgtattgctgatcacggctttccgtcatcgagcgcagcgccagatccggcgtcaggccggtcagcaggctgtcgccgccgaccacgagtacgacctcggcgaggccgccatgaatggcagcggcgccaatattgaacatcgtcgccgccgtcgcgccggatacctgaagcgtgttcgaaaaggtcggctgaatacctaaatactcgctgaacgcaacgctgaagcgatggaagggagaagcgaaggcatggctcgacagcacgccgtcgatctcgtttttcccgatgccggcatcggccagcgccttcttcgcggcgtcggcggcgagccataacgggctctttcccggcaccttaccaaccggcgacattccgataccgattaccgcgaccttgccgcgtagcgtttgtttacgaatggaaagcatttggtctccgcccggcgtgatgcgtgaaggtcagtttccggccgtcgtgcgtgccgaggcgacgcccgtgctgccgccggaaaatcccaagaacttggcgtaggtatcgactggcacccgcctggtgacgagcttgttttcgggcgcagtcgtgtcctcgtaacccagcgccacgccacaaatcaggatttcggtgtcgtcaaacgaaagatgcttgcggatgatgtcgtggtaccaggtgaacgcggcctggccacaggtgtgcaggccatgaccgcgcgcggcgagcaggatgttctgcaagaacatacccatgtcgatatagctgccggtgttcaagcggcggtccatcgtcacgaaaagtccgaccggggcgtcgaaaaaaagatagttgcggttcatctgcgatgtgcgtgcggcaacgtcgtcgcgagcaatgccaagctttgcgtaaaggtcgtagccgagctcgcgccgacgcccgatatagggctcgtgccattcggtcggataatactcatattccggccgatgcttgtccggttcagtttcggcagctttcaggatgtccgcgcagagccgatccttcacctcgcccgcgatcgcgtagaccttccacggctggatgttgtggccacttggcgcacgcgccgagacctcgatgatttttcgcacgaccggttctggaaccggcttgggaagaaatcgcctgaccgagcgccgcgtcaaaatggcttcttcgacattcatgtttccgtctccgattgcggtgccttgccgcgagcagttttcgttcgacgaaaattgcgacgcgaagagctaatgggcgtgtccgtattagctgtttacccgttgcctttcgcccgccagcctggcttcgagctcgtggcgctgaaccttgccgctggtggaccgcggaaattccgaaaaatcgatgaaccggaactgccggggacatttgtatccggcaagatcgcgccggcacagagcaaacaggtccgcctcggtgaccgtggtgtcgcggcgcgacacgaatgccacgggaacttcaccccatttcacatcggggacacgcacaaccgcggcctcggtgatccctgcatcactcatcaaaacgcgctcgatctcggctggataaacgttttcgccgccagtcttgatcatgtacttggcgcgatcgacgaaatcgagcgagccgtcatcattgcgccgaaacacgtcgcccatgtgaaaccacccgccgcgaaaatcgcgcacgttggtatcatcagctttccaatagccggagaataaagttgggctgcgaatagccaactctcccggtgcgccaatcggaacctccttgtcggcagaatcgacaagcttgatgtcgcagaacgcgctttgttgcttcgccaggctggcaggtatttcgcctaccgggatcaacgatctggttgccggcggcaagccagtctcggtcgaaccaaaactgttgacgtagggagctcgcagcaggtcagtgacctcggcgatgacatgcggagggaccaggtcggccatcgcgccgcaaaggccaacgccttttacggtcgttttttgctccttgaagccggcgatgaatgcttcaatcatgcccggaatcaagacaaaccagccgatccgatggcgctccaaagcagacaataacggctcgatctggaagccatcgaccacgacgaccgttcccccgcgcaacagtgtcgcgagactgtggtccgtggatgccatgtgaaacagcggcgcccaggccacaaaggtatcgtgatgcgaaatgttcagctcggaactgaacaccagcgcccgcatgatcatcgcccgatgcgaaatgacggcccctttgggttggccggtggtcccactggtgtaaaggataaccaggccgtcttcggattccgccgcaatgggcagcgcatgaccgttttgttcttgcaatatatgctcgtattgcgggccgatcttgataaccttgcggtcccctatgggagaaagttcgagatttccggccagttcttcttcaacaatcaagagcttcggtgagaccagatcgatacaataggcgagttcccgctgcgacaatcgccagttcaggcaagcggtgatgaccccgagattggcggccgccagctccacttcgagatactccggtctgttacgcgagagcaatgctacgcggtcgcctcgtcgaagatcttggctcgccagcatcgaggttgcccgatgtacacggtcaaggagctgcccatagctgatctgtctgccctgatactcgatcgcgaccgaagatttgtggatcagcgctctcgcgcgaaacagctcgccaatcgtgggactggcgcccgccctcgttgtcagagctttttcgtgcccgtctgtcacggcaaatcctccgaatcttgctctcgccgcccccgacgacggcctcaattgaaaagtataagcttgcagcctttcccgatcggttttaaattctaacatctgttcgaatgaattcatagcaggttcgtggcgaggacgtatcggaaggcaggagaaatctgccgactgcgatatgcatcgtcatcccctgtaagatttaacccgaccaagcaaatcaagtgtccagaagggaagccgatgtccaatcgttatgctgcttataccaaattgaagctcgactatccgtccaagcgggttctccggctcacattcgaccggcccgagacctacaattcggtcgacgccgagacccacactcagctcaccaatatctggcgtgacatcaacgacgatccagatgtcaacgcggtcatcgtgaccggagctggcaaagccttttcggcggggggcgatttcgagctgatcaagagtattctagacaacccggtcgcacggatgtcgacctggaaggaggccaaggatctcgtttataacgttatcaattgcaacaagccgatcatctcggcgatcaacggcgtcgccgtcggtgcaggtctcgtcgtcggaatcctggccgatatctcgatttgtggaaagtccgcgcgcatcgtcgatggtcatacgcggcttggcgtcgcggcgggcgatgtcgcttgcatcatctggccgttattgtgcggccttgcaaaagcaaaatattacctgctgacctgcaagccactgtccggcgaagaagctgagcggatcggtctggtgtcgctatgcgtcgaagacgcggacttgcagaggatagcgatcgagacggccgaggagctttctagcggcgcgcaaagcgcgatccgttggaccaagtacgctcttaacaactggctgcgcgtcaatggtccgctgttcgatacctcgaccgcgcttgagattttgggtttcaccggcgccgaggcgcgcgagggattggcgtcccatctcgaaaaacgcaagccggtgtttccgcaggattgcccgctctgattttcgcgcgcggcggtcatctcagaagggggccggaatttcacccggccttcttcttgcggcagccgttagccgagaattatttcatcgaactgacgatctcgcgaagcctgaatttctgcactttgccgctcggcgttttcggcaaggcttcgagcacctcaatgcgctccggccagtagttcttggctacagcgttctccgccatatacgccatcacgtcagctaacgtcagtaatgctccctcgcgcagcacgacacaggcacaggcccgctcgcccaagcgttcatctggcactccgacgattgcgacttcccggacggctggatggcgatacatcagttgttcaatctcgatcaccggaacgttctcgccgccgcggatgacgatgtccttggtgcgccccgtgatacgaatgtagccgtccttgtccttgcgggcgaggtcgccggtctcaaaccagccatcctgatcgacggcatagagatgcggccgcttgaggtagcccacaaaggtgccggggcccctcgcttgtaggcgcccttcttcatcgtgaggcaggactttgcccccgccatcgacgatcctgacttccataccctggcttgggcaaccgtcggtctcgaagactttttccggtggatcgtcgagcttggtggtcgtcaccagcccgttttccgtcatcccccatcccgagacgatgtgcgcaccaagattctgtgtggcctggcgcactaaaacacggggaattggggcgcctgccgatacgaaagtgcgcagtgaacgcagcgcttcaggccgccgctccgcctccgcagtcaaatccgccagaaacggcgtcgatgccatggtcatcgtcacgcgctctgtctcgacaatatcgaccgccttggctggattccagatatcctgaagaatgacccgtcctcccagatacagcggcagcagcaggccgacgagaaaaccggtctgatgggccatcggcgaggccatcagcacgacatcgttggctgtgagacggacgcgatcctcaaaatatcgcacgctgttcagcaacgtattgcctgtatgcatcacccccttgggctcacctgttgtgcccgacgtataaagcaattgcacgacatcatcggccgaggcagcggtcgctgcctcaacccgctttcccggcgaattcagcacggtctcgaagtcttgattgtcgcccgaaccgataatgacgacgtgctcaagtgtgggcaccttggccttgaggcggtccgccattgcggcgtgatcgaaatcgcgaaatcgctgtggaacgatcagcacgcgcgtctcggccaaggtcagcatgaattccatttcgcgatcgcggaaaatcggcatgatgggatttgtgaccgcgccgatccgcagcagtgcgaggtgaagagccatgaattgccaccaattcggcaactgatacgacaccacttcgccaggcttgacaccaagccgcaacaaattagccgcggttcgctcggcagcttgctgcagttcgccgtatgtcagcgccgtacgtcggttggacgcagcttcgtagccaacaaccgcgagccgccctggatcgtttctggcatgcctcgaaaaaaactcgagcaaggtttgatcgctccagaatccagcggcccgcatcgcttgcttgcgctgatctgacaagatcggatccatccccattgtacgcctctccttatgaaatccttggagtaccggggtcggggcccggtaaaaagtccgcttccacccagcccgacagctcgccattttctccgtggtttatgcggcgccaagtttctcgcgaagcctgtcaactgcttcgggattggcgagtgcggaaagatcgccgggatccttgctttcgaacactgctcgcagcacccggcgcatgatcttcatgttgcgggttcgaggcagatcatctacaaaaattatcttctccggccggtacgatgctcccatgccgctcacgatagcggatgagagctcgttgacaatttcactctcgacgttcgtacctggcatgagcacgcaggcacaaacgatcgccgaaccctttaccgggtgcggaataccgaacaccgccgcctcggagaccttgccggtgtcgatcaaaatgccttcgagctcggacggcccggtccgcttgcctgaaatcttgatggtgtcgtcggagcgcccgagaatatagtaaagcccatcatggccgcgcatcgcaaaatcgccatgcacccaaaggccgggaagcgtgctccagtagctttcgacatagcgcgcatcggccttccacaagctcttggtcaatccgatcgacgcctggcggagcaccagttcgccgacttcgccgggcggcaagctcttgccggacatgtccacgatgtccgcgccgacaccgagcgccggacgggagaacgaaccggggttcatcggatggttcggcgtccccgtgaagatgcaacctccaacctcggtgccgccggaaatgttgatgattggaagctttctcttgcagacatgctcgaagaaccattgccacggcgcgttggtccatgcctcgccgcccgacgcggtcatacgcaggctcgacagatcgtggcgctcgacgtcctgcgttccatagcgcatcaaactacggactatggtgggggatactccgagatagctgacgcgatgatcctggatcagccgccagaatcgtccggtgtccggaaaatccggcgtgccttcggcgatcagaaggctcgcgccggcgaaactgggaatacatgcgcacatcgcgccgaccatccagcccatgtcactgagaaagaaaaaacggtccgatgatttgaaatcggcgcaaatgatcatgtcgcgtgtgaccatagaaccgatgaagctgatatgggtccaaacgcaacccttcggttcgccggtggttcccgaggtgtacagcagaatcgcggcatcttccgcattcatttcggcggtcgcgatagcgccgtccttgccgatgacgatatcgtgccaccagtgatcgcggccctttcgcatcggggtttcgatcttaaggccttcacgatcgacgacgatcacgtgctgcactgtcggtgaggattcgagcgcgacgtcgaggacggatttgagcggtgccgcagcgccccgccgccaggtcccgctcgcggtgatgacggccttggcgccgccatggttgagccgggtttgcatgggagccggaccgaagccggagaacagcggcatcaggatcgcgcccaatttcagcacagcgaaaaacgcgataaaggtttccggcaggttcggcaaatagagagcgaccacatcgcccttaccgacgccgagatcacgcagtccctgcgcaagccgtccgacgccgcggtccaattcacgataggtaagcgcgcgctgttcgcgcttgtcttcaccctcccagaccaaaaatgtctggtcccatacgggcgtgctgcgatgcttgtcaatgcagttcagcacgatgttggtggtcccgccgacgcaccagcgtgcccatggctgcccgcgcgacagatccaacatttggtcgtaactgcgatagaatcgaacatcgcagaacttaaagacttcctccattagccatgccggatcggcctcagccttcgacgcgaggtgatcgtaatcgtcatatccggttgcgcgcaggaaagcggtcagattgcttgttgcaattagctccggcggaggtgtccatgcataggacgttggattattcatcgactacgttccctgatttgcagtcaagttcaattcgagattgacttaccggccgataggaacgcatgcccgatcgaacacgagacggtggacaggcccgcccgataagcatgtgtccagcctggacgcctaatgctaacgctctcgtcttgcgagttcaatcgattctaacaatcgtttgataaatctattcgtatggaacaacaaatgaggtatccatcttttggacgccggtcgcaacccgatttgacttgcctcaatttctaacgtctgttaggttagtgcaggtaccaatcgaggcacaagtgaaagtcaacccggacctcgcggaatttctcgctccaacgcattacgtggattgcgactcacctgcgattagagagtttgtctcgcgtgtggctggcgacaaacaggaccggtcgacggccgagaaggcaatcctcctatttaacgcggtacgagaccagatcagatacgacccctacgcggtgagtttgtccgaagccgattatcgcgccagcgagattctcaaaacgccttcggcgttttgtgttccgaaggcaatattgttgacggccgccatgcgcgcagcgggaatccccgccgcgatcggctttgcagacgttcgcaaccatctgaattcccccaagctgacggagttaatggggactgatctcttcatttatcacggctacgtcgcgctttggctcgataggaagatgttcaaagtgacgcccgcgttcaacatggagctatgtgaacgatttggagtccgacctcttatcttcgacggtacggccgacgcgttgtttcacgagttcgacacgagcgatcatcgccatatggaatatgtcaatgaccgaggttggttcgccgacgctccgataggcaagatgcttgaggactttcgcgttgcatatcccgcgctggtgacattgaatactggtggcgtcttaatagatgacgctgccttcggagcgcctcaatcaggggagtaggccggagcgaacgaaaccgcgggatttgactagccgaatccaggtgcgagctgaacacgacacttgggcgcgcagtttatcgatggcgcgatcggaatcgtccgattggccccagcccgaaaatctacgcacggcggcacgcgtctcgccgagagatggcaatgggggcgataggtacgctcattttgagatctgccgcaattcggaaggctgcttggcgtattgaaccgcgacacgaccgaccttttcacgtgcgatgacaagtttctgaatttgtgcggttccgtcgccgatttgcaggcccatcacgtcgaggtaacgctgatgaaacggcagatcggtggtgtaaccgtagtggccgtgagtgaggaggcactggtggatgatctcgcaggtcactttcggcacataccatttgcacatcgcagcttccgcggtatgtgcaagcccgcgatctctgagcgaaagcgtatagtagcaaagctgccgcatcatggtgagctgggtctcggcttccgcgagcggaaagctcacgccctgaaactgcgcgatcggccgctcgaaggcgagcctttcggttgagtattgccatgcttcatcgaccgaagcctgggcaggtccgatgcactcaaggccgatcaaggcacggctatagtcgaagcctgacatgatcttggagaatcccttgttctcctctgccatcaggcactcggccggaatgaagacgtcgtcgaagaacaccgagccgcgtccgacaggtttggtaccgatgtcatcaaaatgcgtccgcgtgattccgctctgcgccagatcgacaaagaatgcgctgacgccacgtgcgccgtcttcgaccttcccggttcgggcaaagatgactgctgcgtcgcattgatctgaaaaactcatggaagtcttttcaccgttgaggcgatagccatttcccgatttttcagctcgcaaaatgaggttggcagcgtccgaaccgccccgcggctcggtcaggccgaggccgatgatcttctcaccccgggccacttgcggtagccactcctgagcgatttcgggcgaggcgtgctctgcgagcattccgccgagcagtgacgccagaagttggacgtagctggcgttgaagtctccataagcgatctgctcgacaataatgcctgccgtcacgctgctctcgccaaggccgccgtatttttccggcagatcggcgccaatcaggccgagtgaccccatttgtttcagcatggcacgatcgatgcggtgttcccttgcccgcctctgatagtgggggcccagcttgtccttcgcgaaacgcttcgcggtttcctgaaaagcctgctgctgctcgctaagcgcgtaatccatcgcgattcctcccatctaggtgatcttcagttcttgcattcagtctaacaactgttagaaatttaacaaccagccacggaggcaagtccatgctgacgccgaccagccccggaacatcgctttaccctcatttgctatcttcgctaaaggtagggcggaccacgttgcgtaaccgcatgatcatggggtcgatgcacacccgtctcgatatggaggacaacggcgtgcacaagatggcggttttccttgccgagcgcgccaagggggagataggactcatcattaccggcggttatgcgcccaacagcgcgggtctgattgagcctggggggccgattttgaccgaacgtgcgcaagctcgcgaacttcgtcgcatcactgatgctgtccatcagcacggtggtaaagtctgcatgcaagtgttgcattcgggccgctattccaagcaaagggactgcgtcggtccttctgacatccccacccgcatcaatcggtttcccccgcgtgcaatgactggggcagagattgaacagacgatctcggattacgtgcgctgcgcgctgctcgcaaaggaggccgggttcgatggcattgagatcatgggatcggaaggttacctcattaatcagttcacggtggtgcgaaccaacaaccgtaccgatgagtggggcggatcggagcagaaccgccatcggctcgcggtggaactcgtcaaacgctcgcgaagcgccaccggcgacgacttcatcattgtctaccgaatctcggcgctggacctcgtcgaaggaggtgcaaccggcgaggagattgatcggcttgcccaacgggtcgaggccgcgggcgccgacattctcaacaccggtatcggctggcatgaagcgcgcgttcccacgatcgcttacgtcattccgcgcggcgcatggcgttttgcggcatcgcgtctgaagaaagcggtcaggattccggtagtggcatcaaatcgcattaatacgccggataccgcagaagagattctggcggcgggggatagcgatctaatatcgatggcccgcccgatgctggccgatccgcacttcgccaggaaggtgcgggagggcaacgccggcaaaatcaacatctgcattgcctgcaatcaggcctgcctcgacctgatcttttccgagcggaccgcgagttgcctggttaatccgcgtgcctgccgcgagactgagtttgaggacggcccggctcagacctcgcgcaggatcgcagtgattggcgcaggcgcgggcggtctcgcagctgccgcggaagccagccgacgcgggcacaaggtaaccctgtttgaggccgctgatcgcataggcgggcaactcaaccttgcccgagcagtcccgggcaaggtcgagttcgacgaaatgctgagttattacagcggccaaatcgccgatggcggcgtcgatctcaggctgaattctgctccatcggttagtgacctgaaagacgcgcggttcgatgctgtcgttgtcgcctgcggcgtccatccccgtgtgccggagattcccggcatcaaacatcccaaggtggtgttctacaacgatttgttgagtggcaaaagccacgcgggacggcgagtcgccatcatcggcgcgggaggcatcggtttcgatgtcgccgaatacctctgccattcgcagcctgatgaaccgccaaaatcacgggcaatggatattcgtgagtttcagcaggagtggaatgtcgatgccagccttacgaaagctggagggctatcgggcgatccgctggcaccaaagccaagttcgcgcgaaattaccatgctgcagcgcaagaagacgcggcctggcctcggtctcggcgtctcgactggttggatcctgcgtagcagtcttgaaaagcgcggggtcaagattgtcggaggggttatctatcagcggatcgacgatcaaggtttgcatttcgtggccgagggtgagccaagtacgctcgcggtcgatacgatcgtagtttgcgccggccaagtatctaaccgcgatatgctcaccgaactgctcaagaccggaatcgagacgcatgtcatcggcggcgccaaggaggcttccgaactcgacgcgatgcgtgcggtcgaggagggcgtgcgggtcgcgcacgcgctttaaaggggggaggagcctgagatgagttcgcaaagcagccagccgagttacgggttcaccgacgacgaactctccacgatcccgacagtgtaccgacctgatctgttcaccggccagaccatcatcgtcagcggcgcggggagcggactcgggaaggcgatcgcattcctgtttgcgaggcttggcgccaatctggcaatctgcgggcgcgacgccgagaagctcgcacacgtcgttccggatctagagagtctcggcgcccgcgtcttcagtagaagtctcaccatccgcgaccccgatcaagtcaacgaattcgtcaaagacgtctgggatcattttggtcgtgtcgatgtgatgatcaataatgccggtgggcagttcgcccagatggccatcgacttcaagccaaagggctggaacgcagtgatcgataccaacctgaacggatcgtggtggatgatgcaagcggcggctcgcgagtggatcgagcgcggcaagaccggcaatatcgtcaatatcgtggcattgatctggcgaggcctgccggggatggcgcacaccgccgcggcgcgggccggggtgatctacgcgtccaagaccgtcgcggtcgaatgggcgccgcacggcatccgggtgaattgtgttgcccctggcgtcaatgaaaccacggcattcgaccgctatgttccggaaggctccgcgacctacaaggaagcgaatcccatgaaacggcacggcgatgcatgggatatcgccgaggcctgcgtttatctcgccgcgccgtcagggaaattcatcacgggcgaaacgctttcggtagacggcgggcagcaaatgtggggcgatccgtggcctgccggacgtccgaaatattttcgcattggtcagacgtaaacaagctcccgaaatcgaatatccgatatgccgccgcagcgttaacgattttgaccgctacgacaatcctgcatcgccgcgttcgcgtttggcaaatttaacggcgtcgatcatatcgcgggcgtcgtgggccagatgtagcgtctcgccgccgtcgatgtaccagtcctcgccggtgacgaattgaccgagcggcgaggacagaaaaatgattgctgcagaaatatcctcgacgctgcccatgcgccccagcacgttgcggttgagcctgacccagtcgtccggcggtatcggatagcggccaagcgcctcggtcttgatggttccgggtgcgacgcagtttaggcgaataccgaactcggcccactcgtaggcgagcgttcgcatcatcgcggtaacgccgccgcgcgctgccgcggtatgcacgaagccgccaaggccgctgcggatacaggcggttacgaacacaatcgatccgccattcgccaacatgaaatggtccgcggcagccttggttacctgccacgagccgatcaggttgttgcggatcacggtttcaaagcccttgttgctgagttcgcgggctggcgtgacgaattgtccgccggcattattgacgaggatattgagcccgccgaactcggctttgatcttctccatcgcgcgttcgatcaagtcgggttcgcgaatgtccgccgacacggcaaatgcctcgccacccgcgtcgcggattacctttgcggtgctctctatcggatcgatgcggcggccgagaacggcgatgcgggccccgcagcgcgccatctcaatggccgtggcgcggcccattcctgtgccgccgccggtgacgagtgcgacctggcccttgagaagttccggcgcgaagcgcgtttttgaaggactctcgtgcatcaccaatcccatgcctgaaaatacttttgcgttcggtcgagtttaatatattctaacatatgttagaatacataaaaaggcagatcgatgtcagacaatgaacctatacgttattcgctcgaggatggcattgccacgattaccatcgatcggcccgcgcgtaagaacgccctgtcggttgaggcgatgaacggtttgaccaatgcctgggagcgtgtcgaacgggattcccaggcgagggtggtgatcctgacctcggctgactgcggcgtattctccgccggtctggacctcaggcaggcagccgagatcagggcgcgtgacggcgtcgacatactgaccctgatgcgcgatccgatgcaaacggccatgcgaaccgtttcaaagccgatcatcgcggcgatgactgggtcgctgatggcgggcgggatgctgctggcgctgaagtgcgacctgaggatcggcttacgcggtacacgcgccgggattaccgaggtcaagatggggcggggatcgccgtgggcagtaccgctgctctggatgttgccgcaacccgtggtgatggaactcgtcttgaccggcgagaccctgccgatcgagcggctcgcggagtatggtttcgtcaattatctggaagaaacacccgacgctgttcgtgcgcgtgcattgcaacttgcgcgcaagattgtagaaggcgcaccattgtcggtgagggcggccaaggccagcgtgttggccgcgatggacctcggctgcgagaaggggctcgttgaggccaacaggcttcatgtcgaagcctacgcaagcctcgatgccattgaaggcccgagagcctttgcagagaagcgtaagccggtgtggcaaggtaaataaggcaaggcagatgaggattgtgccgaacgatgtccgctttcatgctttcgagttgatagcggataccaatcctttccgacaatttttccttacccgcagggtcaacgatgagcacgcaccacgtcggcaccccgaaacgctcggcttatttcagagaagagcatgaactgctgaaagcccagatacggcgattcgtcgaggaggagatcaagccgtatgcgctgcaatgggagcaggacggcatggtgccgcgcgacgtgctgcggcgcatgggtgagcttggctttctgggcatccgctattcagcagaatatggcggctcgaacatggatacgttggccaccgttgttttggccgaggaactgggacggtcgacgttctcgggagtggcgatcacggttctggttcataccgacatggcgtcggtgcatctctacaacgccggctcgcaggccttgaaggaccacttcatgccggatgtcattgcagggaagaagatcgtcgctgtcggcgtcaccgaacctggcgcgggctctgacgtgaaaggcattcgcaccaccgcgcgccgcgagggcgacggctatgtgctcaatggcaccaagatgttcatcaccaacggtgtacatgcggacctttattgcatcgccgccgtgagcagtccggatgcacgtccgtcccagcgcttgtcgatgttcctcgtggagaaaggtacgcccggtttccgggttggtcgcgatctcgacaagcagggctggaggtcatcagacacggcggagttgctgttcgaggattgccggatccccgcaacgaacctgctcggcgaggagggacgcggtttctacgggatcatgcaaaacttccagaacgagcggatcgtgctcggtgcaatggcgatgggtgaggcgctagctgcgatagagatcacgctggactgggtcacgcagcggcagaccttcggcgcgccgctgtggtcgagacaggctatccgtcatcggttggcgatgctggcggccaaggttgaggcagggcggcaacttgtttattgcgcggcatggctggtaacgcaggggatcgatgccaccaaggaagtatcgatggtcaaggcttattgcggcgagctcgtcaacgaggtgatgtacacgtgcctgcaatttcacggcggcatgggttacatgcgagagagtacgattgaacgaatgtcgcgagatgctcgcgttcaatcaattggcggcggcactactgaagtaatgctggaagaggtcgccaagcgtatgcgataaccaacgcacaaactggaaacactaacgcggcaagatgccgttgaagatcagcaacgtggtccggctcgccaattcctgtaccgagctgctttttcgcgcatcgaaccactcgaccgtccaattcaaggcaccaagaataaacctgcgtagcggaacgattagtatctccgggcggatttcgccggcacgctgcgcatccgccagcatgtcatcccaatatttgccataggcgcggcgcagtggacgatggcgcttcttgatgcgctccggcaactgaccgtagacgcgcatgttggcggaggtgtagtcgctttcttgcagcagggtgacaagatgagctttgatcgcggcgctgatcttgttccggtgcgaccccttgccaagttcgttcacacttgcctttaccgcatcgaatatacgttgcaatccaagttcgaggatttcgtccaatatcgcggttttcgaatcgaagtggtagtagatgctgcctgccttcattcccgccttgtcagcgatctgtcgaagcgtagtggcggaatagccctgctgtcgaaaaagctgtgccgcgacccgaaggataaggtctcgtgaaacgtgcgatttcggcggcacggaaagtgcgacatttttacgcttgggctcgcgcttggcaacccgcttcattctcgatgaagatttcaaatcttgctcgctcaaacccgaatggcatcaccgtacaaagcccagctcttgcaccagatgagtaatgccgtgtaatagaccaacaaggctgttcgggcaacattgcgaagcgctgaaactactttcaatgggcggccagcgaacgactcaagcctcggacgatacatcatcacgatccgaccgtaatagacggatcggcctcttgcaagggagccgggccttgtccccattggtctggccggctacaactcgatatcgccggccagcagccgctgcgcgatggtgcgtgccaggatctcgttggtgccgtcggcaatgttgatgattcgcaaatcctgcaaggcatggacgaggccgacctcgttggtaaggcccatggcgccgtgggcctgtatcgcttgatcgacggctcgatagcccacctgtacggcgtaggctttcgccatcgacaactccttcacggcccgctcgccactatcgagcagcatcgcggcgttgagtcccatcagatgcgcggcgtgaagttcagtggcggcgcgcgcgagcgggaacgagacgccctgatactcggcgatcttggcgccgaacgcctcacgctgctttacatagccgagcgccttctcgatcgcccagcggccctgaccaaccgcacgtgccgaattgtagatccgcccgagcgaaacgccatagagcgcgagcttgaagccgtcgtcgagcgcgccgacgagttgccacggctcaaccctgatgttctcaagcaccagcgcgccttcatgaccgccgggatgaccgaagagccgcaccacgctttcaacttcaaacccctcggtgtcggtcggcaccagaaagccgctgatcccgccggcttttcgctgcgccttacccggatcggtgacggcaaacacgatgcaccattccgcggtgggcgagttcgtggtccagagtttccgtccggtgatgcgccagccgtctccatcgcccaccgcgcgggtctttatcatgctggcgtccgagcccgctcctggttccgacagtccgaaacacatcgaggtgcgtcccgtgatcattgcgtcgagacagcgcgcctgcgcctccggtgtcgcttgcgtcagcattgcgctcggcccaaaggcccaatgagcgatcacccagggcgtcaggatcgaatggccgccgattcgtcggtagacggcctcccaggcgacgtaataggcaagatgtccgagcccgccgccgccaatcgcggctggcgcacacatcgcgtagtaacctgccgcggcggacgccatgcgcacctcgcggattagcgcgcgcacctccggcgcataacgcccgtcggcagcataggtgaggcgcggatcattgaacaacgcgtggttgcgctccaggcgcgggagaacctcggcttcgacaaaccgcatgaccccatcgcgcaccgcaaccacgtcttcgggaagctgaaagccgattgcgctcatgtaaccatcttccgtgtcgagaccaggggctgcgggcgaagcgactttagttataaggcaaactcatctcacgagcgattgtacgctgtcgtgttctccggctgctaaacatcgagggagccgaccagggcgtatcaagggcgagccactcatcttttcttttcaggctaaagccggaaataccccgtcagatcagattgcgacgctcggcctcgctgatggcctgcacgcggttgcgtgctttcaggtcagcgaaaatcctgcgcatatgccatttcaccgtgtcttcgctgaccaggagttggtcagcgatccgcttgttcgaaagtccatcgcgggcaagccgcaggacgctgatctgccggacggacagcgtggtaagctcgagggggaacgagggccgctcagtccttggccttggcttggcgatcccgtcgaaatcgaacgtgacaaaggcatcggcggataccggggccaaggcgagcaacagatcccgcgtgtctagcccggtccggtagcatcccaactgcttgatgagttcgaaggcattgaccgcctttcgtcgcgcgggcgtcagcgccccggcggcggcgtgggccccagcttcgcacatcagcgcgcgcacttccaatcgaccagcaccgatcgaccgcgcgatcttggcagccgcctcggcgttgcggagggcgaggctgtgctgccccttggggatggcttccatcgcgcgcaacagcgatatttgggcacgcaggggtcttgcatggggcccggtcaggacctcactagagtcacgcggcagcaggtagtcgatatcccgcgcgccgcttaacagggccaattcggcaagttccaactcgatcagcattcccagtcgcggcagtgccctttcccccgcaagggcgcgtgcccgttccagcaatgccgcggcgcccctgagattgccattggcccgatgccaggtcgcgatgacgcggctgaccccgtagaacacgtcggtaacgccgtagttggcgacaaagtcaagcaacccggcgacagagtgctcggcgatatccagccgccccagttcgaacagcacgtcaagttccagggcgatcagcagctttgacgagaaggatgtgcgcgtcacctgaacgtcgctgtcattgcgggcggtatcgataagttgcagcgccgtgcgcatgtcgcccctggcgagggctgcctgaatctcggccgcataaagccagccaaaggcatagtgttggtgcgcggcgctgttgactgaatgggccatgactagcgcctgcttcagttcgtcaaaccggtattcactcgctagcatgaaggccagacaggtgagtgccgcacccttgccgacggcattatcgtcgccaaagttactgatccaatcgttgcacagccgctcgctcaactccagttcgtcatgggtcgcagcaccgatcgcgcggaccagttgcagccagccgcggtcaggatgcgcaccggacgacgcgcgcggggcgggcagatagcccagcagcctttcggccttgtcggcctgttggctgaaatacatcgtccaagcgtagctgaggcagatgatcggatgcttgcgcaactcgcgggttgggaaccggcccagccattcgcgcaacgcctcgatctcgccttggcgcagggcgagatcgagcatgatgtcctcactcagccccagcgcccagcggtggtcgcccgcccgcagcgcaaggtttaccgccttctggaactcgcgcctccgccagtgccagaaggccgcacgtttcaggacataggattttcgctcagcactgcgcaccagaaaccgatgctgaaggtaatcgcggagaaccgggtgcagcgagaacagcgttgagtcattttcggcggggcgaaacagcaggtgatcgaggtcgatctccctgatcagcgcgtcggcgttggtggacttgtaggcgtaattgtagctttccgccgaaatcgggtcgatcatcgctgcgttttcaacgaactcaagctgccgacgcgacaggcgtctctcgatctcctcatggaggaaggtcaccgtttcgggccagtttaccgcgggccggaccggcaattcggtccggcacatgatgtggcagagcgcgggccagccctgcgtctcggcgatcatctgctgtgctgttacgttggcgaccgggtgcgcccgcaaaaacgtttcggcatcgtccaaggtgaaggccagatcgcgggcatggacctcccgcactccgctttccagccccagccgggcaaaaccgcgccgggtatccccggcgatagcgaatcggacattcggcggggtttccagcacgaaggtttccagtgcgtgcagcagggcgggtgcgtgttcgatgtcgtcgatgcagattacattggccggtcgctcagcgccgaattcttcccatagcgtggccactaactcggccagatccgccgggaccgctcggccttcgcgggacgctgcgtcgagcagttggccgtagatggcctccgccagcgcgccttccgtttcgtatccgtcgcgcaaagacacccaggctgcgttgtttccagcagccctgaaggccaaccagttctgcgccagaacgaccgattttccataaccctgcgttgcgcgcaagatcagtgtccgggtctccggttggcctgaaaacgtaaatcggggccgcgcgatacagcgcctggcgattgtccccagacgcgcggaaatgcggacggcacgcagccgtcccggatatgtcggctcgtcgcaggtacccctgatcatgggcgtctcaaggcagcgcagatagctataggataccccaatcgggaactacacttaagtgtagttgtgagtcccggcccaatgatctccgcttcctccgctcgctcggaatcgggatgggcgtactggtgtcacctgccgcgcgacgaatggtggggtcaaggggaggacatgccgaatgatcaatacgccagatcagtctgtttcaatcttaggctacatcgaccgtaagcgctatctttggatgctgtccaccctgtggccggcgacgccaatgatcgggctctggctggtagcgcagaccggatggaccatctggtacgccttggtcctgatcgtctggtacgcgatggtgccgcttctggacgccatgttcggcgaggatttcaacaacccgccggaagaggccgtcgagatgcttgagaaggaccgatactaccgcgtcctgacctatctgaccgtgccgatccattacgcagccctgattgtagcggcctggtgggtcagtacccatgcgatgtcttggctcgaaatcataaccttggcgctctcgctaggaatcgtgaacggcctcgcgctgaacactgggcatgagcttgggcacaagaaggagacttttgaccgctggctggccaagctggtgcttgcggttgcgggttacggccatttcttcatcgagcacaacaagggccatcaccgcgacgttgccaccccgatggatcccgcgacctcacgtatgggcgaaagcatctacaaattctccacccgcgagatacccggtgccttccgccgcgcatgggcccttgaagaagaacgtctgtcgcgccggggcaagagcgtttggagcatagagaacgaaattctgcagccgatgctgattaccttcgcgctctatgcgggtctgcttgccttcttcggccccctgatgctggtcttccttccgatccaaatggcgttcgggtggtggcagctgactagcgccaactacattgagcattatggcctgctgcgtgaaaaactgcccaatggccgctacgagcaccagaaaccgcaccactcgtggaactcgaaccacatcgtgtcgaacctgatcttgttccatttgcagcgccactcggatcaccacgcgcatccgacgcggtcctaccaatcgctgcgcgacttcaaggatctgccgacgctgccctcgggctatccgggcatgttcttcatcgcgttgatcccaagttggttcaggtcggccatggactcgcgcgtggtagattgggcccatggcgatctgagcaagatccagatcgaggatggcaagcacgcgctttacgaacgcaagtttggtacggtcggcaccgacgcaaagcccggcttggttgctgccgagtaaaccgccaacttccgcaccgctctcgcttgccaaacgatgcggacacccgacaccacagccctgagccactcgactcgtttcaatcgtcgggcggccagcggctggccatgtggggcggtcaggccgtgcgatagggcagaggttgcgcgccgattacggaaaaaaccagggatagctgccattcggcccagcaatgtcagatcggcggaaaaggaggaaaaaggaacatggccaagtaccagtgtcctggttgtaaatacacctatgacgaaacgctgggccatccgcatgaaggatttcccgcaggcactgcttgggccaacgtgcccgacgaatgggcttgccccgattgcgcagtgcgcgacaaggtcgacttcgaattgatcggcgaagcgccggccgctacgacgccggccactcaggccgtcgagtttgccgggacggcacgtagcgcggtcccggtcaccgacacggccgttatcgaaaagcccgccagcccgatgtcgaaaccggcggcgcggatggccgccgtaccgcaggccgcggaggctttgcccccccaattgttcagcctgcaaagcgagcccggctttgccgaaaacaagccctttgtgaaatgggtctgcatcacctgcgggcatatctacgacgaggcactcggcgacccttccgggggcatcgctgcaggaacccggttcgaagagattcccgaggattggtgttgcccggagtgcggcgccaccaagaaagattacgcgctttgccaggaaacctagtcaactcgtgttggcaaagggtatcgggccgatcaggcccgccatggaggtcattgtgaatattcacgccgatccgaacgacattccattggtggataccagatctaccgttgcggatgtttttgcgaagcaacgggaggcgggctgggcgcgtcgctcggatttcgaccgcaaggcacgcatcgcggcgctgaaccggctgagggaagtcctgcagcggcgcgagacggacatcatcgcggctctttatgcggatttccgtaagcccgagagcgaggtgaggctgaccgaaatcctgccggtgctgcaggagatcgcgcacaccaaacgccacttgaagggctggatgcgatcgcgccgggcagcggccacgctgggtgttttcggcaccagggccaggatccgacccgagccgaaagggatctgtctgattattgcgccgtggaattatccgttgaatctagccttcgggccgctggtctcggcattggcggccggcaacagcgcgatcatcaagccgtcggaactgacgcctgctacctccaccctgattgcggatatagtggccgaaacgttttcgcccgatctggtggcggtggtcgagggcgatgcagcggtcgcgcaggagttgctggcactaccgttcgaccacatcttcttcaccggcagcccgcaggtgggcaagctggtgatggaagcggcggcgaaatcactggcctcggttaccttggaactgggaggcaagtcgcccaccatcgttggccccactgccaacctgaaaaaggccgcgcgtaatattgtctggggcaagtttgccaacaacggccagacctgcattgcgcccgaccacgtgttcgtgcatcgcgacattgcgcaagagttcaacgagacggtgatggcggaaatcggtcgcgtctatggcaagacgcccgaggtgcagaagatgacgcccgactattgccgtatcgtgaatgaccggcatttcaaccgggtcgccggcctgatcgaggatgcccgtgccaaaagcgcgcggatactgctgggcgggcagacggatgcggtgcagaaattcgtggcgcccacgctgatcagccagatcacccccgagatggcgatttcgcgcgaggaactgttcggcccgatcctgccgatcatcgaatatgacgatatcgacaaggtgattgatcagattaacgccaatccgaaaccgctggcgctttatgtcttcgacaatagccgggcttttgccgaggacatcatcacgcgcaccagttccggcgcggtggggatcaaccttaccgtcgtgcatttcctgcatcccaatttgccctttggcggggtgaacaactcgggcatcggtgcggcccacggagtctttggctttcgggcattttcgcatgagaaggccgtcctgcaggaccgctactcgatcgtccacatgctgttcccgccctatacaggttttgtgaagcggctcatcaggcttgtcgtcaaggtgctggggtaactggttcgatggaacaacgatctgaaagtcacggaacgtacgactacatcatcgtgggagccggctcggcaggctgcgtgcttgcaaataggctgtccgcagatcccgcgaagcgcatcctcttgctggaggcgggaccgcgagacaagagcgcgctgatccatacgccgatcggcatcgcgctgctggccaacagcaagaaactgaattgggccttcaataccgaaccccagcagcatctgaacgcccgccccctgttttggccgcgcggcaagacgctgggcgggtccagctcgatcaacgcgatggtctatatgcgcggccacaaggcggattacgacggttgggaagtcgcctctggcacctcggtctggggctgggaccgtgtccgcgccctgttcaagcgactggaaaacaatcaacgattcggtaattcagaataccacgggacgggtggtgaactgtttgtcagcgaattgcagacggtcaacccgctcagccgatccttcgtcaaggcggggcgcgaactgcagatccagcataatgatgatttcaacggcgagcgtcaggaaggggtcggcctttatcaggttacccagaaccgcgggcggcgctggagttcggcaaaggcgtttctggaaagcgcgctggaccggccgaatctggaggtcatcaccgatgcgcgggtgacccgcgtggtgatggacgggcggcgcgcgatcggcgtgtcctacaggcggaacaacaaatacaagcaggcgcggctgaaccctgcgggtgaggttctgctgtctggcggcgcggtgaattcgccgcagatattgatgctctcgggcgtcggcgcagcggaggagctgaaggaacacggcattccggtgctgcatgacctgcccgccgtgggcaagaacctgcaggaccatctggacatcacgctgatgaacgcggccagttcgcgtcaaccgatcggagtggcactcagcttcccgccgcgcgcggtggcggggctgttttcctatatcttccgccgcaaggggtttctgaccagcaacgtcgcggaatcgggcggcttcgttaaaagcacgcccgagcgcgaccggccgaacctgcaattccacttcctcccgacctatctgaacgaccatggacgcaagatcacctacggttatggctttaccctgcacatctgcgacctgctgccgaaaagccggggcaggatcggtctgaaaagccccgatcccctggatgatccgctgatcgacccgaaatacctcgatgacccggaggatatgaaaaccatgatcgcgggggtcaagatcggcaggcgcatcttcgacgcgcctgccatggctgttcattcccggcgcgaggttttgcccggtcccgcggttcagagcgatgacgaaatcgccgccgatatccgcaagcgggccgagacgatctatcacccggtcggaacctgccggatgggcgccgatccggcgtcggtggtcgatccgcagcttcgggtgcgcggtatcgaggggctgcgggtgatcgacgcctcgatcatgccgacgctggtggcgggcaacaccaatgcgccgaccatcatgatcgcggaaaatgctgctgacatgattttggggaagatccatatttaggctgtgtcgcagaatatttccagcaaagctgtcaatccgtgtgaaatatgccgatccggcgggtgtgactccaaccgagttcggatgaaaagcctacgtccgacgctctcgtcgacgaagcctcgccatgccgcaagatcgtcgaagtcgcgcgacgcgcgcagcaacagggcgtcggcgagcgccctcttgagatggccatgcgcgctctcgatcgaaccattctcatgcgacactccgcgattgttgcgggtcggtgtcatgccgtaatagccgcagaatgcctcgtagcgtgtcgtcaaatcctccttggcgtcggcgccgagattgcggaacgccgccgaaaggctgtcgcttcggtgctgctcgggaaccccgcccagcgaccacagggcgttctgcaacccttccgccagcgcgacaaagctctcgccaccgagcacgacatgggcgtgttcgaagccggaaaacggcagacggaagtgatagaaccggcagtccagcaactggccggcgacggtgatccgcgacctcggtgaagtctgacaagcccatgcgacccggcggatgctcctggcggaagatcacctcccggtccgggccgttcaccgcgcgccacgccctgatccgccgttcaagcgtccgccgcttcccggagcccagttccgggtgccgacggcatagttcctcgaacacggcgatcggccgcaatccggggcggccttcagcatggggaggacgtcgttctcccagacgtcgacgaatggatcggcgcggcgacgttcgcggggcgcctgtttttgggttggaagtcggggatccttctcgaaccggtaggcggcggaggtgctgaatccggccttcgcagcggcaatggctggcgaatggttgcggcgcaagttcatgaaaagcctcatttgttgatcggtgacgtgtcggtcagccaaggaattggggtcctctcgaaagagaaaaccgatccttgaccagccgccgttaccgccaaatgaggcccttcgggcgcccacgccgctgctggggtaactccggtcgggctacgccctcccttcgtcaccccagcagcggcgcattctcatcctgattgtcgcgggattcccatcttgattgtcgcgccgcacgacccggacatcatcatgagatgctcgacgaccttggaaaggaccatgaccccagcgatgacatcagaaaggaacttgacacggacccgcaattaaagggccgaataacggtaaatgtggcttggacattctggtcgtcatcacgcaacgactctggtctgtccccgcattctggaaagcagggcagcgatctccccggccggtcgcgctgggctgaacagatagccctgcacctcggtgcagccttcggctcgtagcgcagcaagctgctcctccgtctcgacgccctcggcggtcgtgatcatgccaaggttcaccccgagccccatcatagcccgcacgatcgccaaggaatcggcccgatccggcaaacctagagtgaaagacttgtcgatcttgatcttgtcgaacgggaatttccgcaggtagcccaacgaagagtagcctgtcccgaaatcatccatggcgatgctgagtccgagttgtcgaagctcatacaggaccgcgatggtcgcctccgtatcctgcaacaacgcggtctcggtgatctcaatttcaagccggcttgcaggcagtcccgaatgacctaaggctgccacgacatcgagggataacctgttactcctaaattgaagagaagatacgttaacggcgagtttcaggtgatcgggccatcccatggcgtccgaacacgcctgtttcagcacccaggctccgatttcgttgatcaatccgatctcttccgcaagcggtatgaaattgtcgggcccaaccatgccgcgcacggggtgtcgccagcgcagcagcgcctcgaagctgctgacctcgttcgtctgaaggttgacgagaggctgatagaacacctcgaactcctcccgcgccagagccttgcggagatcgacctcaagcgctcgacgagcttgcattctctcgtccatccaggcttcgaaaaagaagtacttgccccggccatccgccttggctcgataaagagccatatcggccttcttcagaagctggtctgggtcgtgaccatcggtgggcgccacggcgatgccgacgctcgctccgatcatgagctgatggtcgccgatgtcgtagggcgtgctgagcgtctcgatgattcgttgcgccagcacggccaagtcgtccggctgacccacggccaacacaactgcaaactcgtctcccccaaggcgggcgacaaaggcgtcgtcacgcatgctcgcgcgcaaccgatccgcgacagcgaccagcaaccggtccccgatcgcgtggccaagcatatcgttcacggccttgaaaccatccaggtcaaggtagataacggcgagctgttcgccccggcgcgctcgcttgagcgcctgctcggcctctagacggaacagcacccggttgggcaagcccgtgagcgcgtcgtgatgcgccatatgcgcgatcctcgcatccgccgcgcgacgttcgctgatgtcctcgaaggtcgcgacccagccaccattctccgttggtacggccgagatcgagatcgtgcggccatccgcgagccgctgctcaggtagcagacgctcatccctcgcgagagcagcctttatcgtcgcgtaagcttccacaaggtcgcattcccaatcgtggcccacgcattccggctcggcaacgcggtggatgggagttccgggctcgatggcctcggcggggagaccgtaaatatcctgaaagcggctgttgcagacgacaagccggtcatcggcgtcgtacatgcaaagcccctgcgacatgttcgccatggccgaattcagtagatttgatttaaactggacgtccaggccacgctcatggaactggcggagcgttcgggccaacgctccgatctcatgtttgcggccttcatactcgggcaaaaactccatccccggatatgcgtcagcagatgtttcgggccgctcgatagccgaggaagtccgggcaagcggcgtttcgccggtgcgtaaccgttccatggcagcggtgagcaattcgattggcctcaacatgctcctatcgacgaagtacccgatggcaagcccgatcatcaacgccgccatcacggcgcaggaaccgagaacgagagttaagtcaatggcggccaagtgacgatcggacagcgccatgatgccgtccggctcaggtttggacgcaagttccaggaagctcgaccgaatgtcgtttcgcgtgaggataaggttagtgacagctaccgccccgagaagcggtccaagtacgcagaggagcgccacggatccaagaacagtttgccgaagattaaggtgcattttactcgttacagacattgccagccgttggctaatattaggctgtcgttacgaaaggaagtattaaagccggttgacgatgtgtggacactcacaaatctttcaggccgctatgatctagcccgtcttattcgccagatggcaccggagaggctggcgagcgtggtgtaaagcgctgatgcggcgtaggattcggttgcgaagccaaccccatcaccttcaaccgcgaacgccacgcccgccatgaccgatgatacgattctgcccttctcatttccagccgttcacaccaagaaaattacagctgccttcgatggcggtcgcctgacctcgaatgggggcgtgatgcttctggcgatggccgagcggcgtctcggtttggccgacaagttggcccggatgttcccggatcggcgcgacccgacgcgggtcgtgcacagccttgtcgatatgttccgcgctcgcatgtttgcgatctgctgcggctacgaggacgccgacgatctcgaccatctgcggtccgatccggcgttcaagctggcctgcggacggctgccggacagcggtcgcgatctgtgttctcaaccgacgctgtcgcgcctggagaatgctccacgcctgcgcgacgtgatccgcctgacctacactttggtcgacgcatggatggataaagccgtaaccgcgcggccacgtggatttggatcactcaaataccaaaatgctggaacagaagcggggacggcaaccctgggggaggtgtgattgtcgtctcagtcaaatgcgacgccaatccgtttctcttttcgccatttgacatgacacggtcggcttagctgatctgcctctataaccagtctgaactcgtgaggaatgcctagcggactttcgacgtccagggcggcgccgctcgccgacaagttccgcacggtacagctaataccacccccaccgaattctatcgtcccggctttcagcacgcgatgtcgaggcgcggtacgtttgttgtccataggcggaccatagccgaaaattcttagaaattcgcaaaggtcatagtcgacccgcatgagcatgggtcatcgacgggacgtggtgacgggaagaccaaagccagctctgtgaaccgttcctcggcggcgtaggccaagggtgcagaagtcttgaggccattcgacactgactaaagatactacacgccctcaaatcgagccagatctggactgcgtctccccaatattccccgccttacatcgcctcatttacaaagcgttaacctcaatccgtagcggcaacttagccgggaagcatcatcgtgacagcaacccgatggaactttcgagatcgaaatggcggcgcaacacaaccgggcaagaatgttcgcggtactgagcgcgaccaacgaagcgatcttacggagcacttccgaacaagatctctatcaagatgtttgtaatgctgcggttgatggcggcaaatttctgggcacggccattttcctgatcgaggacgactcttcgtggttccggatggccgctggggccggtcccttcgttcatttgatcgagcaacttcgtttttcttctgatgccaccattccgcacggtcagggactcggtggcgaggcgtttcgcacggccagaccgtgcattagcagcgatgttctcaacgatcccagaacccaaccgtggaaggaactggccgcgagcgcgggcctgacggcgagtgccgtgctgcctctccttcgagacggccaagcggacaagacattggcacgatagcccaattcccatcagatctggagccggcctacccctattgagaaatggagaagcggttggcgtcctgctcttcctgtcgagcgaaacggatgtgtttaccccagaatttatgaagctgctggggcggcttgctgacaacgtatcattcgcgatggaaatgctggagcgtgaggacgcccgacgcgctgcagagcaagctaaggaccggctgacgcggatgccccgtcaacgacttcatgaccaagaacggaagcatccgcgacgacggccgcatgatgcgcgacatgtaccttttgcagaccaagaagccgtcggaatcgaagggcgagtgggacctgatgaacgccgccgcgaccattccggctgaggtagcgtatcggtcgctcgcggacccgcccaatggcgccgagcaccttcccgtccctcttgatgggaatgcgggaaacgactctgtctccgccgcgcatgcgctgaattttcccgacctcggccttgcccgtggccacgatctcatgcagtcgcgtgttgtcgatgacggtctcgaccgggcgtccgtttccttcgccggccttcagcccgaaaaacgcttcgtggatcggagaaatgtagacgatcttggccttgtcatcgacgatcgtcatggcgtcgaacggatccgtcagcaggtgctgcaggatgtctcaggagaaatcgacgctgccgatgaagctgagaagtgcgtcgcccggcgtttcgctgagaacgagcatctctctggacccggccggagtgaccagcaccatgtagatcttgcgatcgagattcagcgtcgtgatgcgccgctcgcgggcctcggccatccatgcctgatctgcggtcaacgaattcagacgtggatcggagcccacgccgaccgaagcgattacacgagccgcagcgtcgaagagaagcacaccggcaatcgtggcggtaatcggattaggcatttcctcagtgtccttgttgaggacacgtgagcacagtgaggacgccgctcaagaaactttgccgctcctgaggacacaaatttaagaggctccaaaggctacccctgcaaaacaaggagttccacgacccaggagcagcagcggcgaaatggcacgggtgttgctgatgtctggatagcagcaacgcccatgaaggcagttctcgaatgctgcattgcgagataggatgaaaccgtacttaactctccatcaccctgcgagcgcgcagcgctactacagcgaacggatgtggcgcgaagacaccttctacagtctgctcaccagtcatgcgaccgagcggcctgatgccgtggcgctgcaggatgctcgccaaacgctgacgtggggtgagctcaagcgttggacggacggtgtcgcggcagatctgcgcgaatacgggctggtcggcagcgaccgcgtgatgatgtggttgtccaaccgcatcgaggcggtcgtcatgttcctcgcctgcgcgcgtgaagggatcgcctgcaacccctcggtccacaagacctacacatgcgccgaggtcggcgaccttctcaacacgctgtcggcgcgggcgcttctgactgaagacggttgggggaccgaccgtgcgaccgtcgactacggctggtttctatccggagatcttggcgtcatggacgccaaaggcaatctccgcatcgaggggcgcctcaaggacctgataatccggggcggccacaacatctatccgtcgcactggcttctttcttacttatcgcggccatgcggacagccaacgtgcgtggcacacgctttgctgactaccaaaaaataatgacttcgggagggttacatgaagagttggtcggcaatcgttggcgctctgatcctaagctcgctacctatggctgtgttggctgatacgtacccgtcaaagccgatacggttgattatcccatttgctgcgggtggcccgacagacgcgcttgggcgaacgttcgctaaggaactcggggaagtacttggacaaacagtcgtcgtcgagaacagaactggcgcgggcggaaacattggaacggacgccgtcgccaagtcccctccagacggctacacgatcggcttcggcacgaatggaccgctcgcaggcaatgtcacgctcttcaagtcgctgccttatgatccgaccacggcattcgccccaatcacccgcatcgcgttcgtatcgaacttaatcgcagtgcatcctgctctgggtgtgaaaacgttgagcgaactgattgagttgattcgaagagagcccaacaagcacaatttcgcgcacggaggctcaggcactacacagcatctcggcggagagctgttcaaatcgatggcgcagctgcagatgagcggtgtggcttatcgtggcgaagggcccgcgcttaatgacgttattgcgggtcatgtcccgatcatctttttgagtcttgcgaccggcatccccatcgtgcagtcgggtcacctcatcgcgctggcggtgacttcgaaggatcgcattccggctctcgctaacattccgacggtggctgaagctgccctgccagggtatgttgcaacagcttggtacgcgctgctcgcgcctgccggtactccacagcaaatagttgagaagctgaatgccgcttctcgcaaggccatggagtctcctgggacgaagaagcttctcgatcaagccggagcgattactgcccccaccacacccggcgagcttggcgagttcatcaagagtgaaatcagtcgttggaagccaatcattgagatgtctggcgccaaagtcgactgacgagccggtaggacttcttgcgcgtccaaccccaaatgtgctcgcactcccgaaactaacgacgctggtacttttattgctcaggctttcacaaagagaacttgaagcaccgtgttgcattgcgagatagggatgaaaccgtacttaaccctccatcaccctgcgagtgcgcagcgctactacagcgagttcgcgtgtcatgacgtaccggctcgcgtccctcatggacaagggcgtcgcgccgaatacggccgcggcggtgacgaagatattcgccaccgaaagcaattccaagtgcgccgatgccggcatccagatcatgggcggcgcgggactgatgatgagttcggaaatgcagatgtatttccgcgattccagggtcggaacgataggcggaggcaccagcgaaatcctccgcaacgtgatcgccaagtcaatgctctcataggaggacggacaatgcgtggtatctctcgtcgaacctccctagccggaacaggcgcgctcgcgcacacgccgcgccagcaatagcagctttgcgaacgccgcttcgagcccgccgtcaccttcgatcttgcggccaatgtcgcggatgacgcggccgagataggtgcccagcttcctgaggatcatacacaactcccaccgtatcgcccttgaaggcgacagcatgcgaaggaaaaaatccgcgcgccccttgaccgacgtcgaaaacagcgaaacgaatcccggttgacctcaacaaccaggtaaccaaaagcccttaccccagctgtccgtcagttagcaaaattgctgtccaatttttgcgaaatacgcaggatgaaacatcttcaacgtaccgctgcttgagaagcgatgagaagggctatttggggcgtgctgataatttcggtggttagcgccttcggcggcgttgcctcggcgcaggtgtccgatgaggttgtgcgtctgggcgtacttgacgatatgaccagccgcgttttagactagctgcgtcgggcaaggcttctaagtgtggtcaggctgatgggcgcaaattctccccccgggggacgatggacaggcccccgtcttcgcgcgagtgaagactgagcgcgctcttgctcaccaccctcgacgagacggagcacagcattgatgtacgcaagttcgtgctgagcctgctcgatcttggcttggtaggcagcaatcatgccgctgatctcggcgcgcttttgcttgaacatttgaatgatgagctgatcggccatgctgcattgaagccgaaatcagccggccgcgaccagccccgaacttggtgccgttgctccataattcgagcgatggcggcgttactacgacaacgttacgccgcgctcctcgctcggctatcggccgccggcaccagaaacgatcttcccgccagcatctggcctggcctgtgcttcgctccggccaggccaaatgctggccgatcacggccggactctaacatgagccgtggtaccgctccgtggggcaggccaatctaacgcccgtgcgcgccgtggtatccgagcgaggccgatagttcggctgcggtatcggcgacgagttttccaagtgctccatttggtttcgcgtcgacgcgtgttgagcgaccaaacactgtcagggccatgatcaacttgccggtgatatcgaacaccggtgcacttacggcgccgaagccgtcaccaccgccgtctgacaggcaagaataaccgcgctccttgatttcacgcatcattccagccagagacgcccgttctttcggtacgttgagacggcccgaccgtcggttctggtccaactcgcgctcgattgcggtggccgtacgaaccgggtcttcgtaggcacaaaacaagagccccgtcgcggaataggtcagcgggcagtggtgcgacggcgccatggtactcgccaggtcatgccgggcctcgacgaccttgatcatcgtagggcccttttcgccccagacggctagcgccgctgtctcgccgacctgatcgacaagtgtgtgcagcgtcgcttcagccacttgcaacggctcgaagcgactgaaccccttgagcccaagctggaaagctacaggtccgaggtcgtatcgagacgtcgccgcatcctgccgcgccaatccgacgcgcatcaaactgacgagatatcggtgcgctttggcagagggcatgcctgccctctgcgccagatcggccaatttgagcggcccatcggcctggatcagtgcgtgaattagatcgccagcaacctctaccgattggatgccgagttgtgtcggcttgtctgcgccaggcgcgttttccggcagaggttcggttgagcggtctaccatgagtgtccttcacagcggcaaagttgcctaatccgacaggcttgacagcctggctcgcaggaagcatcattacagaataggaagtttattacgaattgtataactatcgaagctagtacgaacaatacgagacgtaactgtgcgcagcaacagttgatgctaggggagagaggcagatgcacgacggatccatttctggcctgctggccggcgatgtcgctgtcgtcacgggggcggcgcagggcattggagccgctatcgcccgcggacttgccacatccggagcctcagtaatcgtcgtcgatcgatacgccgagggtgcctgcgcaacggccaacgcgatcaaggctgtgggcggacacgccgaagggtatgggctcgatgttgcggaccgtgctgcgtgctttgcttttgcaaccactgcaagggaggtgttcggtgatgtggctgtgctgatcaataatgcagggatcacgcgccgcaccgcacccgacgaccctgaatttctcaaccacctcgacgcgcagattgccgtcaatctgaacggcactgccaacatgacgatagctctgctgccgcagctgcggcgcaccaagggacgcgtcgtcaatgtcggctcgattgcttccttcgtcgcctatcggaattcggccagctacgccgccaccaagggcgctgtcattcagctgaccaaggcgctggcggccgatctggcagcggacggggtacgcgtcaacgggattgcaccaggtgtcattgccacgcctatgaccgaagggacgcgcgctaatcccgaggtgatggcccggtttctgaatcatacgccgatggggcgcgtaggcgagcccgaagagctcgtggggccgacgctatttcttgcctcacgcatgtcctcctacgtgaccggtgtcatgctacctgtcgagggtgggtatcttacttcatgaacgccaccaccataaccgcttgtatcttgtattatggatgatctgccatggttgcctcttccaagcacgcgattccaaatgaaacccagcattgcgatgtgttggtcgccggctccggcgcaagcggcatggttgccgccatcgttgccgcgaagaaggggctgaaggttatcgttgccgaaaaggaagcggtgttcggtggcacaacagcgttatcgggcggctatctctgggtgccgaacaatccggtgagcatcgaagctggggtcaaggacagcaaggacgcggcgctcgcgtatatgaagcacgaatcgggcaaccactacgacgctgcgagggtcgatgcatttctcgacgcaggtcccgagatggttgccttcatgcatgcgtatacgcaggtgcggttcgaagcggctcccgcattctcggattaccatccggatgcgccgggtggcacgccgggcggtcgctcgatactgacgcaacctgtcagtgcgacaattctcggatcggatattgacaagctgcgaccgccgcggcctgagctaacgctctatggcctcgcaatcggctctggtaaagagctttggcacttctatcgcgccacgcagcggctggaatccttcctctacgtcgccaaacgtttggtcaaattcgggttcgaccgctccgtgcggggccggtcgatgctgttgaccaacggcaatgcgctggccgcgcgactgtttcggtcggcgtgcgaactcggcgtgccgatctggctcgacagcccggtgagaacgctcatccgaaacgacagaggccatgtcgtcggtgcggaagtgctgacaccaaaaggcaggcgccgtgtgctggcgaacaagggcgtcgtactggcctgtggcggctttccgtttgattttgccaggcggcagaccctctacaatcactgcgccggtgagagcgagcattggtcggcggcgagtcctggaaacactggagacggcgtacgtctgggcgagtcggttggcggcgaggtcgtcaaggattatcccaacgcgggtgcctgggctccgaccagccttgtgccgcgcaaggatggtaccaagggcccgttcccccacttcatcgaccgcggcaagccgggcgtcatcgctgtctcgcgagccggacgccgcttcgtcaacgaagccaacagctatcatgatttcgtgcagggcatggaatgtgcgtgcccttcggaccaaccggcggaggcattcctgatcgccgatcaccgcaccatccgcaaatacggtcttggccatgtgaaaccggcgccgctacctcttcaaccttcgatccgctccggctacctgatgcgcggcaacactcttgccgagcttgcatcagtggcgggcattgaacgaaacgctttcgaggaaacggtcgcccgctggaacgcggacgttccgactggcacggatactgccttcggcaaaggctcgaccgcctacaaccgttttcacggcgatccagaggtcaagccgaacccgtgcctcgcgccgatcgcgaccggtccattctacgctgtgcgggtcgtccccggcgatatcggcactttcgcaggcctcaaaaccgacgaacacgcgcgtgtgatcggccctgacaatacgccgctcaaggggctttatgccgtcggcaatgacatggcgagcgtgcttggcgggaattattccggcggcggcatcacgctcggaccgggcatgacctttggttacatcgcgggcctccatgcggccagcgaacgcaactgaagaccagtatcgagaaactctaagggaggaaacccatcatgacaacatgcagaaacctgctttccgccggtctgggcctgactatggccgtcgctttattgggagcagcgcaggcccaggataaggaaatccgcattggtgcgttgatcgcagcctcggggccaacggccttcatcggcgcatcacagaagaacgccttcgagatgctcgtcgaacagatcaatgcgcgcggcggcatggccggtaacaagatcaggccgttcctctacgacaccgaaggcaacggcacaatcgcggcccagcagttccgccgcctaatagattcagacaaggtgcatgttgtggtcggcccctcgacgaccggcgaaagcctggcgatccgcgcggtcgcaaacgaaaacaaggtgccgctcgtcagcttcgcaggcgcggaagcggttgttgtgcccccaaccccttacgtcttcaagactccaccgaccgaccgcatcgttgccgagcacctgatttctttcatgaaggtcaagggcgccacctccgtcggcatcctgtcctccgccgatggttttgggcaggccggtgccgcagtcgtcaaagaggtagccagccaactcggactgaaggtcaacgcagcggaagagttcggcccacgcgataccgacatgacgccgcagatcctcaagattcggtcgagtggcgccgatgcgatgctgatctggagcgtcaaccccggtccgaccatcatactcaagaacgcggcggccattggctacaacaagccgatctacaacagctatggtgctgcctcgccgcagctgatcgagcaggccggcgcggcagcggagaagtcttacgtatcgtccatgcgtctgctcgcgcccgagagccttgccgcaaacgatccgatgcgcccagtggtgaccaaactcgcggccgattacaaggagaagttcaaagccgacgccacgaccttcatcgggcatccctcggacgcgatgctgctcatcgaggaagcgctgaaaaaggctggcgggtccccggatcgcgagaagctggcggaagccatgcgcagtggcatttccttccccggcgccaacgggatgtttcgcttcactgacgccaaccacaacggcctcgaccgggagtcgcagtcgatggtgatgctgcaggttcaaggcggcaagttcgtcaccgtgaagtgacctgcagggcgggcggtcttgcaatccgtccgtcagcgaccgaagcaaagcctggaggtaaaatggataccctgctgcaaatcctgatcacgggcctcgtcgtcggctgcatttacggcatggcggcacttggtttcaccattgtgtacaatgctaccaaactgatcaatttcgccaacggcgaattcctgatgctcggcggcgttcttcttgcctgcgcggcgcaggccgccaaactgccgatgtcgctggcgctcctgctcgctgtagcgggtgcggcgcttaccggctggctgatgcagcgctgcattctcgatatggcgatggcgcgcagttccgatccgttgacgctggtgatgctgaccatcggcgtggcgctcgccttgcgcggggcagccgcgctcgccttcgggcgtgaaatcacgttcgtgccggaattcgggcttttgccgctggtgttgataggcaacgtctacattccgagccaaggcctctggatcatcttcgtcctggcgctgaccagcaccgttttgtggtacatgttctcgaaaaccatgttcggcaaggcaatgcgcgccgcgagtcaagaaccgagggccgccgccctttgcggcatcgagccgaagcgcgccgccgccatcgccatgaccttggcgggtgcgctcggtggtttggccggcgcgatgctcgccccgatatccgcagcgttctacgaaaacggcatcttccttggtctcaagggcttcgcggcggctgtcgccggcgggctgggcaaccccatcggagctattgtcggtggactgttgatcggcgttgttgagagcctgtccgccggatacgtcgcctccggcttcaaggatgccgtcggttttatccttctcattctcgttctaatccttaggccgcagggcctcgtcggtcgcgccatcgttacacgggtctgagccatgaccacttcgacatcgaattccaacctccggcatgacgcggttatcctcgcaggccttgctgtggttcttacgctcgcagaactagcgctgaccagccagttccatcgctcgattctgatcctgtcgatgatccacgctatcgcggccattggccttacgttgctgctgggctacgcagggcaggtctcgctcggccaaggcgccttcatgggcattggcgcttatgcggcggcctttgccctgcagaagctggcgctgccagcgcccgtggcgctggtggctgcggtgctattgccggggctgctcggcttcttgatcgcccgaccgatcctgcgcctgtcgggccacaatctcgcgctgggcacattggcgctcggcgccgtgtttttcgtcgtggcggcgcaatggcgcagcgttaccggtggcctcgaccccggtatcgtcgatctgccgagtctggcgatcgcgggtttcagccacgagcgtatactctacattctggcgggcatctcgttgctgtcggcgatcgccgtcgccgtatcactcgtagacgggcggttcgggcgcggcctgatggtgctaagaacatccgaactcgttgccgcttgcatgggcgtcgatacggttcgggccaagtctatggtcttcgccatcgccgccgctttgtccggcctgtctggcgctcttctggcgctttatctacgctcattcaacgccagcgccttcggtgtcgggctctccatcgagcttttgatgatggtcatcctcgggtcgctttcgaccgtctggggcgcgatcttcggcgccttcgccatcatagtcctgcccaacctactcgaaggcttcgatcacgccaaacacctaatctatggtcttgtcatggtaggcatcatgatgttcgctccccggggtcttggagaaacgttgttccgccttgtcacccgcaagagaagcgtcgcatgagcagcacgcctctggcttcgatcaagggcctgtcgaagcgattcggcggcattgcggccgtgtctgacgtgtcgttcgacctggtcgccggggaagtcacggcgctgataggtccgaatggcgcaggcaagaccacgctgatcaatctcgttacgggtgttctcgcctgcgacggtggcacaatcagcctcgaaggagaggacatcaccgctcggccgacgcatcagcgcggcacggccggcatcgcgcgaacgtatcagaccccgcagatagcgcatggcatgagtgttctgaccaacgtaatggcgggcgcttaccggttcggccagcatggcctgttgagttccgtgttccgaccctgggtggtcatgaaagaaaatgacgaaatggctgctcgcgccgcgcagtgtcttacgcgtgcgggcgtcgccgagcagtggtggcagcgtctggcgacggatctgccctatgggcttcagcgccgcgtcgaaatcgcccgctcattggcgcaagatcccaagctgctgttgctggacgagcccgccgcgggcctcaatccaagcgaaacggcggacctgtcgcgtctgctttctgagatcgccgcagatggccgcgccgtcctgcttgtcgaacacgacatgggcatggtgatgtcgatttcctcgcatatcgttgtggtgaatttcggtcgcaagcttgcagagggtacgccgaaagacatcgcatcgaacaaggacgtgattgctgcctacctcggcgcggatgaggcggtggcctgaaatgaccgagcttctctctattgccgatttgaaggctggctacggcccggtcgaagtgcttcacggcatttccatcgccattcgaaaaggtgaaatcttctccatcgtcggcgccaacggcgccgggaaatcgacgcttctcaatacgatttcaggcttcaacccgatccgctccggcgccatcgtgtttgacggacgaccgattgctggaaccgctccagcaatgatcgcgcgcgctggcctacgtcatgtgccggaaggacgacgcgtttttgccgagatgacggtggaagaaaacctgtctctcggcggctatggccagccgcatgctgaagtcgccgatcggatcgaccggatttacgagctgtttccgcgcctcgtagagcggcggacgcaggcggcgggcactatgtccggcggcgagcagcagatgttggccattggcagggccctggcggctaaaccaagggtgctgatgcttgatgagccatcgatggggctcgcacctcaggtcgttgctgaaatattccgcctgatcttgcgcatgcgacacgaattgggacttgggatacttctggttgagcaaaatgccaaagcagcgctgcgtatcgcagaccgcgcctgcgtgctgtctctggggcagatcactctgcgcggcgcaggcgcagatctcttgaatgatccgagtgtcgtcgaggcgtttcttggggggaacgcggctacttgatggaaacccaccgcatctccgagtcaggaccggatcgcgaactgcttggatcgctgcgtgctcttacaggactggatacccccgcaaccatagagcgtttcgagaccgagtatccgaatgcaactttctgggcgacgttcggtcaatccgaagcctcgggcttggcgatgctttcgccgtaccgcgaccgtccgaaatccgcgggccggccgctgttttggcgcagcatcgcggtcgtcgatggcgatgaccgcgcgaatccggccggcgaaatcatcgacttcgtgaacggacaaatcgctcgctacaaacggccgaagcacgttgtgttggtcgataaacttccgaggactgcgggggcgacctcgatcgggctgctgttaaatcagcgcacggcagacgtagcggtaaaggtaacccgccacgacgggctgcctcatccgaccgcggcagagaggcgccgaataccatcgcgccattcccgctgtagccgcgcgcagagttctgcgaccggaatgatgtcgttgacgccgccgactccctgtcccgcggtccagatatccttccacagtttcgggctgatctcgcgcgcgacgttgaagctgctgtggtccttcgggttgtcgtacgggcggttcagcgtctgggcgagaaagctggcgccggccacccgcaccggcacagacggcaatgatcccgtcggcgttggcgtcgagcgccttcttggcatgcttcatcgtggtcgcgtcgtggaacaccagcccgccataggtatgtatggcgtcggtcagttctcgcgtaattccgagggtcgtgatgacgatgggaatttcatgacggatggccgcggcgaagtctgccgcgtgccgaggattggtggagtgaacgacgaattgcgcaccaaagggcgcgcaatgttgcccggcgagccggccgcgtatgtcggccagccacgcttcgaaaccgtccgtcgtgcgctggttgagcaccggaaaggtgccgatcacgccagcttgacaggtctcaacgaccagatccggtcccgagaaacatcggcgctgccatcaccggaattttgagatgccatcgcagtcgatcaggtagcatatcggatgccgattgccagaggaaacgtggtcaacgcgactgcatgcgggcgcctgcatccagatcgagcgtggtcgcgttcaggtacgagttctcgacgatatgttgcaccagccgggcaaattcccgcggttgtcccatccggttcggatacaggatcatgcgatcgacgatcgactgagagacattgtccggaatgcctgcgaccattgcggtatcgaacagccccggcgcgatcgagactatgcggataccgtgtggcgccaagtcgcgggcaactggaagcgtcaggccgattacgcccgccttgctggcgctgtaggccgcttgaccgacctgcccttgggatgcagcgcccgatgccgtgttgacgatgacgccgcgctcgccaccctcggcgtcaggggtgttcctggtcatcgcgagcgcagcgaatctgatgacattgaaggtaccggtcaggttgatcgcgatcaccttgttccacgtcgcgatcgggaacggctcgccttttgatacggtcttggcggcatcggcgacccccgcgcaattcactgcgacatgaacgccgccgaacgcggcgacgaccgccgcgatcccgtctttcacgctgctctcttcggcgacatcgacgacgcgcgccaggcacgcatcgccgaggttcgactttagtgcctgcaattttttctcgtcgcgatcgaaaccggcgatacgcacgccggccgcggcgagcaccttgcaggtcgcaagccccagtccagaagcggcacccgtcactacggcaatcttgccatgaagctccatgaaatatcctcgttgtcttctatttgctcaggatggtcacgcacgccaccgcttcttcgataccgtgcagtccgccgccattttcggcgatcgcgatccgcgcgccgtcgacctggcgggccccggcctcatgacgcagttgcgcgacaagttcgtggacctgcgcgaggccggtggcgccgaccggatgccccttcgactccagccctcccgacggattgaccgggacgcgcccgccgatggcggtttcgccgcgttcgctgatggcgccgccgtcgccaaaggcgcacaggccgagattttcgatctggatgatctcgcccatggcggtggcatcatgcacttcggcaactgagatatcgcccggaccgacgcccgccttttcgtaagcgcgcctggcggcgcgtgcggtgcaatggttttcgacgtccgaagggtcacggtcgctgccggtctggaccacggatgccagcacccggatcgcgcgcgaccgatcgatgccatagcgcttcagtcccgctgcagttgtcaccacaaccgccgcggcgccgtccgataccggcgaacacatcggcagcgtcaacggataagtgatcggcggcgcgctcagcacctcgtcaatggaatagggcgtacgaaactgtgacagcggattttcaacggagtgtcggtgattcttcgccgcgactgcggcgatctggcgctgcgtcgttccgaaacgcgccatgtgaaagcgggagaacgccgcataaacatccatgaatacgctgtagggcttgtcggacgttgtgccgggcggcggatcgatgccttcgccaagcttcatgagccgctcgccgatttcgtccttgcggctgatgtcccaggcgctgtcgaatgacccgaacataagctcgcgatccctcgagaacatcttctcggcaccaaccgcaagcgcgacgtctccgtcgcctgctttcaggaaggtgacggccaggttcagcgccgagctgccgctcgcgcacgcgttctcgatgttgacgaccgggatctgcccgatccccatcgaccgcaacgcgatctgaccgcgcaccatgtgctgcttttccatgtgtccttgcgacgcgttggcgaagtaggcggcttccaatgccgtggtcgcgaggccggcatccgcgagcgctgcgttgaccgcctccttcgtcatcgtcttgatgtccttgtcgagcatgcggccaaacggcgtcatgcccacgcccacgacgtatacgtcttccatggcggcggctcccattctcaggttatattctgtgcccttagcgacagttcggacagcacttcctccgtgtgttcgccgaggccaggcacgccccgcgtcggtcccggatggtggccgtcaataatcaagggttgcgcgacatagcggcgacgcctgccatcgctgtcggccacctcgccgaacagcccccgttcgatgaagtgcgggtcggccgcgacttcgtcaattgcgctgacgggaccccaggggattcccgcggcgtcaagcttgtcggcccattggccgcgtggcgcggcggcgatggccttgccgatgcgcgcaaccagttcgacttcccgtcgggttcgttgcgcgcgtttcagatcagctacgtcctccatgccgatcagcgtgcaaagcggccgccagaaccagtcctcatgcgcgatcgacagcgacagcagcttgccgtcctggcattcgaacagaccataagcgggctctgccgcgatgtcggcgagcggctcgccgttcatcgccgggccaaccatgaccgacatccacgataccagcccgtcggtcatcgacacgtcgatatacgccccctttcccatgcgcgcgcgcgccagcagcgccgcaagcacgccgagcgccgcaaacatccccgatgaaaggtcgccaaccgcgatatcgctcggaagctgcgtcgaacgcgttgcggcctgggcgtgcaggaatccggcgagagcctggtaggagagatcatgggcgggtcggtcgcggtaggggccggtctgtccgaagccggagatcgacgcatagaccaaacggggattgatcgaggccatcgcctcataacccagccccagccgctgcatggtgccgggccgaaacccttccagcaggacgtcggcagaagcgacgagatcccggaaccgctgcttgtcgccgtccgccttgagatcgagcgccaccgagcgcttgttgcgattgagcgcggcgtggaacgccggaaactgccgcgcgggatctccgatgcccggacgctcgacgaggatgacgtcggccccaagatcggccatcagaagcgtcgcgtagggcccgggatattgctcagccaggctgacaatacgaataccctcgagctgcaacatgacgatgtctcttccccggatatgcagagcctaagcttgcagattttattcgttggtctataattttactgactaaattattaattgacccaaaagtcaaatacttgttgtcgaggtgagaacagtgacgacgtctgaaaagatcaagccggagcaaagcgttctggtcgaagttcgtgccgatgcggtatggatcacgctcaatcggccgacggcgctcaacgcgattacgcccgacatggtggcgggaattaccgccgctctaacgcatgccgatgatccggcgatcaaggccgtggtgctgatgggcaccgggcgtgccttttgcgccggagccgatttgaaatacgtcaatagcgcgacgcagggcgatgcacccgccgcgacgcggttcctcgacgccgtcctcgacatgatggcacgactggagacctgtccgcggccggtcatcgccgcagtcaatgggttggccctagcgggcggcctggagttggtgctgtgctgcgatctggttatcgcagcgcggtcagcgaagcttggtgacgcgcatgccaatttcggtctgctgccgggcggcggcagttcggtgcggctgcctcgaaaaatcggtccgacccgtgcgaaatatctgctgtttactggcgatttcgtgcccgccgacgatctggttgcctgcggtctcgtcaacgaggtcgtcgatgacgccgaactgacggcggcggtcgagcgcttggccgccaagctcgggtccaagagctcgctggtgctccgccgcatgaaggcgctggtcgccgacggtctcgaacaaccaaaggaggttgctctcaggctcgaattgctcgcaagcgaagtccacgcccatagccacgatatgaaagagggacttgccgcattcgagcaaaagcgcaagccgtcgttcatcggccgctgaaacgctttctgcgcctcaattatccgagccatcgcttgcggcgccgatagtgcttgatgttccgatagctcttgcgcacgccttcgaggttgaggccgagatagaattcgcggatgtcctcgttggcgcgaaggtcggccgcgttaccttccagtacgatgcgtccgtcttccatgacgtatccgaaatcggcgaggtccagcgcgacgcgggtattctgttcgacgatgagcagcgtcaggccatcttccttcaatgagcggagaacgccgaacacctcatcgaccatcatcggcgccagccccaacgacggctcgtcgatcatcatgagcttcggattggccatcagcgcgcggccgatcaccaccatctgctgttcgccgccggacaaatagccggtcgtgcgcgacttcagcaaggcaaggcgcttgatccggtcgtagacgccatcgagccgccgccgcatcgccggcgctgaaggctccatatgaccgccggcaatcaggttctgctccacggtcaggtgactgaggacgcggcggccctccatgacgtggacgatcccgttgcggacgatttttgccggatcaccgccgtcgatccgcgagccctcgaacgaaatcgtccccgacgtcaccttgccgtcctcggtcatgaggaggttcgagatcgatttgagcgtggtcgacttgccagctccgttgccgcccaagagcgtgacgcaagaccccttgggcacgacgagcgtaatacccttcaccgcaaggatgacgtcgctgtagataacctcgacattgctgagctcaagcatcgacaactccgcggccggagcgctgtcgcgctccggctggttcagccgggttaccacttcgcaatcgtggggaccggcacgttttcagcggcgataacatatttaccatccttgatggtcgcgacgttgacggtcaggcccttgaccgggaatggcgcctcattcgtataagtcaggtttggcagaatgctgaaagtctgatcggccgaaatcggtgtcgtcagcagcgcggtgcgaaccgcctcgccagtgactttgtcggcgccgaccttgcgcgcagccgcctcgatcgcccggagtgcgaccagcgtctgattgtagcccatgacgctcgcgacggaccatgtcgcctgcgacttgtattttgcgacgaccatctggtggaagtcgtgggctttggtcttttgctcagtcggcacggccatgccgtagacttcatagtcgccttccaggtccttcatgccgccaacggccttacctgaggcaatcaggccgttatgcgaactcatcatgatcggaatatcggccttgccgagcgcctgcagcgcacgcttggtcgccacaaccgcggccgtgttggtctggatatcgataacttgcacgcccttgcggatcaggcggccaacctgggtggtcagatcggtcggctgaacttcggtaaaaatggtctcgacgatttcagccttgtccgggttgtccttggcgaacttctccgcgcccttggcaatatcgacataagccggcgaggcttccgaggaaatgatgccgactttcagcggccccttgatgccgcgggtgctgcggaaccattcgaagaacccggcagcctcatggccataagttggccgcgggttgaagatccagggatcgcctttccaagcgaacccgtaaccggccgtcgacatcaacatgggcaccttgtccgccggaagccgaccttgcagcgcggcgacgtcaggtccaccgacgccgagtacggccaccggattgagttcggccttgatgccgggccaaaggctcgcagtctgcgccgcgtcgtagcgcccgtcaaagtccttgatcccgatcttgatgcccattcccttgccgacttcttcgttccaccaatcgacagtggcgcgacgggcgccgacaaggtccttcatgatgtcggcgtagggtccggtaaagtcggcgatcgaggcaatattgtaggtcgtctgcgccgaagcgggcagcgcgagtgtgacgaccgccactgccgcggcgcctgcgatccatttaaaacgtctgctcttcatctctacgtcctcccggttctgttatgtttcatggacaccgccctgcggcggcttcgctacgttcagtatggaaacggccatgtccgatacgaccgcttcaggatattccagcgatgcatcaggccgcgcggctcgaagatcagaaatgctgcaatgacgctgccgagaaacacattcatcagggaaaatacgacatcgccgccgatcgaggggaattgcgagacgacggatggcccgagcgacacgaaggcctcctgaatgcatttgatgacgacgacgccgacgagagcgcccgtgatcgaccccattccgccgacgattatcatggcaataaaccatatcgaattgaacagcgtgaactgatcgaccgcgacaaagcgaacgaaataagcccacaatccgccgccgacgccggcatagaatgcgccgaccaagaacgcggtcgccttgatggccacgacatcaatgcccataatgccggctgcgacgtcgtcgtcgcgcacggctacgaaagcgcgtccgtaccggccccgcaccatgccgtaagcgccaaaggtcatgagcgccgcgacggcgagacagagataatagatcgagatatccgtcgcgaacgcgaatccgaacaggctggcagggtcgagcgtcaggccgttcgaaccgccaaaccatggcaggttcagaacgaagaaatgaaacagcgcctgggcggcgatcgtcgtcagcgccaggtagaaccccttgatgcgcaccgccgacaatccgaagatgaagccgaacacagccgcggaacaccccccgagcgggatggtcaaccagaacggaaaccccagtttcgtggccagaaaaccggtcgtgtaggcgccgacgcccataaaggcggcctgtcccagattgatctggccggcataaccggtggtgacctgaaggccgaggacgatcaccgacgagatcaatatcagcgtcgagatggcgagcagccgcggtccgaacaggatcggcagcgccagcaggaaaatcagaaacaaggctagggcaatctgctgcggacgcgtccgcaccaacgccgcatcgcgcgcaaaactggtggcgaaaatgccggccggatccatcgctcaaaccctctcgatcgttctccacccgaacattccggtcgggcggataaacaagatgacaagcatgatcacgaacgggaataccgagccaaccgctccgccgaccaccgggtcgacataggccgtcacaagtccctgcacggcgccgacgatcagaccggccaacaagactccggcgatcgactcgaatccggcgagcagggccaccggcagcgccgaaagcccgatgtccgacgccaggaaattcagcgacttgccgctgaggtagatgatcgcgccgagggtcgacaatacggcgcccagcgcccaggcgaaagcgatggagcgtttcaccgagattcccatcgacaacgcgacctgatgatcctcggcgaccgcggtcattttgagtccggcgcgggtgttgttgaagaaccacgacaggcccagtccgacaatcaccgtgatcacggcgccgatcagcagtgaccgcggaatcaggatgtcgccgatgatcaccggcttcaacgcgaagatgatcggaaacggccggacctgcggtccgaatatcaaaaggatgaggcccctgatgagaatcagcaggccgatcgtcaccatcaccatcgcgaaactggactcgccgacgagacgcgaaaaaaagatgcgctcgatgataagcccgaatatcgccgataccgccatcgccagcggaagcgccacgaacagtggcagtccggtttggatcaccatccaccagacgatgaagccgccgaacacgacgagctcgccttgcgcaaagttgaacaccttcgacgcgcggtagatgacaatgaagcccatcgcgataagggcgtaaaggagccctaccagcgaaccgttgatcaggtaattcagaaagtcgatcatcatgacatcccggccattttgcgccgcgcctgcaccgccgtggcgaccagaggggccgcgtcgacggaatgaatcagcacgttggccgccatcgttccgcggcgtccatcctggtaggtgacggggattgagagcgccacgcgatctttgccggcgtagaggccgtcgatcaattctgcatagcgttgcaccagaaattcacgtcgtagcttgcgcgtgcgggtcaattcgccctcgtccggatcgagttccttgggaaaattcgcaaatcgccggacttgtgcatgatcgggcagaaatttgttgatgcggacgatctcttcgcggatcaaatcggctacggctgtcatttgcgagaggtcggcgaatgtcgaataagccagcctgcgttcctccgcccaccgcgataccacacccatgtcgatattgatcaacgctccgatgtagtcccgcgacgcgtcgccaagcgtcatgatgtccttgatgaacggactgaagcgcagccgcgtttcgatgaattgcggtggatagctttgaccggaactcagcttggcgagatcctcgatccgctcgaggaaaaccaactcgccggaggtagtgacggaaacagcgtcgccggtccggtaccatccgccatctattcgttcggtggtcttgtcgggcttgccgaaatagccctgaaagaaagatccaccgcgtacgagcagttcgccgtccggtgaaaccttccattccagcgccgctgttgcggggtgggcttcaagccagtggccgacggtttcgaggtcgtagcgttcgcccttgtgaatcgtcatgatgccgatctcggtcgaaccgtaaatattgcgcaagggtacgccgatggcgtgaaacagccggaacacatcgggcgccatggttgatccgccgctcagcgcgaccttcacgcgcgtcaggccgagcttgtcgcgcaacggcttcagaaccaaagtctccgcgatcggaaatgccaagtgggctgccaatggtaccggcttgccgtcgagccgagcgacgttgaccttgcgtccgatcttgacgccccattcgtaaatgcggcggcggattggccccgcgtcgagcatctttgcctggatcgtcgaggccaggctctcccattgccggggtgcgaacaccatcgcctcgaccgcgagttcgcggagattggccagaacctgctccggcgactccggaaagttgaccaccagcggcaaggtgacgccgatcgtaacaccgaacaattgttcggtgacccaggcaggcgcaatgtaggtgaggtaatccatgcccggcgtcaggtcggtgccgttcaccaatcgatgcgcgttgtcgatcagataacggtgcgtgataatgacgcctttgggacgccccgtcgtgccggatgtgtaggacaggatggcgatgtcgtcaggctggcccaatgcgacaaggctatcgaacaaccccggctcggcggcgttccgcttgcgtccctcgtcttccatgtgctcgagcttcatgaggctcggctgccggtaagaccacatgccggtatcatcccagtagatcagcctgcgcaatgtcgggacgctgccgagtactgcgagccccttgtcaatctgctcctggtcctggcctacgaagtaaaccgcctgactgtcgttcaggaggtactcgatttcaccgactgtgaggtcggggtagagcgagacgaccttgccgccgagcgagagcacggcaagctccatccaaaaattctcgggctcgttttcgccgatgatggcgaccgtctcgccgcgcgcaaacgacatcgattgcaatccaaccgccaggttgcggacgcgctcgagcacgtcgccgtaacggaactcacgccagatgccccgatacttgtgacgcgcgattagccgctcgggctccgccgtggcccggtcgacgaatgcctgcggcaatgttttcattggtgtggcggctgaggtcatttttcgcccaggtaagctttcatgaccagcgggtcccgctgaatctgggcgggcgttccggtcgcgatcattttcccgaaatctagtacgtagatgcggtccgcgaggtccatgaccacacccatatcgtgctcgacgagtacgacggggatgccgcgcgcctcgcgtacgtcgaggatgaaccgggcgaggtcttccttttcctcgttgttcatcccggccatcggctcgtccatcagcagaattttcggttcctgcgcgagcgcgcggccgaggtcgacacgcttgcgcaagccatatccaagtgttccgaccggctgatggcggatcgattcgatttccagcaattcaatgatttcctcgacgacctcgcggtgctgcgcttcctccttttgggcccagtgaaaatgcacgaaggcctgcaaaatcgaactgcgcatatgcatgtgccgcccgatcaggatgttctcgatcacggtcatgccgggaaagatgtgcgttccctgaaacgtccgcgccaatccggatcgcgcgatttgatggacgcttcggccgaccatctgctcaccatcgaacacgatgcggccctgctgcggtcgatagaagccgctcatacagttcatcagcgaggttttgccggcgccgttggggccgataaccgcaatgagctcgtcgggcctgatctcgatcgagacttcgttcagggcgacaacgccgccgaacgacattcgcagacggtctgcggtcagcatcggccgcataccgctcacgttgggctccgcatgggtcgccgcttcggcgctcatgtctcctccgtagtcgcgcagtcgttcaaagcgcgcgcgtagttattttcgttgcgttatgaccaatcaggcataatacttacttgcaagtcaaatagatttttgacgcttttcatgcgaccaattcacggcgtgaacgaatgctgggcgaccccaatcttgctgtgcaactccgcacccagctcaaattgcccgttctggttgggccgatgtttctcgtatcgggtcccgaccttgtcatcgcttgttcgcaggccggcgtcgcgggctcttttccgacccttaatgcgcggtcgacggcaatcctggatcaatggctcgcgaggatcacggccgagttgcagccggacgcggctccctatgcagcgaacctgatcgtccatccaaccaacaccaggctggcggaagacgtcgatctggtcgtcaaacacaagtcgccgctggtgattgccagcgtcggacatccgggtcgtgttgttgccgccgtaaagagctacggcggcttggttttctccgacgtcgcctcgctcaaacacgcccaacgcgcggcggaaaccggcgttgatggtctgattttgttgtgtggcggctccggcggcaacaccggttggctcaaccccttcgcattcgtcaccgccgttcgtaaattcttcgccggaccccttgttctcgccggggcgatctcgaatggccgcctgatccatgttgcggaagagctcggcgccgacttcgcctatgtcggtacgccctttatcgcggcgacggagagcatggcggcggatgattaccggcaaatgctgatcgatagcaacgccgacgacattcagctgacggccgaagtcactggccttcccgccaacatgctccgcaaaagcctcgaacgcagcggcttcaggccggagccgaagcatgacggtttcaatctcctgaaggagatcgagacgctgaaggcatggcgggatatctggagcgcggggcagggcgttggcgatgtcgagcgtgtcgagccggctgcgggcgtgatcgaccgcatgacgcatgattacgatgcggcgcgcgcagcaagccagcaacgggccgcgcgcaggttcgcttcagtcggcagtcaatagctcgcgggacggctctcgtccgcttttgccttaacggctcaaggtgggggccgatcccacggatatacgcaatatccagcaaccgcgggatacgctcttaggctagggcgaaacggcgtggtcgagaaggtctgtaaaaaccttcgcgatctccgcgccgcttttcggtccgtccttatcgaaccaccgtgccatccagttgaccgcacccatgaagaaaaacacggtcaattttggatcgacctgccgtatgctgccgtcggccatgcccttctcgataatcgcctgcatctgatgctgcgccttgtcacggcgcgcggcgacgatcttgcggttggcgggatcgagcgcctggaattcgacgaggacggcgcaatcgccgatctcgctgttgtgcgactcgatgaattccttcgcaaacgaaagcagaatttcacggccgttcctgccggtcttgtacgcgtgctcgaacgcgcgatcgccgagatcctgcgacagcatatggcactcgaacaggatttcctgcttgttcttgatgtaataatagagcgcgggcttggtcacgccaagcgtcttggcgacatcgtcgagcgacgtcgcatgatatccttgcgagctgaatgcgcgcgccgcctctttcagcaaggcggttcgcttcagattgaattgctggtcgcgggtctgaacggtgtcgttccacgcggcaagctgacggtcacggccagacaccaccactcctagaatttcattgcgagaacagcagcgctgatcccggcacaattgagctgattcggtcagcttttatcaacgcgaatacccatcgcaagtcaaagattgcgggcgatgatgagtttctggatgttgctggtgccctcgtagatcttgcagacgcggacatcgcggcagtaacgctccaccgggaaatcccgcagataaccgtatccgccatgaatctgcagcgcctcggagcacactttctcggccatttcgctggcgaacagcttcgcgatggcagcctccttcatgcagggcaggccggcctcgagcaggcgcgcggcatgaatatagtattgtcgggcgatatcgacctgcgccgccatgtcggcgagagcgaagctgacgccctgcagctccatgatcggtttgcctgcgacctcacgttcgcgcgcataatgtatggctgcttcgagagccgcctgcgcgattccgaccgcctgcgcagcgatggcgatgcggccgtcggaaagacctgacatcatgatgccgtagccgcaatcgagcgtgccgaggatgttttccttgggaacgcggaggtcgtcgagctggatctgggcggtatgcgcggtccgctgcccgagtttttcctcaatgcgactgactatgtagccttttgcaggcggctcgaccaggaaggtggtgaagccgcgcttgcctgcacccggatcggtgcgcgcgacgatgatcgccacgccggcctcgctgccgttggagatgaactgcttggtcccgttgatcacgaaatcatcgccgtcgcggcgcgccgaggttcgaagtgccgatgtttcggaaccagcctgcggctcggtaatcaggaaggcgccgatcttgtcgccggaggcaagcgcaggaagcagtcgctgcttttgctcggcagtgccgtttttcgcaatgacatgagctgcgccgagattgtgaacgtggacgatcgttccgaccccgccgtcggcggcggaaagttcctcgatggcgagacaataggcgagaaagccagatgccgagccgccgtattcctcggagacggtcatgcccatgaaaccctgggcgccgagaactctcagctcctcggtcggccacgccgaggtgctatcacgctcggctgcagttggggcaaggacatcccgtccaagttggcgcgccgtgttgcgaaccatgcgctgctgttctgacaaaaacggctccgaacctgtatcgctgaaatgcttgttcatggtcgcatcccatccgcaattaaggccgcagagttgcggcatgcaatttacgagaggatacattaatttacccgtgggtcaaatttcggtcatgcgcgcgccggttttcaaatgccttcaactcgttagtcgaccctgaagaaccgggatttcaggctgacatgagccgcagtccgaggctgggccgagctaggattttgaacagcagaaggctcagccggttgatgaggcggcggaagttttatccgacggcagcaaggacggaattggtggcgttaccgtcgcgataccaaaggtaattgcggcccattcggggttcggatttgagatggccgatcaccggctcgacgacggaacgaacgccggctgtgcatctcgcgcttgatctgtggcgttacccgccgcttctagcctgacgtaaacaccctgaacttgtaatccggcggggcgttgtggcccgataacccttgtcgaggagaatgcgcgcgatggtgttgccgatcagcgcctctatctcggggatgacggttgcgagcgcgtggccgtcatagcggttgccgggcagcgccttcgcatggatcacgaactgacagccatcgggtggcatcgttgcctttgcaatgtcgatctggcgggcgcgcgaggcaaagacggccgcaacctttggttcggcgcgttgggcggcggcctcagaactgcgggccgcgcagctcatggaccaggatggcgtcgtgctcggcggttcggccgccattaccttcgccataatggaccagagcacgtcctgtgtttcgcgccgaccggagcggcaggggcgtcggccttgtcattccgaccctgctgacctggccgggcagtttgtcttgttcacgatatcaaaggagagaaatcaaaggagagaactggaatctaacctgaggttgccgcgcccggcatggacaacgcataccgcagcgcacgataagccactttgcggccggtcgacggtgcgttaatcaattgagcaggccagatgtcgatccgaccaatcaaaacccaccacacgttcgaggtgatctcggatcagatccgcgacgaggcccgctcgggcgtcctgggaatgggcgaccgcctgcccaacgagcgggacatggcaaaggctcttgccgtaagccgacacgcccttcggcgaagcgctgcgcggcttggaatctctgggcgttagtcgcttgtgtcggcgcaagcttatccgtcaaagccgatcacgtggctgataccgttcccggcgggcgggccgaccgatgtgctcgctcgtgccgtcgcacccaagctcagcgaggctctcgacgttaccgtaattgtggagaatccaccaggcgccggcggtggcaccgcaatggtttcgctcgcgaaggcgaagcccgatggctaaccgttcgtagcccggcccccagcatgcaggggtccaggcggcacgccaaatagccgcgttcttgccgcaggccggcggctcgatccaaaagacgttggcagacaacaagcgtcacatggcggatggggataatgatggatattggcatatcccgtgcatttctgcagaagggggaacccgtaacttcttgacgtccggcaagacgagctagatgatatccctaacaatcgttagaaattcgttggcgaggagtcgacggtttgtgcggcgcggtatggtcggggttgcctgagccgaacagccgcgatcggcgtgagatggaagaactctgtggatgagagtggcgtccgcccaaacgtggcggctcgtcgttaggaatggaggtccgagtatgagagatcggcatcccgtcactgattgggcaacagacttcgaccaccttgacccgcgatggattgaagacccgttcccaatctgggacgagctgcgccgatcctgtccggttgctcatacgagtcggttccagggtgtgtactttcccacgcgttacgaagatatccgtcagattgcgtatgataccgagcatttctcttcacggcgggttcaggtgcgcgagacgccgccccccgtgaaatcgccggcgcctccgatcacgtctgatccgccgcatcatcgcgccgcacgtatggtcctgctgcctcagttcacgcccgaagccatcaacaagctgatcccgacaacgcgcatgatctgcaatgacctcatcgatcggtttatcggcgacgagacgtgcgacgcagcggtggattttgcccagcatattccggtgcgtgtgattgcagggatgcttggcctgccgccaagcgatggggaaatgttccgtggatgggtgcatgggctcgttgaggaagccatcctggacgatgccacgatggtgcgtaccctgtcggaaatgaccgcctacctgctggatcacgtggagcagcgtcgcaggtcgccggccgatgatctcatcagttatctggccgccgatcggattgatggtgcgcctttgacggacaaccacatcctcggcaccctccgccttctgctcattgccggtatcgatacgacatggagcgggatcggagcttgcctatggcatttggccaaaacgcccgctgatcggcgccgcctagttgctgagcccgcgctgatgcagacggccattgaggaattcttgcgggcctattctccggtgaccatggcgaggctcgtcgccaaggacacggtcgtaggtggctgcccttacgagaaggggcaaatggtgctgctctccttcccggcggccaaccgagatcccgcggttttcccggacgccgataaggtcattattgaccgcaaggcgaaccgccatgcggccttcggcctcggaatacatcgttgcgtcggttcgaacctcgcgcgcatggaactcaccgttgcggtcgaggagttcttgaagaggattcctgagtttcacctcgccgattccaaagctgtcacgtggtccgaaggtgcggtcaggggacctcgaaagctcccactcctgctcggatgaccggcacgccagcctgggcggagcgttgggctcgtcttccgatcgcatataggtctaacaggatgcccagcatgacaccgaaagccctgcgcggccccccgcgcgaatctgggcggacagcttggatctgtgggcgcaagagacagaggaggcggcaaccatgaaaacggcgttgtgcaagaagttgggtatcgaattcccgttatttgcgttcagtcattgccgcgatgtcgtggcagaggtgacgaacgcaggcggtttcggcgttctcggcgctgtcggacacacaccagagagcttgaaaatcgaactggactggatcgactcgcgtgtcaagggccggccctacggtatcgacctgctgattccgaacaaaatggaggacaagcagggtgaccttgcagaggctgagctgcagtcgcggattccggacggacatcgaaaattcgtgaacagcctcctcgagcggcacggcatcgatacgtcggatctttggagcggcgagtacgacaagcgcacggccgacagcatgcgggaggcgggagccgcaaagcttctcgacgtggcgttccaacatccgatcaagctcttcgtcaatgccctcggtgtgccaccgaagtcgatcatggaacgggcacggtcgaagggcatcctcgttggcgcactgaccggagccaaagagcacgccatcaagcacgccgaggcgggggtcgatatacttgtcgctgccggcaccgaggcgggtggccattgcggcgaggtttcgacgatggtactcgtccccgaggtcttgcaggccatcgagccttacgaaaacatcgatgttttagccgcgggtggcatagcaacaggccggcagatggccgcctgcatggcgatgggcgcagcgggcgtctggtgtgggtcggtttggctgacgaccgtcgaggccgagacgacgcccacggtcaagcagaagatgctgaaggcgacgtcgcgcaacaccgtccgttcccggagccgcacgggcaagccgacgcgacagttgcagtcggcctggtcggatgcctggggcgccaaagatgcgccggagcccctggcgatgccgcttcagggactactcagtcggccgcctatggccaaggtcgataagctcgcagagagcggtcacgacggcgcaaagaatcttgcggcatacttcgtaggccaggcggtcggcctgatgaatacggagcagtcggcacggtcggtcgtcgccgatttcatgaaggattatgcggaagctgtagaacggctttcgggcacgttgcatgagtaggtcgaaggacaccacgccaatcgtggaagtcaaccacccagacttgcaggcggcgcggcttgttgcggagcggcgcgttgggaccggtattgcttacgtacgcgcggctcaagtgagatcatctaatgtcaccgacggttgatccgaagcatcccgatttcatcgccgaccagcacgcggcctaccggaggctccgcgcgaatgcccccgtctgctggagtcattcgctcagaggctgggttgtcacccggcatgacctcgtcagcaacattctgcttgatcagcgcttttcggtggagaagttcacgccttttgtggcgacatgtccggacaaatgcgagaaaagatcgagatagtgacgggcgtgctggagaattggatggtttttcgcgaccctccgcagcaccagaggttgcgcggagcgctcgcgaagtatttttcgcccaaggagatggagcggttacgaccgcgcgtgattcaaatcgtcgatgagttgatcgactcttttgctgcaaatggccgtcgagttgattggggagtttgccgtaccattgccgacgagggtcattggcggagttgttcggagccggggagcaccgtatcgccaaattgaagcagtgaggggcaggcaacggcggagcgattttcgtcaaccgtgccgaacaaggtgcccctattgtgccccaactttgctggggcacagctccagggattcgattgctaagtctttgaacagaaaggccggatggtggacgcacaggggatcgaaccttggacctctcccgtgtgaagagccgccgcatcatcgggacggcttctggtaacgctcttggaaagatcaggcggcaagtttggtgcggatcttgtcgcgtgattaccggcgccatcagatgaatgaattcgatcaaaattgcaggatgatcccttacgcgcgttttcctatcggcaccacgtttccatcgctccgcggcaccagggacacgactgccgctcttgcgaggtcttccaaggcggtcgcaatgtatttcgcgtagtgccgctcgatcattttgactgaggtgttgtgcagtttggcgacctgttggatgggcaagccctttcggagaccgcgcacgatgctcgagtgccgcaaagcatagggaatcacctccggcataccggcgcgctggcgaatggccttccagggacgtgcaagttcgcctcttttccacggaccgcgttcagacttcttccacgcgataccgctcggctcctgttcatggatccatcgctcgaaaagaggtgcatcgcttggccgcccagcgattgcgggcaagagcacctcaatcacatcgtcgcccactgggaccgggtctgagccactattgccgccgcgccccttgtaggagcccggcaccatcagacgtcgtgcagaaacctgtacgtcacccacgcgcattcgcctcacctgggcataccgcgcgccggtcgcggccagacacacgacgatccggtatagatcgccatcaaatccttgctcctgatcgacttcacacgcagcttgaaggatggcgccaacctcttcatccgtgagaatctggttatctcgagcaaccgacacatgatcatcatcatcgacccgctcggctttgaagccggccttcacaatggcgaggaacgtcggatttagtttcttccgatctgcggaaagccggggccacgcggcatttagtgcggccttgaggtcattcacgaaccgctgcttggtcgtgacctttaagtccttcggcaaaccctcacgccacgttatcaagtcgtcttctttcagggcatgcagttgcactgatgcgagaggagcagctcccgcagcttcctgattgccgcgcttttcttgaccgagaacgtagcgccgcagcttggtaccggcgtcggatcggacgtcgcgacctgttcggcgtctttctcgagcgtcgcgttccttgatgtaggattcaacggccgatcgcacggtaggagccgggcccgccgcctgcgacgcggcctctgttctggctcgagctacggcctcccgagccgttctcacggcctgttcgaaggtcagaatcccttcggcgcgcttgtcattgatgtcgtttgtgatgccgacttgcgcctgcttgtagttaccgccttcgtggtgattacgccagcgaacaagccaaacgccgccccgttttcctttacgatagcccagatgcgcttccgcatcgaggcggcgccaatgtacgccaagctcgagcctagagcgcgctttagccgtcgtgatctgagcctcggtgagtgtctttgacatagcgttcgccgattttacgtcgaatatccgttgaatataaacccatgtacattggcgaacaatactggactatgggcattcaacctattgaaattattgaacgtcggcggacggtggcgaacggagaaggactcattatttggccctctcaaggctgaaacaggggttcgattcccctagggagcgccagtgatccgatcccgtgcagcaaaaccgcagatttctcgacgacgtgacgccgcctcggggctttgcagcgtttatttcagcattgccgagacgttgtcctttgtcacgacgtcgagaccggtgtggatgatctccggcaccttctggcctttcttgattgcaagcagcgtatccatcgatttgacgcccatctcgaacggacgctggccgatcagtgcattggcgtaaccctcgctgaggagctcaagctgcatcttgagggtgtcggccgcgacgagcgtgaacttgccggcgtcgatgtccttcttgctcttgctggcgaacgccttgaagccctccggcgcgaacatcggccagccgccgaccgggatgatcgctgcaagatcgggggttgcggtgcgcagatcggtcatctgctggacgcctagcgccggatcgtcgttgcagaaggtcggcgatcccccgacctcgatccatttcgagcccttgagcgcctcccggacgccgtcgacgcgctcggcgaggttctccgcgccgggcccgccggagatcatcgcgtatttgccgccatcgggccggagcttcagcaattgcttgccgagcgctgtgccgaactccttgttgtcggtgccgatataggcgatccgcttcgagcccggcgcatccgagtcaaaggtgatgacggcaatgccggcggcggttgccgcctcgatcgacttggtcatcgcggcgacatcggcgaccgagatggcgaggccgtcgaccttctgggtgatgaaatcctggatgatttgcgcctgcgtcgccggctcgtgctcgaccggacccttgtagatgcattcgatgttgccgagctccttggcgcgcttctcgcagccgtcgcgcgcgaagtcgaagaacggattgttcatcgccttgggcacgatcacgaatttgtagttctgggcaaagccgggcgtggccgtcatggcgagcaccgcggcggctagaagtgctttcctcattgtttccctccacattgttcttttgtgcctatccttgcaatcagcggctccgggaggtggataggcgggcattcacgatcctccgggacgaacttgtcaggccatgcgcgagcgaaggcgatcgaccagcacggctgcgatgatgatcacgcccaccagtgtctgctgccaataagagttgacctgcgcgagcacgaggccgttgcggattacctcgagcagcacgcagccgacgatggctccgagtgggccgccggcgccgccggcgagattggcgccgccgatcacggcggccgcgatgacgttgagctcgtaggacgtcgccatgttggccggcgcggatcccagccagccgcagatgatgatgccctgcaggccggccgcgagcgcgcagatgacatagacctcgatcttgacgcgcacgaccgggattccggtcagggccgccgccttctcattgccgccgagcgcaaagacgtggcggccaaaaccggtatggtgcagcaccaccgccatcgccgccgcgagcaccacgagatagatgaacggcgcgggcaggccgaacacgacgcctgaggtcagcgtgtagaaataaccggcttccgggccgctcggaaagctgccgcggccgttggagacgacgtagccgaggccgcgcacgatcgagagcatgccgagcgtggtgacgaagggcgacagcccgagtacggcgatgcagaagccattgacgaggccgaccagcagcgcgacgccgagccctgccaggacagagatgagcaggatcagtccgggcacgttggcgatcacggtcttgccgtcgtcagccagatgcacgaaccactccgcgccaggcatgcccggcgtcgagatggacgtcatgaccatcgaggtgatcatcgcggagaagcacatcaccgagcccaccgagagatcgatgccgcccgtgatgatgacgaaggtcacgccgagcgtggcgatggcgatgaatgagaagttcttcgccacattctgaagattgctttgggtgaggaaataggggctggcgaagttcatcaccacgaacagggtcaccagcgccagcaggacgtagccggtctgcgaggcgaagaagccgcttcgccaccatttggccttgccgacattggtgaaggtgaggggagagtccaggggcgtggccatcacgcagcctccttcgctcccgtgatcagggaggtgacttcttcggggctggtgtcgccgatcgccttgtcggcccgcttctcgccgcggcgcatgacgacgacgcggtcgcagaccgcgaacacgtcgggcatgcggtgcgagatcagcatgaccgcgacgccctgttccttcaggcgatggatcagaccaaggacctgctcgacctggcggacagagatcgcagccgtcggctcgtccatcatcaccagcctggcattcgagagccgcgtccgcgcgatcgcgaccgcctgacgctggccacccgacatctgcttgacgagatcgtccggacgggtctccgagcgcagttcgccgaacagctccagcgcgcgggcggccatcgccttgtggtcgagcaaggcgaacggaccaaacttgcgcttgagctcgcggccgaggaagacattggccgcggccgtgaggttgtcggcgagtgcaaggtcctggtagaccacttcgatgccgaccgcacgggcatcgatcggacgggcgaagtgaaccagcctgccgtcaaagcggatctcgccgtgacttggcgggaaattgccggcgatgatcttgaccagtgtcgacttgccggcgccgttgtcgcccatcaggccgacaacctcgccgggggagacgcgcaggtcgacgccatgcaacgcgcgaatggcgccgaactccttgccgatgcccttcaactccaggactgccagcccggcgtcgtgaggggttaccatggctggtctcgctcaggcatgctggcaaaccacctccggctcagaagtgcaccagcgtgcgcagaccaagaacccaggcgttctcggtcttgacgccggcggcattatagccgcgtccgccaggattgatcacgtactgggcgtcgaatttgaggttcatccagccggtcgcctgccatccgtaccaggcttcgatcgggacttcgttgccgcctgcgttcggggtgagcgcagccgaattcacgtgggtggtgcccaccgcgaagccgacttcgtcttcagggcgccaggagaacgttccggtgtgcctgaagcccagggcgacctggtagtcctgatacgacgtccgatgatcggcgaccgtcgtattgaggaacatgtaccaaccctgtgcctttgcaccctcgaccgtcaaccgttgcaggatcgactcgtagacgccatagcggccgcgctggtcgccgagattctgatcggaaacaccgcccatgcccggtgcgatggcgatgatgcccggcaggccgccgtcgatcgtcgaggcgctgtcataccagccgccgaaccgccaggtcccgttcaacggaccgctcggcgcccagaccacctcgaccggcaccagcacgccggaggcgcggcttgagccggggacgcccggcaggaagtaggtcgcggaatccgacgtcgtcagatagttcggattggcgtcgtagacgccgaccgacagctgccattccttggtgaagttgtagtgcgccacgccggcccattggctcaccggccagttgtagatgtagccgccctggatgttgccgggctgaccgccgcagaaggtcaggttgatgaactcgcacagcccgaagaagaagtcggagccgaccggcaaacggccgcccttgagttcgaggcggttatcgaaaagtttttgcgagtagtagagttcggtgaggcgcaggatattgccgcggccgaacacttcgttggtcagctgcagggccgggatgccagcctcgtcattcaggttgcggccaaagcggtcgaccagcgtgaggccaaccgtaccgccttggatgccggcaagcttcgccatgtcgaacttggcctggaagaacagctgtccggcgttggctccggtgttcctgttgccgccggacaaattggtgacggcttcgtcgcccagcgtcagggccagcgagatgccccgctctttcagctgcgtcctgccgagatcgccaaacaggtacggtctcgtccagaagtcgtcggtctccgtgtaaggcacgggcggagcttttgtgagcagatcggccgcatgcgcgccgctgccgccgaacagtgataacagggcgatccccacgccgcacgcccgcgcggtgttcacagaccaaagtggcattttctgcactcccagcgtccccggctttgtccatttttgtgtcacgtccctgcccaaagcccttcagcctggaacgtgccccgtttaattcatcgatcggtcaacttgagatagaaactctgcgcatcgaactcttccccttgttcctctactcaagtcaccgcgaccatattcccggttgcggattccttatcgagcgtcatgcctgatcgcctgtcgtcgttggcagcgcggcacggcgtgaagctgtgctttgcagaatgctgctgtccttcttcggcgcagtgcgggcgagaccggccagcgcggccttgcgtcgccgccgggcctgcaattgctggtccgccagcacgccgatcaggatcacggtgcccatcaccgcgaagttcagcgaattcggaatgccgaggatgttcacgaggttctgcagcacctgaagcagtgccgtcccgagcacgataccgaggatggagccttcgccgccgcgcaggctgcagccgccgaggacggctgccgcaatcgcatagagctcgtagaaattgccgaaggaactcggcgagaccgagttggtgtagaagacgaacaacacggtcgagacgccggcaaggccgccgctgatgatataggcggtcgcgatcacgaggttggtcctgatgccggagtagcgcgccgcctcctcgttcttgcccacggcatagagccagcgtccatacaccgagcgatgcagcagcacgccgaggatcaccgccaggatgatcaggaagatgaaggtgttcggaatgcccgcgacattgccggaagcgatgttgcccagcgtgctggcctcgtcgccgtagccgaagccacgcgtcgagtcgctggtgtaatagcgtgcggcaccgcgatagatcaggagcccgcacagtgtcacgataaacggctgcatcttgagccgggtgatcaggaaaccctggatgccgccgagcgccagcccgcccatcaggaccagcaacagcgcgaacggccagggcacctgataggtcgtcagcaggtcgatgaagacgacgccgagcagcgcgaacatcgagccgagcgaaagatcgatgccgccggtgatgatgacgagcccttcacccagcgcgaacacaccgaacaggccgatcagattggccatgttcagcaggttcacgaacgacaggaaggccgggttgatcgcgccggtgatggcggagatcaccgccagcagcaagaacaggccgagttctttcttcatcatggcgctgcggtctccacggtttcgaacgcttggccgaccgccagcttcaacacgttgtattcgctgaattgctcgcgctcgagcacgccgctgacgctgccctcgtgcatcaccgcgacgcggtcggagacgccgatcacctcttccatgtcggaggagatcatcacgatcgcgacgccctggtcggcgaggctgcgcatcagcgcgtagatctcgctcttggcgccgacatcgatgccgcgggtcggctcgtcgaagaacatcacgcgcggctgcatcgagagccacttgcccagcaccaccttctgctggttgccgccggagagcgtgacggcttcgatgtcgatgctcggcgccttgatcgtcaggcgcctcgcctgttcctttgcgatcttgcgctcggccgtgccgttgaccagccacatccgcgcgtagtccagcaggctcgcgagcgtcacgttttcccgaatcggcagttccagcaccagtccggatttcttgcgatcctccggcaccagatagattccctgcctgatcgcatcgcgcggcgaggcgacgccgaccggcgcgttgtcgatcctgatctcgccacccagcagcgggtcgatgccgaacaccgcgcgggcaagcgaggtgcggccggcgccgacgagcccggcgaggccgaggatttcgccgcgccgcaccgaaaggtcgatctgccggtcgggaaaggccgtcgtcaccacgccggcgatgtcgcagccgcccgggtgcggcagacacgccggcggcgtataaagcgccttcaggtcgcggccgatcatcagccggatcatggcggcatggctcagctcgtcgcgcgccagctcgcccaccgtgcgcccgtcgcgcagcaccacgacccgatccgcgcagctcatgatctcgccgagccggtgcgagatgtagatcaccgagatgccgtgcgccttcaggtcggcaatcacctccagcaggcgttcggtctccgaaatcgtcaggctggaggtcggctcgtccatgatgatcacgcgcgcgtcgatcgacagcgcctttgcgatctccaccatctggcgctcggcgatcgacagattgtcgaccagggtgcccggcgtgaaatcggcgcccagccgttccagcagcggcgtcacgcgggcgcgcatctccgcattgtccaccagcttcagcgggccgccggcaagtttctcgcgcccgatgaagacgttggcggcgacgtcgagattctcgaacaggttcagctcctggtgcacgaaggcgattccggcgagcgtcgcctcgttcacggtcatccgggcgtgctcggtgccgccgatgcggatcacgcccgcgctcggcgcgatcacgccggccagcacgcgcatcagcgtcgatttgccggcgccgttctcgccgatcaggcccagcacctcaccgcggcagacgcgcagattgacgtcgtcgagcgccctcacgccgggataggtcttgctgattccgctgagttcgagcagcgtctccgccattcggcatatcctcctgcacatcgcccggcctgtcgcggccgggcgatgaagccgaccgaagtcacttcttcagcagatccttcagatttgcggcgaactccgcgacgttggccttgctgatcaccttggtcggcacgatcagcttgctgtctttcggaatccaggacttgtcgccgttcagcgtcttgatgatgttggtggcggagagatagccgaactcgtagggctgctgcacgaccgtggattcgatggtgccgtcggagatgccgcgcagcgtccgctgatcctcgtcgaagccgacgatcttcaccttgccggccttgcccgcggccttcaccgcgtcatagatcagcggggtctcgtagctccacaggccggacagcagcgcgatgtcgggatatttgacgagcacgttctccatgttcgccttggccttggcgaagtcgacctgatcggtgaacacgtcgaccagctcgaccttggtgccggcgatcgattccttgatgccctgcacgcgctcgcgggcgttgtcggcgtccatcgttccgacgaacagcgcgatcttgccgccgttcggcagcgccttcttgatctcctcgccggcctgccgcccggctgcgacgttgtcggtgccgatataggcgagacgattgctctgcggcgcgtcgctgtccgtggtgatcagcacggtcttggccgcaaccttgttgagttcttcggtcgcatgcggggcatcgtcgaccgagatcgagatgccggcgacgccacgcaccaaaaggtcgtccagttcacgccgctggccggccgcggtgccttcgttggtgacgatcaattcgatattgtattcggggtgctccttctgcgccttctcaagcccgcggcccgcgatggtccagaagtcggcagcgacgttggtcaccagcgcgatggtctttttttgctgtgcctgtgctatccccgttgtcatcgcgagcgcggctgcgcccgccaacagcggtacgatccatctcttcatcgagtcattcatatgcacctccctgtcgacacccccggtgaggggatttcacacccggcgcttttcacgccttattttattcacgtaactaataaattagcgcgacagaatgtccagtcaaggtgttcgagttcgaaccttgcaagcaaaaatagtatgaaggtgatgtatttcggcctctatcaacgcttttgggccaatatctgaggcgtatccattgaataattttatcaagcgaattaaaaaagccggtatgaatgagcagtccgaaccgctgagacgcgcttcaagcctggcccgcggatcgaaccgcgaccgtctcgtcgaagtcctgcggcgccagggaccattgccgcgggtcgagctggcacgcagcaccgggctgagctttccggccatttcggccattacgtcgaagctgatggcggaagacctgctggttgaggccgagacagatgctgcgacgtcgtggccggacgactccgacgaagacgatacggacgggctcaacggccgccgccggggccggccggcggtcttgttgacgctgaaccccgaattcggccgcatcattgcggtctcactccgcatgaatctgatcgaaacgttgatcgccgatttcagcggctcggccctggcgcaatcgcggcttgagctgacgacgcggggcctcgatgcaggcgcgttgtgcgatctcgtgatcgcgcagatcgaggcaatgctcgaagcgactggcacgccgcgagaccggctgctcggaatcgggattgcgctgcaaggcatcgtcgacgctgatacaggcaggcatctgtggagccccgcgctgtcgatcaccgacctcgatctggcaaagccggtccgcgaggaattcggcgtcgaagtcgtgatggcgaacgatgcggtcgcggtggcgctcgcgctggtcgcggccgagccggccctggcgcaggggctcacggccacgctcatggtcggtcacggcatcggcatgggcatcgtcgtcgacggcgaagcgcgctggggggcgggcgcgggcagcgagatcggccatgtcaagctgaccccgaatggtccgcaatgccgctgcggtcagcgcggctgcatcgaggcccatctcgcggactatgcgctctaccgcgacgcccgcaccttcctcgacctgccgccggcggtgtcgcagcaaccgtccgaggcgcagatggcgctgctgcgcgcgcgggcacgcgccggcgatccccgtctcgagcagctattccggcaggcaggccacgcgctcgccgaagcggtcgccacgacgatatcggtgttgcgcccacatcatttgatcctcgcaggtcccggcctgcaggcgttcgacatgatgcgcagcgcctatcaagagcggctcgagcaggcggtgctgccgtggttgctcaagtcgacggcgatccatgtgcgtcccagtgagtcggcgacgatcgtcgacggcatggtgcggcggacgctgcgggtcgtggaccgaaaccacatggaatcgaccgagtgaatctcggaagctgcggctctccgcttgagccgcagcagagcaaccgacgcgcttcaggcgccaaatcgagagaatgccaatgcagggtgccgtctatccaagcctcaaggaccggaccgttctggtcaccggtggcggttccggcattggcgaggccatcgtccgccagttcatcaaccagggcgcgcgagtcggtttcatcgacatcgacctgacgtcctcggagcagctgctgtccgacctcggggcgcaggcccgcgtgcacttcgagcacgccgatctgcgcgacatcggcgcgctgcgccgcgcggtcgccggcattcgcgaggcgctcgggccgatcacgatcctggtcaacaacgcggcgcgcgatgatcgtcacgcgatcgaggacgtcacgccggaattctgggacgagcggatcgcggtcaacctcaagcaccagttcttcagtgcccaggcggtcgcacccgacatgaggcaggcgggcggcggtgcgatcatcaacatcggctcggtgagctgggtgatcggtcagggcaacatgccctgctacaccactgccaagtcagcggtgcagggcctcacccgcgcgctggcgcgcgatctcggtccgcacaatgtgcgggtcaactccatcctgcccggatggatcatgacccagcgccagcaggatctgtggctgacgcccgaaggcgttgctgagctgatgcagcgccaatgcctgaagcgcaagctcgtgcctgacgacattgctcgcgtggtgctgttcttcgccgccgacgacagcggcgcctgcaccaaccagagccatatcgtcgatggcggctgggtctaaagcgcgacgagattgggttgaatcgtcatggcgctttagctcgttgtttgagcatgatcttttcggaaagccgcttcgcacttttccggaccatgctctagcgatacggcaagacagcagctctcgtcgatcagtccgcgcctgaagccgtcaacgcgtcgcgcagggcctggacgcgcttgttcagcgagatgagttcgtcgaccgtcaggccggaccgcgccagcaaggtgtcggtcaggcagccggtgcgtgactgcatcgccttgccgctgccggtcagatggacgccgacctgccgctcatcctgcgtgctgcgccgacgctcgacaaagccggcatgctcgagccgcttcaccagcggcgtgatggtgctgggttcgagggcgagccggtcggcgatcgcggaaatcatctgcccgtccctttcccagagcacgctgagaacgaggtattgcggataagtgatgccgaggccgtcgagcaggggtttgtaggcgcggttgatcgcgatggtggtgccgtaaagcgaaaagcagagctggctatccagcggaattggtcccggatcaggcatgggaagggccctttcgatcgtcattgctgtaccttaccacaaaaatcattatcacgataaaaaatagctagacaggcaattcaagctgcgttatacgatgattattgcgataaatattatcgcgaaataaacatcaggagactatcccatgtcgatcaccaccaaattgctcgccgccgcagcgtcgctgggcctcgcctcggccgcgatccctgcagcccacgcccaatccgcccccgtcaagtcgatcgtcctcgtccatggcggtttcgtcgacggttcgggctgggaaggcgtctacaagatcctgaagaaggacggctacaaggtcagcattgtccagaacccgaccactacgctggcggacgacgtcgccgtcaccaagcgcgccatcgccgccgcggatggcaatgtcgttctggtcggccactcctatggcggcgtcgtgatcaccgaggctggcaccgacccgaaggtcgcagggctggtctacatcacggcgttcgcgcccgaccagggtgaatcggtcggcaagctgatcgccaatcctcctccgggcgcgccggtgccgccgatcctgccgccgaaggacggcttcctctcgctcgatcgcgcgaagttcgctgcgtcgttcgctgccgatgtgaagcccgacgtcgcggctttcatggctgactcccaggtgccctggggcgtcacggcgctgaacggcgaggtgaccgtgccggcctggaagagcaagccgagctggtacctggtggcgaccaacgacaagatgatcccggtcgatgcgcagcgcatgatggccaagcgcgccggcgccaagaccgtcgatcaggccggcagccacgccatctatgtttcgaagccgcaagctgtggcggccatcatcgagcaggccgccaagggcgtcggtgagagcaagaagtaacgcgccgcattctcgatccgagctcctcgaaggcgcctcagctttcggggagcttgcgcgtttgcgcagctcgcggaacacgctttgagcaaggcttgatcgaaaaacggggcgccattccaaatgcgccctagaactgcctgaccggatggtcgataaatggccgcggcccgattgatttggacgataggccggacgacggccgctggaacggaacgacatggcccgatcgcgcgccaaggactacgacgacaagcgcctctcgatgctgcaccgctcggccgagctgtttgccgcctcgggatatgtcggcacgtcgatgaacacgatcgccgatgcgtgcggtgtctcgaaggcgctgctctatcactactacccggacaaggaggcgatcctgttcgatatcctgtcgtcgcatctcgagacgctggtggcggcggttcgcaaggcgagcgcgtcggccggcgatcccatcgagcgcttcaggacgatcgttggcaccctgctcgagctctaccggcatgccgatgccgagcatcaggtccagatcgcaagtctcaagctgctgccgaaggacaagcagcagccgctgcttgcgagcgagcggatcctggtcaggatcatgtccgatgcgctcgccgccgcggtgccggcggcgaagcagaagcgcgtgctcaagccgctgacgatgagcgtcttcggcatgctgaactggcactatatgtggtttcgcgagggcgggccgatgacccgcgccgaatatgccgagttcgtcgcgcaactggtgctggccggtgccgcggatgccgccgccgcccggccgcgcagcaaggcaaagccggtcggccgcagccggcaggccgagttgctctgaagcgcgtctctaaagcatgatccggaaaagtgcgaagcggttttccgaaaagatcatgcctaaacaagaatctgaagcgcgatgacgattcaacatgatctcatcgcgctttagccccgcatcgcattcatcgtcagcagttcgtaggtcgccgcggtctcgccggtgccggtcgtgatctcgacgtcccagcgcacctcgccgtactgcttgttgcgcggtgtcttctccttggcggtcagccgcacctggatctgttctcccggttgcaccggcttcacgaagcgcagcgagtcgaggccgtaattcgccagcaccggaccatagtcgggatcgacgaacaggccggccgcgaatgacagcagcagatagccatgcgcgacgcggccagggaagaacggatgccccttggtcgcctcctcgtccatatgggcgtagaaggtgtcgccggtgaaatgcgcgaagtgctcgatgtcgtcgagggtgatctgccgcgacttcgagaccagcgtgcggccgatctcgagatcgtcgtagtgatagcggaacgggtgcaggtcgccctcgagcaccgggctgcccttgaaccagcggccggtgacgccgctcagcatgcgaggagagccttgcaacgcggtgcgctgcatgtagtgctgcaggctgcggacgccgcccagttcctcgccaccgccggcgcggcccgggccgccgtggaccatctgcggcatcggcgagccgtggccggtgtgctcggtcgcgcagtcgcggtcgatgatcgcgacgcggccatggaagctgccgatgccgaaggtgagctcggtcgccgcgtcgatatcgtgggtgtagaccgatgcgaccaggctgccgccgccgcggttggtcagtgcgatggcctggtccagatcgtcatagcccatcacggtgcagaccggcccgaacgcctcgatctcgtggaccgcggttgcggcaagcggcttcgcgcagtgcagcagcagcggcggaacgaaagcgccgcgcttggcgtcggcgtcgacgagcgcaaagttgtcgggatcgccggccaccagctcggcctcggtgcggagcttcgcgacgtgggcaagcacatcgttgcgctgggcgaggccaaccagtggtcccatcctgacgttgtcgcttgcgggattgccgaccacgacctttgccaggcgatcgcgcaaggccgagatcacggcgtcgagctgcgctgacggcgccagcgcgcggcggatcgcggtgcatttctgcccggccttgaccgtcatctcctttgccacttccttgatgaagagatcgaactccgggcttcccggcgcggcgcccggagcgaggatcgctgcattcagggagtcgcgctcggcgatgaaccggacagcttcgcgcgcgatgaccggatgccgctgcagcttctgcgaggtgtcggcggagcccgtgaacgacaccacgtcctggcaggtgagatggtcgaacaggtcgccggtcgagccaatgatgaattgcagcgcgccttccggcagtgcaccggattcggtgatcaaccgcacgagctcgtaggcgacataggcggtgaccgtcgcaggcttggtgacgacgggaacgccggcgagaagcgcaggcgccagcttctccagcaagccccagcacgggaaattgaacgcgttgatgtgcacagcgacgccgtgcagcggcgtcacgatgtgttgaccggcaaacgcgccgcccttggagagcccttcgacattaccgtcgagcaggtacctggtgttcggaagctcgcggcgtcccttgctggcatatgcgaacagcgtgccgataccgccgtcgacgtcgatcatggcgtcggtgcgggtggcgcctgcatgcagcgacagtttgtagagccggtccttgtgctggctcagatggtcggctagcgccttcagcaatcccgcgcgctggtggaacgacagcttgcggagattcttgccgccgaccgagcggccataggcgaggatctcgcgcatgtcgagatcgctcctggtcgcgagcgccaccacgtcgccggtgacggcgctgcgaatctcggccgccggttcgcccgcgccggaccacctgccacgaacgaagctgtcgagctgcatgacgttgtccgccgattgcgcaccgctggagtgaggctgtgtcatcgaagtggaaccctctgaccctgtgatctgtgttacgtcctggcttgctggcggaacgttcaatcctatgcccgtccgacaaaacgtggcgagcgcttttcgaggaacgcggtcacgccctcggcataatccgccgaccggccggcacgtccctgcagatcgcgttcgagatcgagttgcgcatcaagcgtgttgcgctcggatgcatcgagtgcctgcttgatcaacgcaaggccatcggtcggttgcgtcgcgagcgaggcggcaagcgcatgggcctccgtcatcaggtcggaatcctcgaccaccttccagatcatgccccatgcttccgcccgttccgcggagaccggctcggccagcatggccaatgcccgggcccgcgctccaccgaccagccgcggcagaaaccaggtgccgccggagtcaggaacgaggccgagcttggcaaaggcctgaatgaacttggctgaccgtgcggcgatcacgatatcgcaggcaagcgccacgttcgcgccggcgccagcagccacgccgttgaccgcgcacacggccggcatcggaatgctgcgcagcttgcgcaccagcggattgtaatatttttcgatcggcatcgagaggtcaggcgtctcgcccggcgtgaacacgccgtccgagaggtcctgcccggcgcagaatccgcgtcccgctccggtcaggatcagcgcgcggcaggatttgtcctgttcggccgcggtcagcgcggccatcaaggcggcatgcagatcggcgctgaatgaattcaggcggtcgggtcggttgagcgtcaggacgcgatatccggcgcggatatcggtcaacaccaggtcggtgaccatgattgcctcccgttgcggcttctgacgaccaaaggtcgcgtgaccctggggcagaattactattgaccgtccggtcagtcaattataatcggcgcgagcgatggacggcgtcctcggactatcggagcgaggacgattttagtcccgatcgcgaattcgggcgcgaccgacccatcaaggtcaaagcaatcccgcgctctacactataccgtgcatttgcgatgcttgtgcgcgatgcttgacagttgtcagaccgaggcatcggtggaacccgcgaaaggttcacgtttgcagccacgctgcatggtccccatgctgggtgtgcgccgccacaaatcagccgcatatgagcagcgacctccgtcgccatgagggcgagcctatgacaatgcaatcgggcgatatcacagggtttcgattctcgacggcgcatttcggcgagcgagatcgcttgccgatctttcgcgagcagatcggacggatgatcgtcaagctcgatccggagccgctcgacgacggcgcgtttcatgcggaagcgaatgtgcgcgaattgtccgggctcggcatcggatcctgggcgtgcagcaatctcaagatcgcgagaccgcgcgaactgctcgatggtaccgacgatctggtgctgaccatcatcacgagcggcaatgtgcgcgcctcgcagcgcggccgcgacatcctgctcggcccggggcaggcagtgctgcagtcgagcgcggaggcaggcgacatggtcgtcccggtgtcgcccagccgtttcgtcggcctcaggctgccgcgcaaggcgctcgcctcgctggttcgtgatccggaagacatgctgatccgccaaatgccggcaaacacggaggccatgcgcctgctcgcgctctacatcagggagctcgacgacagctatcagctggcgactcccgaactgcgtaacgccgtcgtcaagcacctggtcgatctgggcgcgctgatcatcggcgcgaaccgggatgcagcggtcgccgccgaagacggcggcctggcggccgcgcggcttgccgcggtcaaggccgacatttccgataatctcagctatggcgatctcactctgcccgcggtggcggcccggctgaagctcacgccgcgccatatccagaggctgttcgaaagcgcaggttcgaccttttcggaattcgtgctcggccagcgcttggcgcgggcgcatcatctgctgaccgatccacgccacagcggcaccaccatcggtacgattgcgttcgaagtcgggttcggcgatctgtcctacttcaaccgcaccttccgccggcattacggcgcgacgccatcggatgttcgcgcggcgccgcgaatgcgttagacgacgccggtctttgattccaactcgtcgcgtcgtgctccgccgcgaaaaacgatgaaagcaaacaggatagctcccgcgaacacgatgagcgaaccgaccacgacgacgggctggtaagccggaccgccgatccggatggctgcaattccgattggaaagatgacggctccgatcacggagagccaggcctgtatcctggcaagtggaccggtggccgccgcgggaaacacatggtagtaaagtccggcaaggaacaatgcgacgaagccgagcaggttgagatgagcgtgggcaggcgccagcgtgaaattctccgctacacccatgccgatgccgaggccaagcccgacgagaaagaggacgacgctgacacgcaagagattcagtgcgagcattgctccttcagttggtgaactcgatgccattccttgttccttgcccgaaaatacccaagccgcatgtcctttggcaacttgccggccgatgcttagacgtcccggaaactcgacgcatgggctggagcgacatgcacttggacggaggcgacatcgtggacaatccaggcgggcgtcgtagagccgcctcgaatcagccgcggatcgcgcgcgcgatgcggcggcactaagagagccgatgatgccaaacgcgccggatgcctcggattttcgctactcgaccgcggattgggctgaacgcgagcggttggcgatttttcgggagcggatcgggcgcatgatggtgaagctcgatccggcgccgctgatcaacagcgtttactacagcgatgccagagtgcgtgcgctgcacgggctcgggatcggattctggtcgttcgccaacctgcgggtcgacaggacgcgcgaattgctcgatggctgcgacgatctattgatggtgattggcgccagtggcaatcggctggtgtcgcatcgtggccgggagcaggcggtcggcgcaggtgaggcaattctgatggcgaccgccgagacggccacgatgacctacccctcggcgtcgcgcctcatcagtttgcgactgccgcgcaaggcgctgacgcccctggtgcccaatcccgaggacgcgctgatgcgcccgctgcggccctcgagcgaagcgctgcgattattgacccgctatgtccgggatatcgacgatctctatcgatcggcgggcgcggagctgcaacgtcttatcgtcagccatgtgatcgaccttgcggcgctggtaatcggcgcgtcgagggacggggaggcggttgcagaaaagcgcggccttgctgctgcgcggctggccgcggtcaaggccgacgtcggcgcgcggatcggggaatgcagcctcagcctggccgctgtggcgaggcgcctgaagatcacgccacgccaaattcagcggctgtttgccggcgaaggcacgacattctcggagtttgtgctcgaccagcggctggtgcgcgcacatggcttgctgatcgagtcgcagcgcagcggccgcagcatcagcaccatcgcgttcgaggcagggttcggcgatctgtcctacttcaaccgcacgtttcgccggcgctacggtgcgacgccgtcggacattcgaaccgcgccgcgccgcttctgatggaatgcacgcctcaggctaaggccgcggtttaggggtcgccgcaacccggcactcgccggatctgttcgatcaatcgctgatggcgctccgcggacagcgtccgttcattcgcgcacatcagcatggcgacgcaggcgggctccggtgcggagggccaggcgatggttccgtcgatcgcgccgtcgcatttgcggtaggcatttttcgcgtcccaacggatcgcgctctcggggactggcgtcgaagcggccatcacgatcagtgctgctccgatcaacaggagcgatcgggatatccgccgatatgatccgcgcatgccgcttgtccatccttatgagggtcgtcgacgatacgggagcgtccggggcgggcgatcacggcgcgcgcgtgtatcgatactggattcggagaaaggtcacgacgcagcgatccggttcggctttgcgcgcactcattcggataggattgcgctcatgtcggtttcgttcattcgatcagcgtcggtgatgttctgccttccagcgggaatagcgtcgatcgccatcaatctggcggtctccacgcaatggggcgcgttcaaggtcggcggctattatgagatcgagctgaaaggtgctgtcgaggcggcggcaccggtcggcgccgacgtcaagccgaacgcatcagagccgctggtgcggccgtgatcgagacatcacgagctatgtgctatcgcgcacacaggatcgccaccgatcgcgccctcgccgttgacgattcaaggcaccaatgcacggcaacgtgtttcacattgttgcccaatgtcgcatatgtccaatcccccgtcgcctcagtccgagcctgccggccagcgcgcgcatacaaggcagcccccagtgaccgtcgcacccggcagtatgagtcgattgcgatgcattgaggcgacttgagaccatcgaggagaacgtgatgaagtttgcacttcgaggatattgtcttgcgcttggcgcgagcctggctctgtccagcgcggccatggcacaggatatcagtgttgccgtggtcgggccgatgaccggctcggaggcgagcttcggccagcagttcaagaacggcgccgatctcgcgatcgccgacatcaacgcggcaggcggcgtgctcggcaagaagctgaagctggaggtcggcgacgacgcctgcgatccgaagcaggccgtgtcggttgccgagaagatggcaggcgcgaagattccgttcgtcgtcgggcacttctgctcgtcgacctcgattcccgcctcggacgcttatgccgagggcaatgtgcttgagatcacgcccggctcgaccaacccgctgttcaccgagcgcgggttgtggaacacgttccgcgtctgcggccgcgatgaccagcagggcatggtggcggccggctacatcatcaagaactacaagaccaggaacgtcgcgatcatccacgacaagaccacctatggcaaaggtcttgccgacgaaaccaagaacgcgatcaacgcggcgggtgtgaaggaaaagctctatgaagcctacaccaagggcgacaaggactttgccgcgctggtctcccgcttcaagaaggaatcgatcgatttcgtctatgtcggcggctactacgccgaggctgcgttgatcctgcgccagatgcgcgagcagggcgtcaatgcggtgctgatgggcggcgatgccttggtcgacaagcagttcgccgcgatcgcgggtccgcttgccgagggctcgctgttcaccttctcgcccgatccgcgcaagaaggtgaccgcggccgcgaccttgaagaagttcaaggacaagggcatcgatccggacggctacacgctttacagctatgcggccttccagatctggagccaggccgtcacccgcgcccagaccacggacgccaagaaggtcgcagccgccatcaaggccggaagctgggacaccgtgctcggcaacatcagctacacgccgaagggtgacatcaccttgatcgactatgtcgtgtaccgccgcgacaaggacggcaactacgccgagctgccggccgccggtcaatgatcgccagccgcgacatcggcactcctccctgatcgatgtcgcggctgtgccggctcacagcgccaacggaccaaccctctgccagccccggaggtgttggcgctgtgacgccaggcaagaacgataagcgtcccgctggcgccgattgccggcgcagagcctgatcatcgagataatcgaagagagcagcagatgtctgacatgagtctgaccaacaatggcggtctgggtggcggcggctcagccgattggcgcgacaccgggcctgcgcaaggaccctcgcagggatcgtcgcattcctatccgctgctggtgcgcgatcacggtcttggcaccgcgctgaagctgttgctcgagaccctgccttatgcactggcgcgatggggcgtgttgctgggctttgccgcagcgtgcgccatctttgccatcgtggccgtgggcggcgccgtgtggctcggcacccacgtcgccagcgtgttcggctactgctggctgcttggcatcctgctgctcggcggatggatctggggcgccgtcctgcgctacacgctgcatgtgatcgcatgcggtcatgtcgccgtgctgaccgaactgatcacgcatggccgcatcgggaacggcaccgaaggacaatttgcctacggccgccggatcgtgatggaccggttcggcgaggtcgcgatcctgttcgggctcaatgcgctgatccgcgccgtgctgcgtgcgtttcacaatgcgctcgatacgctcggcgactggctgccggcgcccggcatgaaggcgatcgtcggcctgctcaataccatcctgtcggccgcgacgcgctacctggacaaggtggtgctatcctacgatctggcgcgcggcggcgacgatccaaggcgcaatatccaggacggcctggtctattattgccagaacgccaagccgatcctgacgacgtcggtctggatggtcatcgtcgagcggatcctgagcatcctgctttgcctgctgctgctggtccccgccggcctggtgacggtctggttgccggaggcggtcagggaatatggtgccatggtgaccgtcttcatcgcggcactgctggccgtgacggtgcgcgcagccttcatccagccgctgttcctgatctgcatgatgatccgctttcacgcgttgatcgagcaccagcccatcaattcgacctgggtcggctatctcgacggtctgtcagacaagttccggcagatcggacgttgagaccggcgcctggtcttgatcgcgcttcgtaacggagatgttcgttgaccgatatcacactcgataaccacggcgtccgtcttgctgcatctgtcgatggcccgacgaacggcgaaccgatcctgttcctgcacggcctgtcggtgagccgggacacatggcaggaaattggcggtcggctgaaggatcgatatcgggtctggaccttggatttccgcggccacggccactcggaccgggccgcaagctatgcgctcgccgactatgtttccgatgcagagacggcgttggccgccatcgggcgccgggcagtgatcgtcggccactcgctcggcggctgcgttgccggcgtgctggcgcagagcggcgataacaatgtgcgcgctgccttgcttgaggatccgccatggtatctcgggcagccgggggagtgggagaaatcggtcttcccgaagctgttctcgatcgtcagcgcgcggcaggcgacgtggcagcaagcccgtgcgccgctgggcacgtaccttgcgttcgtcacagacgcgccaacccccatgggcgggatcggccgcgatcatttcaccccccgtcatttgttgagccatgcctctgcgctgcagcgccaggacgggcggtgctgggcggacggagacgttgcgggttcggttcttgcggcgatccagaccacgcgagagttcctgtgtcccgtcaagatcgttcaagccgatccgtcatgcggcgcggccttgctggagggccacgcggctcgcctcgcacaggataatccgcgtgcagcgctcgttcgctatgagggatgcggccattcaccccaccgcgccatcgcgttcgagcagcgcttcacggcagacctgcaggatttcctgtcgagcctgcggtcacagtgagacggacgccatccggcacctcacgcgaaccgatgacggaaccatcgatgcaggaaacctccggctacgatccgagctatgtgatggggcgctcgactgcggagaccgacaggctgaagcgccagtcgcagctctacgatgcgtccacatggcagctcctgagggaggccgggctcgcgccgggcatgaaggtgctcgacgtcggaagtggagcaggcaacgtctcgttcgtggcggcaagtctggtcggcgagggaggcaaagtcgtcggtgtcgacagcaatcccgcgattgtcgcggaagcagcaggtaccgcgcgcgctctcggcctcgaccaggtgtcatttcgagccggcgacatcaacacgatcgagctggaacgcgacttcgatgcgatcgtcggccggctcgtgttgatctatgtgccggatccgtcagccctgcttcgcacgctgcttggacacctcaagcccggcggcatcgtggcatttcaggacctcgactggggcgaggggccgatcgccaatccgccgtcgccgctgctgtcgcaggcgtggggccacgtgagcgaaatgttccggcgggccgggctgaacaaccggatgggctttgcgctgcatggcgccttcgtcgccgccgggctgcctgcgccgcgaatgagcctgtttgctccggtcggcggcggcgcggacttcgacggctatgactacatggcaagcggcttgcgcagcaaccagccgcacatcgtcaagctcggcgtcgccaccgaagcagaactggcgctcgacagctttgccgagcgcctgcgcactgaggtggttgctgcgcacggcgtgttcgcgctgccgaccttcgtcggtgcctgggcgcgcaagcaggcgggctgaacccgccgcccgcttcagagattgccggccacagcgtcgatgaaggtcgcagccgactccttcagctgcttgcggctgtagccggcgcgctccatcacggcgaggccacgggtgaaggtcacgatgacgcgcgccagccggttggcatcggccatgcttggcttcgtctgagatgtgctgacggccttgctgatcagttgttcgagccgggagagcacatcctgcacgcgctgccgcacatccgcacttgaaatggccgcgtcgagcgccgtgcgcgtggtcaggcagccgcgcggcggagagccatccgtcatgttgatgatgatcatatcgaagaagcctcgtagccccgccgcggcgtcgccgcgtgacagcgcggcgccggccgcttccaggaattgcccggcatactgatcgaaggcgcgcaggaagatcgattccttgtcgccataggcgttgtagaggctgccgcgctggactcccgtggcggcggcgaggtcctgcatggtcgcgtcgtgcaggcccttgcgccagaatacgtcgagcgcggtcgtgatcacctcgtcttcgtcgaactgacgcacgcctaccattggttcgccccaccggatcattcttgacatcattgtcaagattgacgatcatgtcaagaatggttgcctgaggagatcgcgatgattaccgccgtcacgtcgttcagattgtccaaaccgatcacgcgcgaggaagcgcgcgccatcttcctcgataccgcaccgatctatcgcggcgtacaggggctgttccggaagacctatgtgctgtccgatgacggcacgacggccggcggcatctatttctggaactcgaggagagaggccgaagcgctgtacaccgatgcgtggcgcgcccgcgcccgggagaagtatggcgccgatccgacggtgacttatttcgagagtcccgtggtggtggacaacgttgcggagcagatcagctccgacggccgataggaaagcgccgtcgcgtcgactgataacggcggaactttcgaccatcgcccggcgatgcatcgtccgcgcatcatgcacggcgcatcggcttgtgctcggcgggcccacaaggctactctccctgcaagcaagaaaactgcaagggagccgtcacggtgaaccaacctccatcctcagatccggcactgccccgccgcaggctcggccgcaccgggctcgatgtttccattctcggcttcggcaccgcgccgctcggcgatctcttcgctcggctcgacgacacggtggcgattgccgcgatggagcgggcgtttgcgctgggcgtgaacctgctcgattcctcgccgctctacggccatggccttgccgagcatcgctgcggcaccgcgctgcggcgcgtggcgcgggccgacatcgtcgtctgcaccaaggtcggccgctggatggacccgttccacggccgcggcgacggctccaatttcgtcggcggccagccgcatcgtgcggtggtcgattactcctatgacggcaccatgcgctcggtggagcagtcgctgctgcggctcggcatcgatcgcatcgacttgctcctgatccacgacgtcgatgtctggacccatggcagtgaggcgatcgaagccaggttccgcgaggcgatggagggcgcctatgtcgcgctcgacaggctgcgcaccgagcgcgtgatcaagggcatcgggatcggcgtcaacgaggccgagatgtgcatgcgcttcgccagtgcgggaacgttcgacaccatgctgctcgccggccgctactcgctgctcgagcagccggcgctcaccgaattcctgccgctggcggagaagcagggcatcggcgtgatgctcggcggcgtgttcaattccggcatcctggcgaccggcgcggtcgccggcgccaagtataattacaaggacgcgccggcggatgtgatgcagaaggtggcagcgatcgagcgcgtttgccgcgcccacggcgtggcgctgccgaccgccgcgctgcatttcgcgctgggccatccggcggtcgcaagcgtcgtgctcggcgcgcaggcgccgcaggaggtcgagcgcaacgccgcggcgctctcggccccggtccccgccgtgctgtggcacgacctgaaagcggaggggctgctcgaccaacacgcgccggtgccggcatgatgcggatcgacgcccatcatcatgtgtggaccttggcgcgcgccgattatggctggctgacgcccgaacgcgggccgatctatcgcgacttcggtctggtcgatctggtgccgcatctcgccgcggccgccatcgagggcacgatcctggtgcaggcggcgccaaccgaggccgagacggcattcatgctcgacgtcgccaaaggctcggagctggtgcgcggcgtggtcggctggatcgacttcgatgcacccgatgccgctgaccggatcgatgcggtcgccgaacgcgagctgctggtcggtctgcggccgatggtgcaggacgtggccgacgatgactggctgctccgccctgaactggccgcgccgctcgaagccatggagcggcacgacctcgtcttcgacgcgttggtgctgccgcgccatctgccgcggctcgttcaggtggtcgatcgccatccggatctgcaattcgtactcgaccattgcggcaagccgcaactcgcaaccggcgacatcgcggcctggaaggacgacattgcaagccttggcgcacgatccaacgtcgtctgcaagctgtcgggccttgcgaccgaggcggcgccgggctggcaggtcgaagatttgcgcgaggcagtggatcatgcactcgcatgcttcggtccgcagcggctgctgtggggcagcgactggcccgtcgtcaatctcgccggcggctatgcgcactggttcgtggccgcccagcgtctgctggctgatttgtcaagtgacgcgagggctgcgattttcggcggcaatgcggcgcgggtctatttgtcaagccgcgggcggccggcatcccggaaatagggcgcgcggcgcgccaaatttgatccacagcgcgccttgctgaatcattccgggatggtccataagcggcgtccgcgccatcgctgatccggtggcgcaacggggtgagagagaaaagcgtggccaagatccatcatcagattgcgcaggagctgggggttcgcgacgagcaggtcgaggcggcggtgacgctgctcgacggcggcgccacggtgccgttcatcgcgcgataccgcaaggagctcaccggcgcgctcgatgacgcgcagctgcgcacgctggaagaacggctgacctatctgcgcgagctcgaggagcgccggaccgcggtgctcaattcgattcgcgagcagggcaagctcgatgccgcgctcgaagcccagatcatggccgccgacagcaagggccgtctggaagatatctatctgccgtacaagccgaagcgccgcaccaaggccgagatcgccaaagaagccgggctcgagccgctcgccgatcagcttctgacacagccgcagaacgaccccaacgaggttgccgcgccgttcgtcaacgccgaaaagcaggttgccgacgtcgccgctgcgctggacggcgcgcgcgccatcctggtcgagcgcttcgccgaggacgccgatttgatcggtgcgctgcgcgaagagatgtggtcgaacggcatcatggtttccaccgtccgcaccgggaagaagaccgaaggcgagaaattcaaggactatttcgatttctccgagccgctgccgaagctgccgtcgcaccgcatcctggcgctgttccgcggcgagaaggaagagatcctcgacctcacgatcaagccggaggccgaggcgccggccgtcggcgtgcccggcctctacgaactgcggatcatgaactgctttgcgatctccaaccaggggcgcaagggcgacaaatggctggcggagacggtgcgctgggcctggcgcaccaagatccagatccatctcaacatcgatttgcggctccggctgtggacggcggccgaaaccgaggcggtgcgcgtgttcgcctcgaacctgcgcgatctgctgctcgcggcgccggccggcccacgcgccaccatggggctcgatccgggctatcgcaccggcgtcaaggtcgcggtaatcgatgccaccggcaaggtggtggcgcataccgcgatcttcccgcacgagccgcaacggcgctgggacgaggcgctcgcgattctcggcaagctcgcgatcgagcatggcgtcgagctgatcgcgatcggcaacggcaccgcctcgcgtgaaaccgacaaactcgccgccgaactcgtgaagcggttgcccgaacgcaagatgaccaagatcgtggtctccgaagccggtgcgtcggtctattcggcctccgccttcgcctcgaacgaattgcccgacctcgacgtcaccattcgcggcgcggtctcgatcgcgcggcgcctgcaggatccgctggccgagctggtcaaaatcgatccgaaggcgatcggcgtcggccagtaccagcacgatctcggcgaggccaagctcgcgcgttcgctcgatgccgtggtggaggactgcgtgaacgcggtcggcgtcgatgccaacaccgcctcggtgccgctgctctcgcgcgtgtcgggtatcggcgctggactggcgcagagcatcgtgcagcaccgcgacgccaacggcccgttcaagtcgcgcaaggcgctgaaggacgtgccgcggctcgggccgaaggccttcgagcagtgcgccggcttcctgcgcatcagcaatggcgaggatccgctcgattcgtccggcgtgcatccggaagcctatccggtggtgcgccgcattcttgaggcgaccaagagcgatatcaaggcgctgatcggcaacgccgacgtcgtgcgcgggctgaagccgcaatccttcgtcgacgacacgttcggtctgccgacggtgaccgacatcctgcgcgagctggaaaagcccggtcgcgacccgcgtccggcgttcaaggcggcggtgttcaaggaaggcgtcgaggaggtcaaggacctcaagcaaggcatgatcctcgagggcaccgtgaccaacgtcgccgcgttcggcgcgttcgtcgatatcggcgtgcaccaggacggcctggtgcacatctcggcgatgtcgcgaactttcatcaaggacccgcgcgaggtggtgaagccgggcgatatcgtcaaggtcaaggttctcgatgtcgaggtcgcccgcaagcgcatcgcgctgaccttgcggcttgacgacgaggtcgggccgaagaaggacaacgcggcgccgtcgcgtgatttctcgcgcggatcggccaggatgacgtcgtcggcgccacgccgtccgcaggagcagtccggcggcggcggcgcgctcgccgacgcgctgcgccgcgccgccgagaagagcgggcgcggcaagccgacctgattgcaaagaggggcggcaagcggagctcgccacccgctcaccaccacagcttacccgccgcaaatctggcgagcgcgtcggtaacgcccttgccataggccggatcggccttgctgcaattggcatcgtgccgttcctggatgtgcttcgacgcgttgccgactgagatcaggcaagcccttcctcgaccagcgcttgtgccacggaaggcaactttctcattcggctgaaataggcctgaagccgctccggcacatcgatcccgtgcgcaggtgcccatttcagcgcccagaaaagatagggatcgggaatcgtcattcgatcgcctaacaggaaagcgttgtcgccgagttgctgcgcaagagaagcaaagtgcttggtcagcgtgccgcgagctcgttccttctcgagcgccggcaggttcttgaagaagggtcgcaagccgccgtggatctcggttgccatgaatgatacggcttccagcgcacgccagcgcgtgaggccctcctcggggagcagcgtgtcgctccggtgtgcgatgtaagccagaatagcaaggttctcggtcaatagcgttccgtcgtcgagttccagcgcgggcacgtatcccctcggattgatcgtcaggtaatcgcctccgtcctcggtccgcttgtcgcggttgacgccgatgagcttgtagggcagccgcgcttcgatcagcgcgatgtggtctgccaggctacaggcgccgggcgcgtagtagaggatcataatcgtctccaatgtttggtccaacttgttgaccaacagcagaggcgtgactatctcgtcaaacgcatatcttcaggaccaggtcatatgaatgtgcccatgtcggttgatgctcccgcaggttgccaatgggtgagcgaggttctcaaccaggtcggcgacaaatggacggtgcaggtcgtggtggcgcttcgtgaccggccacggcgcttcaacgacatcaagcgtcaggttgccggcatctcgcagcagatgctgacacgaacgctcaagacgcttgaacgcgacggtctggtcgtgcgcacggtccgctccagcacaccgccgcaggtggactatgcgttgaccgaggttggccgctcgctttcagggacggtacggcagctcgcggaatgggcggttgcgcatcgcgcaatcatccatgcaagccggcagcgatacgacacaagccgctagccgtggccggcgcccgcggtccgataggacgcctgttccgcaccgatcaaacgaaggcactcagaccggtgatgtcccggccgacgatcagcgactggatctcggccgtgccttcgtaggtgacgaggctttccatgtcgcacatgtgccgcatgacgtggaaatcgagcgtgatgccgttaccgccgaggacgtcgcgcgccatccggcacacgtcgcgtcccttgacgctgcaatagtacttggcgagcgcggccatcgtctcctccagcttgccgtcgtcgatcaagcggccaagccggatgcaatagagctgcatcgcggtgacgtcgccgagcatgttgacgaggatcgactggatcatctgcgacttggcgatcggcttgccgaactggatgcggcgctgtgcgtaggtcagggcgatgtcgtaggccgaaacggcatttccaagtgatgcccatgccaccgtgttgcgggtgcccatcagcaccctggcgcagtccttgaacgaattgcagttcttcaggcgggcctcctccgatacgcggcagtcggtgagagtgatgtcggcgttctgcaccatccgcagcgataccttgccgccgatcttggtcgccttgtagccggggttgtccttctccaccacgaaggccttgacctgcttgtcggcgacgtcgcgggcgtagaccacgatgtagtcgcaccagacggcattgcccggccagcgcttgcggccattgatcacccattcgtcgccttcacgcttggccgtggcttcgagcccgaccgaatccgatccatgatcgggctcggtcagggcgaacgcgccgactttctcgaaccgggccatctgcggcaggtagcgctgccgctgctcttcggaaccgagcaggttgatcgactgcatcgccaatccgagatgaacggcgaagaacgtcgcgatgctcgagtcgatccggctgagctccatcatgaccaggcccgcgccgaccgcggtcatcggccggcacccgtgtccgcgcatgttgtgatcgcccacgatgttcagcgccgcgatcttgggaaccagttcgaagggaaactcgccgcgctcccagtaggagttgacgatcggcagcacctcgcgctcgccgaattcgcgcactttggccaggatatcgatctcctccggcgtcagttgctctttcatcaggaaatagtcggtgccgcgcgcgcgtccgatgttgtcgctcagcttgtccgtgatggggtcggtcatgcgtttcctccttgattttatcggcgcccgcgtctccggatgcgccgccgtttcgatatcgcagcgcttcgatctccccgatcaggtgtgaggtatcgtctcgctgacgatacctcccgcctcgccctcggattcatagatgagcggtgcgccgcctcgacatctcccttgctgcccgctcacaccgctgttcccgatgcggcgtcgctacgactggttgcgccgcaagatcagacctgccaacgcggtcctggtggtgccgtttcttgttggtgcgtgctgcacgatgatcgatagatgagacgggtagagcgctttcgaaaaggcagacccacgttcgaccttgcaccggcatcgcaacggccgttcggcatactgcgtcaataacaattcggtcgcaaccagatagagcagtgcggagcgggcttggtcgttacgcaccgtccgtcgaatgcagcaagatcggacgtgacgttgagatcgggcaggctgccgaggtgcgaagcggacagccggaggtgcgaagcggacaagacgttgctccgcgcggcaagcggagccgcgcgtcggtgccaaatcacgttcggtcaaaagcacgcgatcgcgacgcgaggtctatcgccaatcctaaatccggcgtcagaatctggcgcatttgtcagttgaagtcggccgcacgcgcgcgtcttctgatgctcctctgcttgcggcgatacgaggttcgtcgcggtcccaatcacggaggacttcatgaagaacaagctcttcacgtttctcacggcggcgacgcttgctgtcagcgtcgcactttcacccgtagccctcgccaggggcggcggcggtggcggcggacatggcggcggcggtggtggtcacggcggcggctttggcggcggcatgcatggcggcttcggcggcggaatgcacggtggcggaatggcattcgccgcgatgggcggcggcgggcattttgccggcggacatttcggaggtggcccccgctttgcgggcgccggattccacggcgggcgcttcttccatcatggcggattcttccgccaccaccgctttcatcgcttcgcattcgtcggcgggccttatgtctatgcggattattacggcgggtgctggcgcaggacatggacctcttacggcctgcaatgggtcaatgtgtgcggggactattggtgatcgcccaaccaaccgcaccgttgtcgcggccgtcgccaggcgttccatccagccccggaatgggatagtctggcggcgaccgtcgcgggggctcggtagagtttgagaacccggagagttcaagcagatgaccggagctcaccgccgcattctcgtcgtcgaggacgatccggaaaccgcgggtcagctcgtcgaggagctcaccaccagcggctatgacgtggatctcgccgcgaacggccgcgaggcgctgagccagggcgcggcgcgcgactatgccgtcatcacgatcgatcgcatgctgcccgacatcgacggcatcaccgtgatgcgccagatgcgcgacgatggcatcgccgtgccgttcctgatcatcagcgcgctcggcgaggtcgacgaccgcgtgcgtggcctgcgtgccggcggtgacgattatctggtcaagccgttctcctttgtcgaactgctggcgcggctggaggcgctcggccgccgcagcgagaccgttgccaaggagaccatcctgcgggtcggcgatctggcggtcgatctgatcgcgcggacggcgagccgccgcggccgcaagattccgctgctgccgaaggagttccagctgctcgaatatctcgcgcgcaacgagggtcgcgtggtttcgcgcgccatgttgctgcagcatgtgtgggatctgcacttcgatccctcgaccaatatcatcgacgtctatgtcgggcgggtgcgccgcaaggtcgacgaccagcaagcctatccgctgatccacacgatccgcggcatcgggtactgcctccgtgctcctggctaagacccttgggtcatcgacgttccgcctggccctgatcgccatcggcatcttcggcctgatcgtgtccgcgatcttcgcctatgtctactggtcgacgctgtcctatgtacgcgacaggtccgaccgcgcgatcatgaccgagcaggtgagcctcgacggtgcctatgcgcggtccggccgcgagggtttgtccgcattgatcgcgcaatgcatcgctgacaaggactttgccgaccatgtgtatttgctggtcgacgccggatcggcagtgctggccggaaatctcggagtgtggccggcgcacaccggcgagcggggatggacggaatttcggacctcgccgccgcggctcgcttccggaaccgtgctggtgcgagccgtggccgagaccttgccgggcggtgaacggttgctggtcggccgcgatatcagcgatctcgacggcttcatggcgcagatcagggccgcagggatcgccgttgtggtgctgatcatcgggctggcggctgccgccagcatcggggtcacgcggcggacggtcggccgcatcgaatcgatcaatgcgaccagccgcgccatcatgctctccggcctcgaccagcgcatcccgctccgcggcagtcacgacgaatgggatcgcgttgccgagaatctcaatctgatgctggatcgcatccagaccctgatgggcgacgtcaagcaggtcagcgaaaacatcgcccatgacctgcgcacgccgctgacccggatgcgcggccggctggagaaggcctatcacgctccgcgcaacgtggaaggcgatgcggcgctgatcggcgacaccatcgccgatctcgacgcggtgctcgggatgttcgcatcgatcacgcggatctcggagatcgagacgcgggcccgcaagggcgcgtttcgcaccgtcaatctcgtcgagatcgcaggcgaggtggtcgagctgtacgacgccgcggccgaggaggtgaccaccgatctcgaccttgccggcgatcccgtggtgctggtcaccggcgaccgtgacctgctgttcgacgccatcgccaatctcgtcgacaacgcgatcaagcatggccgcccgggcggacgggtcaccgtgacctgcgataatgaccaaagcgggccgatgatttcagtcgccgatgatggccccggcattccggccgaccagcacgaccgcgtgttcaagcgcttctaccggctggagcagagccgctacacgccgggcaacgggctcggcctcagcctggtcgcggcggtcgcgagcctgcacggcgcacggatcgaactgcgcgacaacacgccggggttgttgttcaggctcgtgtttcccgcgacggaaacctagaacggtagggtggcgacggcggaggaactcctcgccgggtgcgtgccaccaaaatattgaaaaacaaccccatgcaaaggagctcgcggctgccggcgttggaccaggcaacgttcgactatgcagcttgacacgttgggcaaatcaggagtacttttctaatattcagaaattacgcaactgccgtcttgtaggcgccctcgccacacgagtggcgcgcagcgcgtcgcgagactgcatcagtcaccggccgtacaacatactcgccgtcgtcccggccttcgccgggacgacgcaacgggaagagccgtcgacactggatcaccccgcatgcgcggggtgatggcaccgcgttgtttgactcgttgagtcgaactatcccacatcgtcgtcctggcgaaggccaggacccattaccccaaatgagagttgttgcgtcacgctgggggccacggtcccgtttatcgtcaaatgcggtggttgtgggtcctcgcttttgccaggacgacgatggggagggagcagctcaaaaccgtgccgccatctccacgagccgcgcgtgcgcagcttcccgcgccgcgcggatcggctccgcgggcccggtggttgggccgatcggcacgaagcgaacgtcgttgatgccgatgaagcgcagcacttcgcgcagatagggcgttgccatgtcgatgcggccgcggttcatgccggtgacgaagtcgctgccgctcgcgaggatcacgaccgtcgggcggtccttgagcagcggcagatagccctgtgcgggatcgaagcgaaaggtcagcccgggctggatgatgacatcgagccactgcttgagcttatagggaatcgaaaaattccacatcggcgtcgagatcagcacgcgatcggccagcgacagccgcagcgccaggcgctcggcgacggcgaaggcgtcgtgctgggaattggtaaaggtcttgccgccgatccgggcatatttggcctcgagcaaataaccctcgaactccggcagcggctcgcgccagaggttcatcgcgtcgatctcccagtccgggcgcgccttgcggaaactctccataaagacgcgagcgccggccgccgattccgaatcggcgcggggagagcaggcaagatgcagcagcttcggcaccgcgcctcctcagccgagcgccttgatgacggtgtcggcgttggtcacgacggagacgttctggagcgcgaaattgatcgcggcgttgtgccagtcggcgttcatggtcgagcagcaatcctccggcacgatcatgaaatagcccttgtcggcgccggtccgcgcggtgtgctcgaccgacatgttggtccaggcgccggtgttgatgatcatgtcgcggccggttgccttcaggatggtttcgagccgcgtgccctcccaggcgctcatccgcatcttctcgaccacgaagtcgcccgggcgcggctcgaggcccgagaccggcgccgcgccccagctgccgcgcaccatcgccttgctgtcgaccagtccctcgaacagcggcgcgttcagcgtgacgccgggcgcgcctggctcgaccacgaaccagacatggatgatggcgacgccgcgcgcccgcgcagcatcggcgacgcggcgaacattctcgacgacatgctgctggcgggcatgcgccggcgcgccggactcggcgaatgcgccgccgtccatgatgacgtcgttctgcatgtcctggatgatcatcgcgcagcgctgcggatcgatctgcatctcgccggcggcgagattaggcgcgggcgtggacgacgatgtggtaccggcgccgccgcgcttgccgctcatgtaaggttcgttacgcggcccgaccttggtcgggatcgcatagaccgaatgagtcgcggtcagatagagcgtgcggaaatcggcgccgccccaggcaagattggcgaccagttcgggaaggcgaaccttgccgagcaggtcgccgccgggcgagtagacccagacgccgccgggcgcggtgacccagacgttgccgcgctggtcgcacttcatgccgtcgggcaggccgggctcgagctcggagcggataccggaggcgaacacgcgcggattgccgagcgcgccgtcggcaccgacgtcgaaggcgcggatcagcgcctgcacggtgtcgttgacgtaaaggatgcgctcgtcgggcgagaagcacagcccgttgggctggtcgaacagatagcggtcgaccagcagctttggtgcacctccgcccggcggcacgcgatagacaccctggaagccgagctggcgcggtcgttcgacaccatagaccggcatgcggccataccagggatcggagaaatagatcgcgcccgaggaatgaacgcagacgtcgttcgggctgttcagctcctggttctcgtaatgcgaggccagcacctcgcgccgaccgtcgggccgttcgcggatcagcgaggaggtcgcatgctcgcagacgatcagattgaggtcggcgtcataggtcatgccgttgcatttgttcgacggccgcttgacctcgaccacgccgcgccgcgcatcccagcgccggcgtacgtcgccgggcatgtcggagaacagcaggaagtgatcgaccggatgccagatcggcccctccgtgaaatcgaagccggtgccgacctggccgaccggcgcgtagggatcgatcaggtcttcgaactcgctgcgcagcgtgacatgcgtcatcgtgacaggccttcgcaattatgccgggaaccagttgcgttgcggcaggctctgcacgaccggcccgggcacctggtcatgcagccggccgaccaccatgcctccctcgatcttggcggggcgatcatgcaccggcagcagatagcgcgagctggagagcagcttcttgatcgcggccttctcggcgcgcttgctggtgccgtggttgccggtggtgcgcggctcggcgtcgtggatctcgttgaagggtgtgacgatctggtcgttgaaatcatagatcacgtcgccacagatcgtggcaatgccgtcagcggtgtggacgtgaatgttcatcgagccttcggtgtgggcgttggcggcgtcgcaatagacgccgggcatcagctcgaccgggccggtgatctcgaggtcgaggaagcgcagcgcgctcttggtatgcaggcggtcgatcaggtgcttgatgtcgggcgcgggatactgcggatgcatcaggccggagactgagtattccagctccttgcggttgacgacgacagtcgtgttcatcggaaacagatcgtccttgccggcatggtcgatgtgcagatgggtgtggcagacgaaacggacgtcgcccatgcgtacgccgtggcgggcgagctggttctcgatcatgttctcatggaactggagcccgcgcatcccgagcgtctccatgatctggttggagcggtagccggtgtcgaccagcacagggtagggcccgccgagaatcaggaagccgagcgtcaggacgcggcgggtgcggccgcaattgtgcccgagcacgaggaagctcgattccagctcgatatcgccatagtccagaatcttgatctccaacggcatcgctctccctccaaattcgtgttcgttgttgtgttcgtattcgcggtgcggctatggctccagccgatagacccgcgctgcggttgtgctgaagatcgcggcacgctgctcgcggctgagccgttcggcggccgccttgaatgcgtcgatgagatcgcggtagctggtccacagcttctcgatcggaaagttcgagccgaacaggcagcgctctgcgccgaagatcgcaaccgtatcggtcatgactccggcaatatgcgcggcatcgttgcggtggatgaaggtgccgagccctgacagcttcgacaccacgttggggcattgcgccagccgcgccatgccggcgcgccaagcggcgcggccttgcggtgacaggtcttccagcatgccggcgtgctgcaggatgaaggtcacgtcgggacaggctgcggcgaggcctgctgcgcctgccatctgcggcgcgaacacctgcaggtcaaaactccagccatagtcggcgaggtggccgacattgcgccggatcacgggatcgccgcagagatcgggccgtgccgcgaagcgatagagcgggttctcgtgccagtgcagctgcatgcgcaccccccgcaccagcggataacgcttcaaccgatccagttgcggccgcacgtcgtcgacggagaagtcggcataggcgacgagcgcgtgcggccagccatgttcgtccgcggtctgctgcacccaggccgcttcgtcctcgaactggccgttgggccaattggtctggacatagaccgagcgggtgacgccgctgcccttgagatcgtcgagatattcttggatcggatagtcgcggcggatcggctcgtaggggccgaagatgcgcggctgcatcgggccggacagccaggcgagatcggcctgacgccagatgtgatgatgtccgtcgacgattccagtcacgcagctctccttgttccgagcgacagcagatgcgcgaccacggccgcgctcgatccgccgtccacgagatcgtcgacaaagcgctggatcgcgatcagcgcctcggtttgcggcttgaagccggaggcggtcgcgagcggtgtcagccagctcacgcgccaggcccggcgcgacagttttgcgaccgcgtcgcgcaaggcggccggatcgccgcgctccaggccgtcggagacgatcacgaccgctgcgccgcgggcatatccgccgaaccgcggtaccgcgaggaacgcctgcaacgcgtcgccgatgcgggtgccgccgtcccagtcgctcaccaggaacgaggctgcgttcagcgcctgctcgcgccgtttcagccgcagcgccggcgtcacgcgggtcagccgcgtgccgaaggtgaacacctcgacattgccggctgcctgcaccagtgcatgcgcgagccgcatgttctcctcggtgcgtgccttcatcgagccggagacgtcgatcaggaacaggatcttgcgtgggcgctggcggcggcgcatccgtcccagtcgcagcacctcgccgtcattgcgcacgctgtcgcgcagcgtgcgacgcagatcggcgaacggaccgctgcgggcacggcgtcgccggtggccgcgccgccgcggcaatcgtcgtgcggcttcgcgcgacagttttcgcagcggatcgctggtcggaacttgcgcaaagcggcgctcgaccagcgcttcggcccgcgccgcggcgaggccggattcgttggcttcgtcggcgagcggcggctcgtcctcgccgcggccttcctcctggaggcggacggtctcctcgtcctcgccttcggcctgctcgatcgcctcagcgccgcggaaatggatgtcgaacagccggtcgtatgtcgcgcgacgctccggcggtggcgccagcgtggcaagtccggcccggcggatgtgctccaggctccgagggccgagcagctcaatcgcagccaggaagctcgtcgtctgctccggcgcaaccgagaagccgttggcgcgcagcagcgcgacaaaggagacgaagatatgcgccgcgcgcggcagctggaggtcgtcgctcacgccgccgcctccgcgatgatcgcatcgagccgcggcgagatgaaatgcagatcctcctcatccttcagcgcaacgccgatcgaacgcttgaacgcgtcgggccagcgtgcgccgcccttgttgagcaacgtcgcggcttccgcccagtcgaccgcctcggcaatgcccggggccttgctcagcggctcgcggcgcagccggccgaccgcggcgaccacggcgcgagctgtggcttcggcgacgctggaggcccgcatcatcacgatccgcgcctcgcgctcggcattcggataatcgatccagtggtacacacaacgtcgccgcagcgcctcgtgcaggtcgcgggtccggttcgaggtcagcaccaccacaggatgctcggcggcgcggatcgtgccgcgttccgggatcgagatctggaagtcggacaggaattcgagcaggaaggcctcgaactcctggtcggcgcgatcgatttcgtcgatcaagagcacggtcgcatcaggcgcgcgcagtgccgcgagcattgggcgttcgatcaggaacgactcgccatagatgtcgatgctctcctcgccggcctgccggatcgccagcatctggcgcggatagttccactcatagagtgccgccgcggcgtcgatgccttcatagcattgcagccggatcagcctgcggccgagcacggcagcgatcgctttcgccgcctcggtcttgccgacgcccggcgcgccctcgagcagcaacggcttgccgagcgcgagcgagagataggaggccgttgcgatgccgtcgtcggcaaggtaataggccgcccgcagcgccttctccagcgcctcggggctgtcgatgccgacaatgttgctgcggaccggcatggaaaacctcagcgccgcggctgcggccgcgcgccgccctgcgccctgatcgcgcgcagcaccttttccggcgtaatcggcagatcatcgatccgcacgccgaccgcgttgaagatcgcgttggcgaccgcaggcagcaccggattggcgcacatctcgcccggtcccttggcgccgaacgggccgtccggcgcagggcgttccagcaccgcgatgtcgtgcgggcagatgtcgcctggccccggcatcagatactcgacgaagtcacgcggcccgtgcaccggctccggataataaggctccggcgtctcatagagcgcgtggctgacacccatccaggcgccgccgaccagctgctgctcgaccagccgcggattgagcgcgcggccgagctcataggccgagtccatcctgaccatgtcgacctcgccggtctcgtcgtcgacctcaacctcggcgaccaggcaggcatgcgcatagcaagtcgccggcgacatctcgccggtctcgggatcgacgtcggacagcggcaccaggaagatgccgcggccggagatggtcttgccctgcttgaactgagctgcgatcgcgacgtccttggtcgagatcgagcggtgcggcgcgcccttgacgtggatgttgccgcggccgtcggtctcgaggtcggcggcattcacctccagctcctcggcggccgcctccatcatcacgccgcgcgcctcccgcgccgccgccatcacggcgttgccgacgcgatgggtgccgcgcgaggcaaacgagcccatgcagtgcgggcccgtgtcggaatccgcagtgtcgacatagacgtcctcgaccgggacgccgagcgtctcggcgcagatctgccgcgtcaccgacttcatgccctggccgagatcgatcgaggacaacgccacggtgaacttgccgctcgggttggagtgcaccagcgcctggctcggatcgccgccgagattcatgccgatgggataattgaccgatgcgatgccgcgtccgcgatgccttgtcatggtcagcgcctcctggtgccgaagacggaagagaagcgggtggcgccatgcgacggcgcgctcggccgcggtggcggaggagatggtggtggcggcgacggcggtggtggcggcggctcgcgggtcgcggccggcgctcggtcatacgtcgtgcgctgctgggacggcacggcgggcggcgcatgcgtctcgcgcggggtcggcgtcaccgcagcgcgggcgccgccgccgtccttgcgcgacgacatccgcttgaagtcctcgcgaagcggccatttggccttctcggcggcaacttgcacgcattcgatcagcgcggtgttcttggcctcgcggcggtgcgccttcatgtcgccgtcgcgatacgcattgaggatccggatttccatcgggtccatgccgacgagatgggccagcttgtccatctggcattcgatcgcgaaatccatcgccgtgacgccgaagccgcgcatcgcggtcgccggcgtgcggttggtgaagacgcaatagacgtcgccgtggacgttcgggatggtgtaggggccgggcagatgcgcggcgcatttcaccgccgcatagctcgacagccgcgtataggcgccgctgtcgaaataggcccgcacctttcgggcgacgacgcggccgtcgcgcatcacgccgtccttgatgtagatgcgttcggcgccgcgcggcgggccgtactgcatctcctcctcgcgcccgaacacgtagcgcaccggacgtccggtcagcatcgcgccgaggatgcagagcggctcggtcagcgtatcgaccttgccgccgaagccgccgcccaccgtaccgccgatgaagtggaaggtgtttgacggcacgtcgaggatcttggcgcaggtatcgaccgagaagaacagcgcctgcgtcgaggtgtagacgatgtaacggccgttggtgtcgggtgcggcgatcgagccgttggtctcggtcggggcatgttcgatcggcgacatctggtagcgctgctccagcacgtggtcggccgttgcgaacgcccggtcggcgtcgccgaagcgaagctgctggcgatcataggtctcgtgataggtgaaggtgttcttgggataaacctcgttgaccacgggcgcgcccggcttcagcgcctcctcgacgtcgaacacggccggcagcacctcatagtcgatcttgactttcgcgatcgcctcataggcctcgcgcgggctgtcggcgacgatggcgacgatcggctcgcccttgtaacgaaccttgtcgaccgcgagcgacggctcgtcgtccttgccgaaattaatcaggctgagcagcgtgttcagattgcgcggcacgtcggaggcgcggatcacccgccgcacgccctgcgagcgctcggcctcggaagtgtcgatgcggcgcagccgcgcgtgcggatgcgcgctgcggaccaccttcagatgcagcatgccctgcagcttgtgatcgtcgaaatagggcgaggtgccggtgacatggccgagcatgtcctggcgctgcgtgcccttgccgatttccttgagattgtcgtcgcgttcgtcggcgaagatatccttgcgcagttccagcatggcactgttcccttacgcgcgcgcccggccgccggatgcggcagccagcacggcgttgatgatcggctcatagccggtgcagcggcagatattgccggagatcgcctcgaccacctcggcacggctcggctgcggattgcgatcgagcagcgctttcgcggccatcagcatgcccggcgtgcaatagccgcactgcgcggcgaaattgtcggcgaaggcgcgctgcaacggatgcagattggggccgtccttgatgccgtcgagcgtctccaccgaacggccggcgaccgtctcggcgagcgtcaggcaggatagatgcaattcgccgtcgatcagcacgctgcaggtgccgcagccgccctggccgcagccgaatttcggcgtcatgtcgccgatcagctcgcgcagcgcgaccagcaggttggtgccgccatcgacgaagatcgcgacgtcgcggccgttgtggcggaattgaagtggggtcttggccatgcgttctattcctgaccggacagcaggcgcttgagatgtacgccgacgatctcgcggcgataccaggcgctggcgagcgcattgtcgccgggcgacgtgccctcgacggcggccgcggcggcggcgccgatcgtggaagcatccagcgggcggccttccagagctcgctcggcggcgcgggcgcggatcggcgtcggcgccatcgagccgagcgcgacacgggggccgacgatgcggctgccgttgaccggcagatgcgccgccagcgtgatgacagcgccgcccttgggcttgatccgcgcgatcttgcggtaacggaacgcatcggcgcttccaggttttacgaacgagatcgccagaaccagcacaccggtctggcggtcgcgcgattgcaggaattcctcgatcggaatctcgcggccgccgaggccgccctgcaccgataccatggcgtcgagcgcgagcatcgcgaccgtgaagtcgccatatggcaccggtgcgaacagattgccgccgaccgtgcccatgttgcgcactgcaggtccgccgatcgagcgggcgggggcgtgcaggaagccgagatcgcgttccgccaggatgcgggcgaaggtgacgccggcgccgagcgtgatgcgcgagcctgtagcgtcgatccgcgtcatcgcatggtcgctggcgcgcacgattgtcgagatcgagatgtcgccctcgttcagcgcccgcatcaccagcgtgccgccgccgagatagcgggcgctgtgatccgacgacagcgccgccgcggcgtcatggctgctggtgaaggtcttcaccgtgactggcatgatgtcctacccgcttacgcggcctccttcagatgccggcggatggcctcgaagccggcctggtagatgtcttccgaaaccatctgcgtgatgcgatcccggtcttcggtccgcgtcgtgaagcgcgattcccagtgccagaaagtgcggttgccgtcggtgactggcagcaggcggacatgcgccacgtagttgaacatcgggatcggcgtatcgagcaggcagtagctgaacgattgttcgagatcggagagcgccagcagctgctcgcgcagctcggcgccgtcctgcagcttgaagcgcctgacgcagccgatcttgtcggatggctgcgcgcgctcgatgccgctgctcgcgaccgccgggtgccagcggtcgtggccgttgaaatcgcgcagcacggcccacaccgcatcggtcggtgcatccaggatcgtgcttttgacgatgtgcggcacggtcaaagtccagtgtctgcgagtttgatggagctatccgcgaacctcacctctccccatcggggagaggtcggcgcgcagcgccgggtgagggggctcaggtcccgcgagagaccgtaacccctcacccggatcgcatcttgcgatgcgatccgacctctcccacagggggagaggtggaccgtctgcgtcgcgatagctggacgatacatatcgctatcctccgaacgcccgcttcagcgcgtcgaagccgccctggaacacgccgccgccgatgttgttgacgagctcggcctcgcgctccggcgcgcagtcgaactccgcggtccattccaggaaggtctggtcgccgtcggtgaccggcgtcagccgcagggttgcgacatagttctcgacgcccatcggggattccaggatcgagtaggtgcagaacatgtcgtagtcggacagcccgagcagcttctcccggatgcgatcgccgttgcgcaggcggaaatccctgacgcagccgatcttgtcggagggctcgccgccttcgatccggctttccgcgatcgccggatgccagttcggcagcccgttgaaatcacggacccgggcccaaacccggtcgttgcgggcgttgacgacggtggagacgtaaacccgtgccatggcgtgcgctcagtccttcttgcgcggcgtgcgctcgggccgcggctcgccgccgccctcgggcgccgccggcttggcgtcagcgccgcccttgcgcgcggagtccttgatgccctgcatgtcgcgggcctcgcggatcaggccgggcatcttggcgaggctgccgccctcgacaccgatatcggacaggatcgagtcgatcagcggcgcctgcacgcggtagcgcagcgccgagtcgatcacctcgtcggtggcgctgcggccgttgccgccgccattgccgttgccgttgaggccgtcgacctggaggatgcggatgccctcgatcttctccatcggcttgacgctttcgcgcacgatgccctcgatccggtcgagcagcttgcggcggaacagcgagtagcgcgcctggtcggtgagcacgttctcggcctcgttgagcaggcgctgcgcctcggcctcgaccgcggcgcgaacccgttcggcatcggcagcaatcttggtctcctcggcctgcttctcggccagcagcacctcgacggtcttgcgtcgtttcgcgatctcgctctcgcgcgccgtgacgacgcgctcggccgcttccgtggcgcggatccgggcgtcttcggctgcagcgcgcgccgcggattcctccagcgacttctgatgcagcgcaatcgccttctccatcagcgcggtctcgacgtccttctcgcggttgacctcgagcttgcgcagctcgcgctcgcggccgaccctcgcctcgtcgaggccgcggtccgaggcgatgcgggcgcgctcgacttcctcacgcgcagcgatctcggcctcctgcagcgactggttgcgggcgacctcgagctgctcgatcgcccggcgccgttcgatccgggcggcctccagcgcctgctcgcgcgaaacgtccgtcgtgtcgatgtccttgcgcgccacgatctcggcctgacggacctgccggtcggcatcgatccgctcggagcgcttggcggcgagcgcgatcacgcgctcctcgtcggcgagctcgatcgccttcttctggtcgatgttgagcacttcgcgggttcgcgacgaggcgattcgctcgctctccagcgccagctcgacatcgatgcgctgccgctcgacggcgtcgcggcgcttcagctcggcggcctcgatcgccccggtgcgttcgatctcgagcccgcgggtctcccgctcggcgcggatgcgctgtgcagcgaccgacttctcctgcgagatccgtgccgcctcgatcgcctcgcgcgaagcgatgtcggcttcctcgatcgcgcgggtgcgggcgatttcgagtgcccggacgtgctcctcctgggcgatccgggatgcttcggtggcttcgcgcgcgctgatcccggcgatctcgacggcctggttgcgctcgatctcgagcttgcgcgtggtgtggtcggcggcgatgcgctcggcggccagcgtcttctccctgacgatccgggcggcctcgaccgccttctgcgcctcgatctcggcttcctggatggtgcgcacctgctggatctccagcgcgcgggtgcgttcgtcggaggagatgcgctcgacgttgaccgtcatggtctgggcgatgcgcgccttctcggtggcctcgcgggccgcgatctcggcttcgtcgaccgcgcgggtgcgctcgatttcgcggcggcgggtctcctcctcattggcgatgcgggcatcggtgacgacgcggtcctgctggattcgggccttctcgatcgcctcgcgggcggcgatctcggcttcctcgatcgtgcgcatccgctcgatctcgcgctggcgcacttcgcgctccgatgcgatccgcgtggtatcgaccgagcgctggttggcgatccggaccctttcgatctcttcgcgggccagtagctccttctcctcgacggcgcgggtccgctcgatctccttgtgccttgtctcgcgctccgaggcgatccgggcttcggtgatcgcctgctcgttggcgatgcgagctttctcgatggcttcgcgcgcggtgatctgggcctgttcggcttcggtctcgcgcagtgcacgctcgcgggcgacttcggtgcgctgcagggcacggcgcatctcgatgtcgcgctcctgctcgaggcgggcggtctcgctctcgcgctcgatctccagtgcctgccgttcggcctccagattgcgggagcggatcttgatcatcgagtcctgctcgatgtcgttgcgcagcttgcgcttggcctcgatgtcctccatcaggcgggtcaaaccttcggcatcgaaccggttcgaggggttgaaatattcgagatcggtctggtcgaggtcggtgatcgcgaccgactcgagctcgaggccgttttgcgccagcgcttccgctgcattggccttgacgcgggcgacatagtcgccgcgctgctcgtgcatctgctccatcgtcatctctgatgcgaccgagcggatcgcggagatgaacttgccggagagcagggtgtgcagctgctccggctccatggtgcggcggccgagcgtcgcggcggcgatcgagacagcttcgcgggtcggctggacgcggacatagaaatcggcctcgatgtcgacgcgcatgcggtcgcgggtgatcacggcatcctgccgggagcgcacgatccccatcggcagcacgttcatgttgaccggcgtatagtcgtggatgaacggcagcacgaaggcgccgccattgatcaccacccgctcacccatgaaaccggtgcggacgaaggagacctccttcgacgagcggtgatacagccagttcacgacgtagacgatgatgacgatcgcgacgatcgcgacgatgagccagaggatcaattcaccgaccagcatccccgacatctcttcctcccttggtcacggcggctctagcgcgcgccgatcgccttgaatttccgaacctgctccgtcagcgcccgctcgaccggcaggcgctccatcgaggaggcgccgtagaagccgtggcaattgcgggtctgcttcatgatgaaatcggcatccgcgggatccgcgatcggaccgccatgcgcgagcacgatgatgttggaattgacgctgagcgcggcctcggcccaggcctcgatgcgggcgggacaatcttcgagcttcagcgcagtctgggcgccgatcgtgccgccggtggtcaaacccatatggcagacgatgatgtcggcgccagcgatcgccatcgcggtcgcttcctgctcgctgaacacatagggcgtggtcagcatgttcttgtcatgcgccttcgcgatcatgtcgatctcgagcgcgtaggacatgccggtttcttcgagattggcgcggaagatgccgtcgatcagcccgacggtcgggaagttctgcacgccggcaaagccgagcgctttcagctggtcgaggaacaggtccatgtcgcggaacgggtcggtgccgttgacacccgcgagcaccggcgtgttggtcacgaccggcagcacttcggcggccatctcgacgacgatcgcgttggcgtcaccgtagggcatcagtccggcgagcgagccgcggccggccatgcggtagcgaccggaattgtagatcacgatcaggtcgacgccgccggcctcctcgcatttcgctgacaggccggtgccggcgccgccgccgacgatcggctcgccgcgtgcgatcatggcgtgaaacttcttcaacagcgcaccgcgttcaaacctgggcatgggtcacctcgccactctgcgccggccaccggcgcgtccgagcagcggacggaacgcgctgacgatggcggcggtgaactcgggatcgttgatgttgcgcttgacgcggatgatctggcggttgccggtctggcgtaccgtgcgctccagcgtgcggaacagcgcggcgtccgcatccgggtcccagaacggctggccgggcgcgtcgagcgccgagacgccgccctcgggcagcaagaagcgcaccggcccgtccatctggttgaggcgttcgccgatccagcggcccatccgctcgttctcttccggcgtggtccgcatcaaggtgacctgcggattatggacgtggaacttgcgctgccggtagcgctccgggatggtgtccgtcgcgccgaagttcaccatgtccagcgcgccgaccgagccgacatacggcacgcggctgcggatgatggcgccgaaacggtcctcggtggccgggaacacgccgcccatcaggaggtcgcagacctcggtcgtggtgaggtcgatcacgccggcgagctggccggactcgaccagcttctccatcgagcggccgccgacgccggtggcgtggaacacgagacactcgaaatcctcgcgcaggtcggccgcgatcttctgcaccgccggcgtggtgacgccgaacatggtgatgccgatcgcgggcaggctggcgctcgtctcgcgctgcttgccggcctggtcgtcgagccgtgccttgaccatgccgaccagcgcatgggcgccgttgccgagcacggcgcgcgagatcgagttgaggccctgcacgtcggtgaccgagtacatcatggtgatgtcggcgggcccgacataggggccgacgtcgccggatgcgaccgaggaaatgatgagcttgggcacgccgaccggcagcgcccgcatgccgggcgcgaccagcgacgcgccgcccgagccgcccgcggaaatgatgccggcgatattgccctggcgccgcaaccagcgttcgaacgcttccgccatcgccgtcaccgaagcgccgcgatcggcgccgaacacgcccgagccgccgcgaccgtggttcagcgcgatctcctgcgcggtgacgtcgcagctcgctgctcttccgctggtcgagacatcgaccagtcgggtgcgcaggccgctacccgcgatgatatcgcggatgaagcgcagctcggcgcccttggtgtcgagcgtgccgaccaccagcacgacaggcggccccgacattcgggatgccgtcggttcgcgccgctggcgggtggcctcttcgagccgggtgacaccggtggactgcgtccgcgcggcggcttcgatgcgggcgatcggcaccggctgcgaccaacgcgtcggcggcaccagattggaaacatagatgcggagcggccccttacgttccggttgcggcgtgccggcagcttcggccttcgccggagccgctccggcgtcggtctcatccgtgccgtgggtgccgacgccgagcagccgctgctgcagctcgcggtcggtggcgaggcgggcggaatcgatgatgcggttgatccggccattgaccatgatggcgacgttgcgcgataccgccgtcgccacgccgatgttctgctcgatgaccaggacggagatgtcgccttcatcgccgaggcgcagcagcatatcttcgacctgtgcaacgatcacaggcgcaagcccctcggtcggctcgtccatgatcagcagatgcgggttggtgagcagcgcgcgcgagatcgcgagcatctgctgctcgccgccggagagctggttgccgccattgttcttgcgctcggcgaggcgcgggaagatgtcgtagatgcgctcgatggtccaggcgccgcggcgcaggccgccggcgagcgcaaggtgttcgtcgacggtcagcgagcgccacagccgccggccctgcggcacatagccgacgccgagccgggcgatccgcgccggattgagccgcgcgacctcctcaccgcgaatccggatcgagccgccgctggcgcgcaccagtcccatgatggccttgcacagcgtggtcttgcccatgccgttgcgtccgaccaccgagaatacgccggtgtcgagtgtgagatcgacgccctgcagcgcatgcgaatggccgtaatagacgtcgaggcccttcacctcgagcgcgggcgcggcgcggcggtcattcatggccgcctccgaggtaaagctcctgcacctcgggatcggattcgatctcgcgcggcaggccttccttgaagatgcggccgttgtgcatcatcgtcacgctctcgacgacgcgcagcgcaacgtccatatcgtgctcgatgatgatgtagccgatatgtgccggcagcgaggtcaggatctcgatcagctcgcgccgctcggtcggcgacagccccgccgccggctcgtcgaacaggatgaagcgcggcgcgccggccagcgccagcgcgatctcgagctgccgctgctggccgtgcgccagctcggcgacgcgctggtccttcacgcccgcgagatgcaccgcctgcaccagcgtctcggtcgcgtgcatcagcgcatcgttctgcccggggcgcagcaacgagaaccggccgcgcgagacaccgcggcaggcgaggtagacgttgtcctgcaccgtgaggccggggaatagcgccgagatctggtaggtgcggcgcaggccgcggcggatgcgctcatagggcgggaactgggtgatgtcctcgccgaagaagcggatcgtgccggaggagggcgggaagtcgccggtgatgcagttgaacagcgtggtcttgccggcgccgttggagccgagcaccgcacggcgttcgccaggccgcaccgtgatggtgacgtcggtcagcgccgccagcgcgccgaacagccgggtcacgccgcgcagctccagcgccgcgccggcgccgacgacggacagccgctgcgcgacgctatccatggcggcctccgcctgaacctcgtgtcgaggaggcgttgcggcgccgccagcgttcccacagcccgatcacgccgtcggacgaccagaacacgatggcgaggaagccgagcccgatcagcagccggaagcggttgccgtcgagcccgaacttgatcagcacgtcgagcgcgaaggtacgcagcaggacgaagatcagcgcgccgatgaacgggccgatcggccgtgtgatgccgccgacaacggcgatgatcagcacgtcgatgcaggcgccgacgctgaccgagccgggcgagatctgccggtagttccagacctgcagcacgccgccgagcgccgcgatgaaggccgcgaaggcgtaggccgcgatgcggtgggcattggggttgaagccgagcgcccccatccggcggggattgtcgcggacgccctgcagcgcgaggccgaacggcgcgcgcgagacatactggacggcaaagtaggagatcgcggcgacgccgagcgtcacatagtagaaggcgatgtcgctgcgccagtcgacgccccagaaatgcggcgtcgccacggtgttgatgccggtgtggccgttgaagatcgcccagttctggttggtgaaatagtagaacgcagcgccgatcgcgagcgtgatcatgatggtgtagatgccctcggtgcgcaccgcgagcgcgccgccgagcgtgccgaacagcgtcgccagcgccagcgccatcggggttgccagccaccacggccagcccaggctgatattggcgttgccgctcacgccgaacaccgcgaccatgtagccggcgaagcccgcgatggtgagctgcatcaggctgaccatgccgccatagccggcgaggaacatcaggctgagggcgatgacgccgaggatcagcgtggtggcgaagatctcgatcaggaagaagccgttggcgatcagcggcatgatcacgaggatcagcgcgaccagccaggccacgggattctggaattccggccaggtgcggagcagggcgcggcgggtcgcgttgccggatcggtcggtgcggaactgggtgctctgcagcaatgacatctcatcgcctcgcgagcaggccctgcggccgcagcgccagcaccagcaccatgatcaggaaggtgacgacgatggcgtaggtcgggatgtagaccgagccgagctgctcggcgaggccgatgatgacggcgccgagcgcggcccccgggatcgagcccatgccgccgacgatgacgaccacgagggaggcgagcaggaagcgggtatcctcgcccggcgacagcgactggaaggtgccgccgaccacgccggcgatgccggcgagacccgcgccgagcgcgaacaccagcacgaacaccagctggatccgcactccggtcgcggccaggatgtcgcggtcgtcgaccccggcgcgcacgatcatgccgatccgcgtccggttcagcgccagccacatcgcgatcccgatcacgacggaggcggcgaagatcaccagccgcaccagcggatattgcagatagaccggctcgccggaggatttgatcgcggtcagcagcggcagctgcaccgggccgatcagccagctcggggtctggacctggtagaagtcgccgccgaacacccacagcatcagatcggcgaacacgatcgagagcccgatcgtgaccatggtctgccggaggtcctggccctccatgcggcggaacacggcaagctgcaggatcacgccgaccagcgccaccgcgatgaaggcaatgatgaaggcgagaatccacgatccggtccagctgctgatggcgtagccgatatagccgccgaacagatagagcgagccgtgcgcgaggttgacgttgcgcatcaggccgaagatcagcgtgaagccgctggccaccaggaagtagagcccaccgagcgtgatgccgttcagcaccgcattgaggaacacgcgcttgcgcccgatcgcggcttcaagtcccggcggccagatcgcgaacaccaaccacgccagcaccgcgaccgcgattatcacgatcagcgcccaggccggatggcgttcgatgaacctggccatgtcagtcgcgttccctcagtcggtcgcgaccgtctggcgggccgcgtgtccttgcatcctaccgagggcaaaagcggaggatttgatcgagagtatcttttatcgtccggtgcggaactcgctcacggccgcaacaccttggcggcgcggcgatagtcggtcggggccatgccgacattggcggcgaagaagcgagtgaaaccgctctgcgaggagaagccgagatcgaagccgatatcggcgatcggcgcttcggtcgcgaccagcgcgtcgagcgcctgctccatgatcagcgtgttcatgtagaggtgaggggtgacgccggtttgggtccggaacagccgatagaaatgcggtcgcgacagcccggcctcgcgcgcgatcgcgtcgagctcgatctcggcgccggggctttcggacatcagcctgatcgatttacggacgcggaaatcggtcaccgcggcggcggcgggggcgccatcggccgcctgccagctctcctcgtagcaggagtcgatcagctgccggagctcgcaatcgaggctgcgtagcgatggcgcgccgcacaccagtgctgcggtgcggcggatcaatcggtcgagcgcctcggtgcgcggaaagaaggtgcggccgaagcgcaggccctgcacattggcaggctgcggcgtgaaccattcggcgttgacatagagcacgaagaagatcgcgccgtggtccatgtcggtcggcaggaaattgtgcggttcccacggattgaccgcaaccacggtgtcgtccttgagcagcaggcgctgctccgagacgtcgatctgcgccggcgtcccgccgacatgaaagatcaggtgcccttcgcggtgcgcgtgcacgttgaaggggcggttcagctgatagaccgtcgcgcgaccgaaccggccgtggaagacggcaagcgccctgctcatgcctcccctcccgcgggatgttcttgtcttttcgacaagcgttcatcatccgcccgcggaaagcaagggcgagcagggccttcgatgcaactgcgcgcctgcgtcacggctggcttgctcgcacctgcaacaaatacgtcagtacttcttgcactccggaaccgtgcggctcggcaggccgatcttggcgaaaacagccggatcgtagcccagcgtctggttgacgttcgggatcaccttcacgaccttggagaacagcgcgcccttgccgtcgtcgaccacctcggtgacgaaattggtgccgatcgcctggcggttggcatcgagcttgatcttgccgttcggtgcgtcgatctcgatcttggccagcgcgtccttcagcttggcctggttgttggagagatcgccattgacctgccgcagcgccaggatcagcgccatggtcgagccgtaatagttggtggcgagcagcgacggactcgggaagcgtttgctctccgggaacgagtcctgataggccttcacgaacttctgccagcccggatcctcccaggtatcggcctggccgctcgcggcgatggtgccgaccagcgcgttcttggcgctgcccttcgacgacaggatggtctgatcgatcatgatcgagccgcccatcagatgcgccttgccgccggcctgctggtactggttgaggaagttgaccgcgtcggcgccgccgaggccgagatagatcgcatcgacatcgtcgggcagcgcggcgatgacggaggcgaagtccttggtgccgagcggcacccattgccggttggtgacctggccgccggcgccgcagaattccagcaccaggccgaacacctgcgtgtagatgaaggagtaatcctcgccgacggtcgcgatcttgcgatagcccttggtctcataggcgtatttgccgaggccgacctgccactgcgcaccgtccatgttgtagcggaagaagttcggcgccggatcgacataggtcgtctcctgcgcgccggaagcggcattgacgaaggtcagctccggatgggtcttggcaaaattcttcaccgcgatgccttcgtcgccggacagcggcgacagcaggatctgcaccttgtcctgctcgatcagcttgcgcaccgcgcgcaccgcggagtccggcgtcgcgtcggtcgaggcgacgacgaattcgagctccttgtcgccgatcttcttgccgagcacgttgagcgcggtctggaagccgcgcatgccgtcctcgccgagcacggtataggtgccttcgagcgttgcggtgacgccgaccttgatcttctcctgggcgaacgccgtgcctgaaagcaacaggctgctcaacgcaatcagtcccaaactgcccttcaacatcgttctcctccctctgtgttgtcgccggcgtccatctggcctgacggagatgggcgtccggttgttggcggcaaagctagccgacaggaggcgcggcgcggatgtcgtcgcggcggggtggcttaacgggcagtctcattttgattgttgcgccgcaacgagcttcgcggcgcaatgtcgcggagttttgttcggtgtcgtcttgttcgatgtcatcacccgcgaaagcgaaagcggtgatccagtattccagaggccgtagtgcttgagctgagaggccgcggcgtactggatcgcccggctcttgagccgggcgatgacagctgcggcgtcgacacacttcgcgctctcgcaactcagagggacgggcgctcacgccagccccaatccaccattgtcacttcgtcgtgtagccgccgttgaccagaattgtctggccggtcatccaccagccctccgacaccagcaagcgaatccagggcacgatatccttgatgtcggtgaggccggttttcgagaagccggacagcgccgctgccgatttgtgataggcgaccgcgtcggcgccttcggccggatagaagaacggcgtgtccatcgggccggggccgatcgcagtgaccgagatgccgcgtgcgccgaattctttcgaggccgcgcgggtgaaatgctcgaccggcgccttggtgccggcataggcagcgtagaacggcgtgtaggcgccgagcagcgacgttaccagcgtgcagattttgccgttgtcgttcacgtgacggccggcttccttgaggaagaagaatgcagacttggcgttgaccgcgctcatcgcgtcgtattccgcctccgagatctcgaccatcggcttcttcaacaccttgccgacggtgttgattgcgatgtcgggacggccgatcgcggcgacggcgtcagtgaacagcttctccatcgcgcccgctgtcgtgaggttggcctgcaaggcgaccgcgttggcgccggcagccttgatcgcggtgacggtcgcgtcggcatcggccttggttgcagcgctgttgtaatggatcgcgatcgccttcgcgccgtgggccgcgagatcgcgcgcgatcaggccgccgagattcttggcgccgccggcgatgatgacggtcttgtccttgatgctgtggtcggtcatgacgtcgcttctccagatcgtgcggccacgccctacggccgctttctggaggcaacgatatcgtctaggatttgccgataaagccgtgcattctgacgtcacttgtcagaaatggcgaacaatcggggcccgatcttggaccgcatcgatctcttccgcatcttcgcccgcgtcgtcgaatgcgcgagctttacccgggcggcggacacgctggggctgccgcgctcgtcggtctcgtcagccgtcgcggcgctggagcagcgcgtcggcgcccggctgctgcatcgcacgacacgaaaagtgtcaccgacgcatgatggcgcggcgttctacgaacggtgcctgcgcgtcgttgccgacgtcgaggaagctgagaccctgttcctccataccgccgccgaaccgtcgggccggctcagggtcgacgtgcccgggcggatcggccgcctgatcatcgcgccggcgctgccggccttcctcgatcgctatccgcagatcgacatcgatctcggcgtcaccgatcgcgccatcaatctgatcgaggactccgccgattgcgtggtgcgcgtcggcccgctcggtgattccggtctgatcgcgcggccactcggcaacctcacgctgatcaacgtcgcgagcgcgagatatctcgcgcgccacggcacgccgcagacgccggatgatctcggcgcgcattgggcggtcaactacgcctcgccatccaccggacggatcgaggagtgggaatggcgcgagcagggcgcggcacgcagcatcgcaatgcgcggtcgcgtcaccgtcaacagcgcggaggcctatatcgcgtgctgcattgccggcctcggcctgatccagattcccgcctacgacgtgaagcggcacctcgatgccggcgagctcgtcgaggtgatgccgcagcaccgcgccatgccgatgccgatgaccttgctctatccgcaccgccagcatctgtcgcggcggctgcaggtgtttgccgattggctgacggcactgttgaaggagaagttgcttgtcgccggctagagcttttgcgtggtgccggcctggcggccgcggcgcgtcatcgcctgttgttggcggcgcggctcgcggcagtccttgtcgcgcgcttcacctcgaccttgggttgaacgtatcgagataattgatctccatttcagttgtctccattcggcttgcaacgggcttacccggtgcaacgtgttcgatgaacccgacatggtcaggcacattgctcggtaaaatgcaaagattgatctcgagcaatactttcagtgctccacgtaccgcccgcttggtggtcggcggcgtcagaacttctgcgtgatgccggcatagacgccgcggcgcgggccgtattgcgcggcgaagacgccgatgccggagccgtcgcggatctggtagacggtgtcgaacaggttgacgacgtcgaggcgcagcgttgtcggcttgttcggcgcgacgatgttgaagtcgtgcgagacgccgacgttgacctgcgaatagggcggcaccgtgccggtgttggcaaagccgtcgcgcaggcctgagccgtagatcagcgacgcgctgaacttggtgtcgtgccattgataccagccgcccaccgatgcggtcaccgcctgggcatgatcggtgttgacgtagttgttggcgatgtaggccagtttgtccggatcaaacagatactggttcgacacgacgttggtggcgacctgcctggcgatggcgacattgccgtagagatgcagattgtcgtggtcgtatctcgccgtcaactcgacgccttcattggtgcctttcgcatagttgaaggcggtcagcacataggcctggccgaactggccgtcgtcgagcaggtcggtcgcgatcttgtaataggcgtccatgccgacttcgaggccggggatcgcatagaccttttgtgtgacaccgatatcaaacacatgcgagcgctccggcagcacgggatcattggttgatgtcgccggctgcgccgtcgtgttctgcaccagcgagaggttggtcggcgccgccagcacctgctcgggcggcgtgaagttgcgcgcatagccggcatggaaggtcgtgccctcgataggcttccaggtcaggctgacccgggggctgagctggttggcgtcgacatattgccacatctggtcgaagcgcaggccggcattgagcgtcagctggttggtgaccttccattcgtcggcgatgtaggtggagaacaaatatccggtcttggcgttggaatcgaacacggagaatggtgcgtcgatcgggttgccggcatcgtcgagcggcagcacggtcgaaccattattgaccagcgagcgctcggcgctgaacgacatgccgaacttcagcgtgtgcgcgaagcccagcctgtaggacgtgtcttcctggattccgttgacaaagctctgacgatacacgtccgaagctaccccgttgaacaggagatcgccgaccggatccggcgtgaagtgcaactggctgtagcggttgaaataggcgacctggtagtcgaagccgtcgcccgacttctgataggccacgacgttgaactggttgaactcgcgctgccgctcgttgagcagcgcggaatcgaagttggagacgccgtaggcggtgaaggccggcggctggccgggattgttcgggatctggtagttgccgttggagacgccgccgatataggtcagccggctggtcggatcgatcgccgtcgagacataggcaaagcctttctcctgatcggtgcggtcgtggatcgcgttataggccggcgtcgggttctcgatgccgacattgctgccgaaatagcggcccgagatgtagtactgggtttgtccgaccgtgccgccatagtcgacgctggtggtgaagttgccatggctgccgccatagacgctgatgctgccggagttgttgaaggcatctggcttggtctggatgtcgagcacgccggcggtgcgcaacccgtactgcgccggcaacgcgccggtgatcagcgccatgctgccgacgattccggtgtcgatgatctggccgaaggcgccaacgccgtccggcagcatgatcccgttgatgcggtattgcaggttggcgtgctcgttgcgcacatgcagttcgccgctggcggccgaatcctgcgagactccgggcgcctgcagcagcgccttgtctagcgtggtgttggttccctgcggcaaggactgcaggaactgctggctcatctggtaggtgttggcgccggtcggcgccagcagggtggcgcgagcctggtcgagccgcgtattctggctcgcgacggctcgggcttgagcctgctcgggagattccggggttgccgagaccgcgccggttcgtcgcgcacggtgattggttccggtcgcaacgcgcgtcttcggcttcttcggccctgacggcgtggcgtggccttgcggcgccgtcaccgtgatgtccggaagggtgctggtcggcgccgttgtctgcgcgaatgcggcgccgccatgcatcccgcagaacagaagcgaagccgcgccggcggcgtgtcgtcggatgtttcctgacatattggttcccgatctcatgaggcggccatccggatccttcgaacaggacgcggtcgagcccgccgtcgctgcacgacggccagattcccatcgatcaaacggcagccgagctaacggccgcgttcgaagctcagttgtgctggggtgtcaggagatcggaggcgcgcgcggctgatgctgcagccggccgatgtcgaccggcgccgcataattgtcgacgtgccaagcgagcagcgctgcggcatccggcagctgcagcggaggcagtgccggcgccggcatcgccgagttgaccatcgccacgacggcgcagatggcgcaaaggtccgcggcctggtcggaatccggattcgagcgccgctcgtcgcgcgaggcgttctcgacatgcgccgccagcgagctgacggcggcctcgatcgaagtttgcgatcgctgcgccgatgcgctggtcgccgcccgcgccggcgcaatggcatgaaaatgcccgaacgacagcacgaactggatcgacagcgccaacagcgccagccgagccccgtgtctgatgttcgagcgaaaccacttcatgacgacgccattccgcgtcgagggtcacaggaccgacggacggcgcgtgcgacgcggtgtcgcacattttccaaaacgtgccagcctgtcaatccgcattgctgggcagtgcgatcgatttccgggcgatcggacgaatttgcaacatcgcgatggcgccggggacaccggtccacggctgcgctctcatgtgatctagtcgaagtgtgaggtgatcgtcaggttcacgatcatgaccgaagtgcgtgcccggcatcggcctttgaccgtcacagcgatgacaaagcgatcgacatcgacgttcccgcgaccaggccggacaagcgatttcctggtcgtgcggccccgctggtattgccggcgcccggagggtatagttcgggcggatgtggcggtcaggtgggatgtccttcgcaaacaagatcggtctcgcaatcgcaatgttgctgctctgcctgagcggccagcaggccaatgcgcaggccggacccgtgcgctactggaccccgggctcgctgttcggcttcggcggcagcctggccgatggccagaaggccgacacttacggcaattttccgagctttgacgccgccgctgcgcagggcgccgacttctcctatctgaacggccggccggacggctggttcgtcggcggcgaaggcggccgcgtcggctggaacgggctcggccaatccgccgcattcggcgggctcgaatatcagggcgcgcaggtcggctacaatttcaagggcgtcggcaatacgccggtgacgttcttcgccggcttcgactcgctgaaatacaatccccccggtgccggcgggccgctggcgccgttcagcggcaatcaaggtgtcaacgccggctattcggcgcgtgcaggcatcgagttccgcccgagctcgaatgtcagcctgtcgttcggagcgagcttcacccagcaaggggcggagcgcatggacagcgacattcattcgcagctattgcccggccagtccccggttctgttcggcggccgctagcgcttcagcgcaagactgcggcgccgcggtcctgattcaaccaaccagcaccaagaaggcccgagctcacgggcacagtcaggatcgaaacatggacatgcaaggcaagatcgcactcgtcaccgccgcggcgtcgggcgccggccgcgccggcgcgctcatcctcgcgcgcgagggcgcggcggttgcggtggtcgaccagaacgaggccggcgcgaaggcggtggtcgacgagatcaaaagaggcggcgggcgcgcgctggcgctggccggcgatctgcgcgacgacaagttttcgcgtgacatcgtcgcggcgaccgtcaaggaattcggcgggctcgactgcgtgtggaaccatctcggcattcccggaccgtccgtgatcgacgatctggagggctgggatctcagcgtcgatctcaacctgcgctcgcagctgatcaccaccaatgctgcgctcgcgcagatgacggcgcggcgcaagggcagcatcctgttcaccgcgtcgacctcgggcctggtcggctcgccgtggagcccgacctattcggcggccaaggccggcgtcatcggcctggcgcgggcgctcgccaagcgccacgccaaggacggcgtgcgcgtcaatgcgatctgtcccggtgcgatcgacacgccgatgctgcgggtgttcgtcaaccggcccgaccagccgggccacaatacggccgatgccgaggaactgatcaaggccgcggtcacccgcaacccgatgggccgcgccgcgcgtcccgaggagatcgcggaggtcgcggtgttcctcctgtcggacaaggcgtcgttcgtcaccggcatcgcgatgccggtcgacggcgggacggtggcgtagcgacgcgcgtccgttctttggcatgctctcctaaaacttcgccctgatgccggcgtaggcggcgagtggcatgccgggcacgaaggtgcgtggatcgctcagctgcgccatcaggttggggagacctccggcactggtgaaaccgccggtctggaagaacgtgccgctcagatagtaatgctggttgaacacattgttgatcaggccgaacacctcgatgttcttcgtgatctggtatgacgtgtgcagattgacgaccgagtaggccggcaccttcgggctctggttggtgtcgtcacggatcagccactggctgccgacgacgttgacatcggcgccgaccttccacgcatcggtgacgttgtagtcgacgccggccttgaaacgatgtgcgggaatgcccgggatgtggtcacccggactgacgttgacgaattccgcgccggcatcgttggtcagggcattcggattgttcggcgagaacagcgtgatcgcgctccgataggtcgcgtcgacataggtgtagttggcataggcgttccagcgatcgagacgatagtcgagcttggcctcgatgccctgccgcagggtctgcccggcgttctggaagaagccgaaattgttgacgccgagcgggctcgcgacccggatgatgtcgtcgtcggacaaggtgtggaacacgccgaggccccagctcagcacacccgtcttcgcatcgcgcccccagccgccgcggaggcccgcttccacggtgtgcgacaccacctgcttcagcggcggatcggccaccaggaagctgtcgatcatgcagggatggttgggatcggagcagccgagttccagcggcgtcggcgcacggttagcttccgaatagccggcataggcggtgaggttcggcgtgatcttgaaggtgccgccgatcaccgggttgaagcgctggaagcggttgctgctgttgagcaggtcgttggtgccggtctggtccttcagatcgatctgggcgtaattgaagcgcccgccggcggtcaccgagaatctgttggtcacgtcgaacgtatcggtgagatagacgccggtgtaggtgttggtggcgcgcagatcgaccgggctgaggcctgcgtcgggctggttgatgaagacaccggtgccggtcacgaacaggttgttcggggcgaccgttccgagttcgctggtcgccgtgaatttcgtgttgccgtgatcgacgctaacgcccatcacgacgtggttgtcgtgcccgaacagctggtccgagttggtcaactgggctgtgccgccgtagctgttagtcgcggtctggttgcggtccacttcgccaaggaacgcattgcccagcgtgttcggagtcggcgggccgtccgctggaccaaagatcggaaggccatcgccgatgcacaaggtggtgggatcgtcgcacggctggacgttggtgccgttgccgtcgacatgagactgccgaaagccacggaagtaggcgttgccctggaacgaccaggtgtccgagaaattgtgactcaaggtggcgttgacgaaagcgagctgaagcagcgtcgattgcggccaggtgtagacgctggaccagcgctgattgagcatctcgaccggcgtcgccgcgacgttgccgagcagattgctggcgccggtgaaattgacgtgaaattcggtctggtcgttgcgcgcgccgacgtcgacatacatccggttgatgtgagactggttggcgtagtcgcgccagccgcgatcataggcggattcgaatgccgcgtaggcggagatgttgtccctctggccgccggcctgcacgctgccctgcacacgcccgtaggagccgccgaacagttcagcctcggagccttggtaggtgaagccgttcttcatctggatgctgagcgcgccgccgatcgcgttgagaccgtacacgggattgttgggaaccagcgaaacacggtcgatggccttctccgggatgaaatcccagttgaccacgtcgccccaggattcgttgatgcgcacgccgttctggtagatcgcgatgccctgtggcgtgccctggaccggcgaagcaacgaagccgcggtagtcgagattgcgctggaacggattgccggtctcgtccgtgagcgtgacgccgggcagcttgcggttcaccgagtccaggaaattggtcgagtagttgcggctgaaatcgtctgatgtcagcacctcggtgttcgacggcaccttgtcgcgatcgatcaggctcgcgtcgcgctcggaggggccggggacgccggtgccgccctcaggcgccgccgcggtttgcgccggcgcggcccgcgttcgcgcggttcgtgaggtctgcaccaccggcttggcggcgggcttgatgctgcgcgtgcccgacaacggcgagggagcaatcacggtgaccggtggcagctcggcgggagcgggggtctgggcgtacacggcggtcagcggcgcagcagctccgatggcggtgagcacggccacggcgctgcgcgtgtggaccgaagaagacagaaaccgcgttgccgcacgcaacaacgtatcagccatgacgcccaccccttgccgcggttcgtcattgtccccaacgaaccgttcgcattcgagactgctggagcgatgccggcttggcaaacaagatgtgtcccggcggcgcgggattcttttccatggatgatcgggaaaaattcccgatcagattcgaggcggtagacgcattccagcaacagttgctccatcgcatgaattttccttgcgataccaacgcgttgacggcgtgtcgacgatcgacgtcggagctgcaatcgaggcggtcgtgctggtgagcgaggcgccgggctcccctcgcgcgatcaagtcatgtccctgcgcgtcgattgtatcgacgccgcaatgcgcataagtgtcgcctgtccccgacgtggcatccgcctgtaaatgtcgttccagacttcaatccctaaccgctgtcctgagaactgatgcgagtcctgatcgtcgacgatcatccgatcgtcatcgcggcttgccaggctttgctggctgacgaggccgaaatgaccgtcatggccgccgcggatgcggcaagcggcctggcgtcattcgccgccgatgccccggaggtctgtgtcctcgacatcaatctgccgtcggtgtctggcctcgagctcgcgcagcagattctcgggaaggatgccgaagcccgtatcgtcatcttcagcatcaatgacgatccggtcttcgtcgcgcgcgccgtcgacatcggtgtcaagggctacgtgtccaagtccggagatcccaacgacctggtcattgccatccgcgaagtcggaagcggaggcacgttcctgccgtcccgaagtcgccggaatgcggcattgatagacccgccggttgcggccaaccggctcgcgcagatcagtcctcgggaagccagcatccttcgtcagctcgcgaccggacgcagcctggccgagatcgcgaaactgatcggcgtttcctacggcaccgtcgcgaacgacacggcgatcatgcgacacaagctcggcgttcgctcgacaaaggaattggttcggctggcggcggaaatctccgcaaagctaccgcgctgaatgaacatgctgccgctcgacaggcttccgaaatttcgacggatcgatgcgaacccgatcagtccgaaaaatagccccgctctcatagctgaggcggggctaaaggttcattgggataaaatccagcgcactgcgcgggaagtagcaaatcggatcgtaccgtcacgattgttttgatcaacgagattgtatctcgcagttttcgggaattattcccgatctgttttggaaaaaatcgaatctcgcggcgtcgtgcctgcgcaaatcattcgctttgcgtgtcgcatcatgcatcgaacttgaagtcgcaaaaatgcgcgtctacgctcgcggcagatccgttagagatcgctggagggaaacacatgaagcgtttgctgtcgttcgagactacgcactgcattgcagatcggagaagcccatctccgcgatcggccctcgcgacgatcgctctcgcctcggtccttggtcttgcggttttctgcggtgcttcggcacaggacgcaactcccgaccgcatcaaggccgtcacgtcgaaagtcgacagcgatttcatcaaggcgaatgcggcgacatcgaaggattggccgacgatcggtctcgattacgcagagacgcggttcagcaagctcaaccagatcaatgccggaaacgtgaaggacctcgggctggtctggagctacaatctcgaatcgtcgcgcggcgtcgaggcgacgcccgtcgtggtcgacggcatcatgtatcagacggcgtcatggagcctggttcacgcgatcgatgcacgcagcggcaagaagctctggtcgttcgacccgggcgtcgaccgctcgaagggctacaagggttgctgcgatgtggtcaatcgcggcgtcgccgtctacaagggcaaggtgttcgttgccgcctatgatggacgcctgatcgcgctcgatgccgccaccggccagaaggtctgggaaaaggacacgttgatcgatcacgatcactcctacaccatcactggcgcaccgcgcgccttcaacggcaaggtggtgatcgggcagggcggcgccgaatacggcgcgcgcggttacatcacggcctatgacaccgagaccggcaaccagctctggcgctggttcaccgtgcctggcgatccctcgaagccgttcgaggacgcctcgatggaagccgcggccaagacctgggacccggccggcaaatactggctcaatggcggcggcggcacgccgtgggacaccatcacctacgatcccgagctgaacatggtctatgtcggcaccggcaacggcgcgccgtggaatcgcaagatccgcagcccctccggcggcgacaatctctacctcgcctcgctcgtggcgctgaatgccgataccggcaaatacatctggcactaccaggagacgcccggcgacaattgggactacacctcgacccagccgatgatcctggccgacctcacgatcgagggcgcgccgcgcaaggtgattctccatgcgccgaagaacggcttcttcttcgtcgtcgaccgcaccaacggcaagttcatctcggcgaagaatttcgtcgatgtgaactgggcgaccggctacgacgccaatggacggccaatcgaagtgccggccgcgcgtggcgatgcgccctatgacgccgtgcccgggccgtatggtgcccacaactggcatccgatgtcgttcaatccgcagaccggcctcgtctacctgcccgcgcagaacgtgccggtcaatctgacgccggaaaagtcgtttgcacagaatgccgcgacgccgggcaagttcggcggcacgaccggctggaacgtcggcttcgtgctcaacggcgagccgccgaaggcgcccgcgttcggcaagttgatcgcgtgggatccggtcaagcagaaggaagcctggaaggtcgattatgtgtcgccgtggaatggaggcacgctgaccactgccggcaatctggtgttccagggcaccgccgacggacgtttcgtggcgtacgatgcgaccagcggaaagacgctgtgggagacgccgaccggcaccggcgtggtcgccgcggcatcgacctacacgatcgacggccagcaatatgtctcgatcgcggtcggctggggcggcgtgttcggcatcgctacgcgcgcgaccgagtaccagaatcccggcacggtctacaccttcgcgctcaacggcaaggccaagatgccggagttcgtgaagtatcagaccgaaggcctgctgcagggcgtgaagtacgatccgaaggacgtgcccgaaggcaccgcgctctatgttgccgcctgcgccacctgtcatggcgttcccggcgtcgatcgcggcggcaatgtcagaaatctcggctatgtccctgccgaggaaatcgccaacctgaaggacatcgtcttcgccgggccgttccgcgaccgcggcatgccggatttcaccggcaagctgaccgaagctgacgtggtgaagattcaggccttcatccaggggaccgcggacgcgatccggccgaagagcaaatagcatgacctaaacggatcatgtcgcaaggagcacgcacagcttgtttgtgtgccgtcggcctcagcgcttccctgcgctgaggccgttgttttgactgcgctcgcgcgaattgaagcggtccgtcaggctcgtgcccaaccggcgcgtatcggtctcccgaggaccggcagcggatcagtccttgaactcacagccgaggcgctgcagggcctcatcgacccagcggcggtcgctggtgccggcaaggatctgctggatggccttttcctcggtggccttcttggcctcggtcagcttgcagatggcctcggcgtcgtcatggggcacgcagagcacgccgtcatcgtcggccacgatgagatcgccgggctcgacgatcatgccgtcgatcgcaacagcgcaattgatctcgcccggcccgtccttgtagggcccgcgatgggcgacgccggcagcgaagaccgggaacgatcctgcgcggatcgcgccggcatcgcggatcgagccgtcgatcacgaagcccgccacgcccttcttctccgccagcgtcgacatgatctcgccgatgatggcgttgaccagcacgccgccggcgtcgaccacgatcacatcgccgggctgggcgaggtcgatcgccttgtgcaccatcagattgtcgccggggcgggtcttgaccgtcagcgccgggccgccgagccagccgcctgcatgcatcggccgcagccggttggtgcccgcgatgcgcgacatcacatcgctgatattggcgaccggcagggtgcggtagcgcgtgacgagatcaggcgagaccttccgtttcgccttgtgaattgcaaatcctatggccatcggtttctccggtgtgttggcggcgcagtcgctcagtgcgcgcggcggtcgagatgggcgttgaggcgaggatagacgcggcgggcattgccttcaaagatcttggccttgtcctcggcgctgagcggcaacgcatcgatatagcggcgggtgtcgtcgaagtgatgccctgtctcgggatcgatgccgcggaccgcaccgaccatctccgatgcgaacaggatgttctcgaccgggatcacccgggtcaacagctcgatgccgggcaaatggtagacgcaggtgtcgaagaacacgttcttcagcagatgctccgacagcggcggcagcttcatgtcctgtgcgaggccgcggtagcggccccagtgatagggcaccgcgccgccgccgtgcgggatgatgaagcgcaaggtcgggaagcgcttgaacaggtccgaggtcaggaactgcatgaaggcggtggtgtcgccgttgaggtaatgcgcgccggtgccgtggaagcagggattgcaggacgaggagacatggaccatcgcgggcacgtcgagctcgaccatcttctcgtacagcgggtaccaccactcatctgtcagcggcggatcgcaccaatagccgccggcgggatcggggttgaggttgcagccgacgaagccgagttgcgtgacgcaacgctcgagctcctcgatgcagttcttgggcgccactccagggctctgcggcaactggcagaccgggacgaagttttgtggaaacagcgtgcagacccgatgcacgaggtcgttgcagatcgtggtccattcccggctggtcgcttccttgccgacatgatgcgccatgccggcggcgcgcggcgagaagatggtgacgtcggtgccgcgctccttctgcaagcgaagctgcgcgccctcgacgctggtgcggatctcgtcatcggtgatgccgagattggtggtgagcggccggcgcgacctgtcggcaaggccggcgagctgcttgtcgcggaagatctgcagcttggccggctcggtggtgtagtggccgtgacaatcgatgatcatggtggcttccttgtgcagttgtcagtgggtgacggatgacgggatcgcgcccgcaagctccgtctcgcgcggtttgacgcgcatggtggcggcgatggcggaggcgacgagcaggaagccggcgatgccgaccagcgcccaggagaagcttccggtggagtccttgatcaggccgatgcaccaggggccgatcaggccgccgaactgcgccagcgtgttgaccatggcgatcgaggcggcgccggccgcgccggtcaagagcgaggcgttgatgctccagaacagcggattgccggcgttcaggctgaagccgacgatgcaaaggaacacgaaggccagcaccgggctcgcgacataggcgctgccgagcatcgcgattgcggcgagcagatagacggccgcgagatgaaacttgcgatcgcctgtcctgtcggagctgcggctgaccacgatggtgccgatgacgccgagcagcggcgggatcgctgagaggaagccgacctcgatgttgctgagatcgcccatgcccttgatgatctgcggcagccacagcaacaggccgtagatgccgaccagcgcgcagccgaacagcgccgccagcagccagaccctgatatcgagcacgcattcgatcaacctgtgctgcccctgctgttcgatctcggcccgttcggcggcgagctcgccctccaaccaggcggcctgctgttgggtcagccagctcgccttggccgggcggtcggtcagataatagagcgtgaacaggccgagcagaatggtcggcacgccctcggcgatgaacatccattgccagccgtgcagcccagcggcgccatcgaggaaggtcatgatgctggtcgagatcggcccgcccaagaccgccgagaacgagccggcgatgatgtatccggcgacggcgcgggcgcggtagcgcgacgggaaccagtaggtgagatagagcaccacgcccggcatgaagccggcttccgcgatgccgaggccgaaccgcatcacataaaggctcagtggattccagacgaaggcggtcagcgtcgcgacgaggccccaggtgatcagaatccgcgcgagccagacccgcgcgcccagccagtgcagcatcaaattgctcggcacttcgagcaccatgtagccgaggaagaagatgctggcggcaaagccgaagatcgcggggctgaggccgagatacctgttcatcgtcagcccggcatagccgagattgatacggtcgagatagttgaagaacatcatcacgaacaggatcgggatcagccgcaagtagacgcgacggatggtttgggtctccaattcactcgtagccggttgggccatcgaaatcctcccttgttgtttttggcaccggtgactcgaacctggcggagcgcctgttatttgcggcgatttcgcatggctgaccggctgcgcgcgttgccccttgttatcccttggagcatccgcgttttggcgccaagatcaggaaacggtcctgggaggtcaaataccgctttgacccgtcacttatagggaatcggaataagcgatggactacaggcagcttcgctacttcatcgcggtggccgaggagctcagcttcagccgcgccgccaagcggctgcatgtcagccagccgccgctcagcacgcagatcaaggcgatggaggaggaactcgggacgcagctgctatcacggacgcggcgtgccgtcgcgctcacccaggccggccagctgctgctggagcacgcgcgccgcgccgtcagcgagctcgatctggcgtcggagaccgtgcggcgtgccgcgcgcggcgaggccggcgcggtccgcgtcggcttcacggattccgttccgatgctcgacatgttcgccgaactgttccgcagtttccgcgccagctatccgcgggtgaagatcgagctgcggcacatgtcgacggcgaagcagctccaggcgctcgccgacgccgagctcgatgtcgcgatcatgcggccgccgctcgatttccgcccggcggccgatctgcaggttcacgtcgtctggcgcgatcggttgatggtgttcctgccgatcgatcatccgctcgccgctgcaccgggcaagctggccgtggccgatcttgccgagcacgaattcgtcggcatggccgaaagcggctgcggcgtcggcgatcaggccgcgatgctttgccggcgggcgggctttgcgccgcgcatcgtgcaggaggcgcatgagctgcgcaccgtgctcagtctggtcgcggccgggatcgggctttcgatcctgccgtcctgctaccagcaggccggcgtcatgaacgtcgtcgccaagacgctcgatacgcctgatgccgaaagccgcatgctggtggcgatgcgctcgaatgcctcgctgttgccgcgccggttcgtcgaatgcgcattgcaggcggcaacgcgcagcacgccgccgctggtccccggggtcacggcagcgagccgttgatcgcgccgcgcgcaagacgaccgcgcgtggttgaggccgcctgcctgccggcccgcgcagcccctactttcgtaggccgtagtctcccggaacgcagtctggcgccgctcttgcatagccgaatgtcagatgctggggcgccgattcgtcgtgcttccgcctgcgacggcaatgtcgcgggcgaaggattggtgatgcgcgcccgcagctatttgacatctgcggagacgacaagatgcacgttctcacacgtgcggcagtcctgcttggggcggtgttcttgacatcgccgaccctggcgcgcgacgacggccgctacgccaactcaccattgaagccttggtttgaaagcctgcacagcggctacgggcagtgctgctcggatgccgacggatatgtggtcgccgatcccgattgggagtcggatcacggccattatcgcgtgctgatcgacagtgagtgggttgtggtgccgaacgaggccgtgatcaccgagccgaacaagatcgggcgaaccatggtgtggaagcactatatcgatggccatccacgggtgcgctgcttcatgccgggcagcatgacctgatggcgtgcgcggcgcttgagggaggagcggaccgcgcctcgccgcaaagcgtggcgtggtcgagcgattcggtgggcggcggtccggcgatcacctaaagcgcggtgagattgggttgaatcgtcatcgggctttagctccttgtttgagcatgatcttttcggaaaaccgcttcgcacttttccggatcatgctttagcccggattctccaggctgaaggtctcggactgttcgtcataggcgaacagctcggcatagcgcccccaggacacgatggtcttgagcgtttcatccgcatagtcttcggacatgtagtcctcgagctcgttgcggaagcgtgctgcgggcgccatgtgcgagggccgctcgtcgaggacgcggcggatcaacccgatcaccgggacgtagttgatgaggtgctccgcgaacagtttcttgcgcgtgtcggtgtcgagatgcgcaaagcgcacgccggcctcggtcagcaccacgtcgccttcgctgacctgggcaaagcgcagcagttgcagcgtctcgccgagatgcagaatttcatcggtctcgagttgaagctggctcgccagcaccggcaggtcggcatgtccgccatagggtggcccggccagcgtctcgatcaggcccgacagcacgttggacgagacatggtcgagaaccatgccgacgccggagccgggaattcccccgggcgtcagcgccttgggttcttcacgttgcgtcatgcgggcatagagctggtccaccagctggcggaaggtcggatccagccggttgcgcggatgcttgaggtcgatcttgaactcggcggcgacgcgccccggattcgacgagaacaccaggacgcggtcgcacatcagcacggcctcctcgatgttgtgcgtcaccatcagcaccgacttgatcggcagccggccttcgatccagaggtcgatcaggtcggtgcgcagcgtctcggcggtcagcacgtcgagcgccgagaacggttcgtccatcagcagcaggtcgggatgcacgaccagcgcccgcgcaaagccgaccctctggcgcatgccgccggacagttccttcgggtaggcggattcgaagccgtcgagaccgatcaggtcgatcgctgcgagcgcgcgcttgcgccgctcggtggcgtcgacgccgagcgcttccagtccgagctcgacgttctgcagcaccgtcagccaggggaacagtgcgaacgactggaacaccatggcgacgccgttcggcgggccggcgatcgcctcgccccggcaggtcgcagcccccgacgacggcgcgaccagccctgcgatgatccgcagcaaggtcgacttgcccgatcccgagcggccgagcagcccgacgatctcgccggcatgaatcgtcaggtcgacattctcgagcaccagcaattgctcgccgcttcccttcgggaacgagcggcagacgctgcggatgtcgatcagggcggcttgcttggtttggtcgagcatcaggatccctctcgatcagccgaggcgaaggcggcgctcgccgaaggcgtagagcggtcgccacaacaggcggttaaacaacgtgaccagaatgcacatgacgacgatgccgagcacgacccggggaaagtcgccggtctcggtcgcgtgcgcgatataggcgccgagaccggtggcgacgagatgggtgttgccccagctcgcgacctccgcgacgatcgaggcgttccaggatccgcccgacgcggtgatcgcgccggtgacgtaataggggaagatgccgggcagcacgaccttgacccaccatcgccatcctccgagatgaaggctgttggcggcctcgcgcaggtcggtcgggaaggcggcggcgcccgcgatcacattgaacaggatgtaccactgggtgcccaggatcatcagcgggctgagccagacattggggtcgaggtgaaagcggacgatcagcacgacgaacaccggaaaggcgaggttggccggaaacgcggcgaggaattgcgcgagcggctggatccgctccgcaagcttcggccgcaggccgatccagacgccgaccggcacccagatcagcgaggccagcgcgatcagcacgatgacgcgcagcagcgtgacgagcccgtatccgaccgcatcgaagacgtcggacaggccgagcgaggcggagaggtattggtaagccagccaggcggcgtaggccgccgcggcaacgatcagcgtaatccagatggcgtcaatgaggcgcgaaggttggccgggtttgccgccggagcgcagcgccaccggccagccgatgcgcatggtggagatcgccttgttggccattcccaatggataggtcagggcgcgcagcgcgcgcgttcgccggaacagatcgagcatccacgacgtcggagcttcgccggaggcggtctgctcgaagcggaatttgtcggcccaggccacgatgggacgaaacagcagctggtcataggcgatgatgacgatcagcatcgtgatgagtgcatagccgatcgcaggcaggttcttctgctcgatcgcggtggcgacataggagccaacgccggggagggtcacggtcgtgttgccgacggtgatcgcctccgacgccacgacgaagaaccagccgccggacatcgacatcatcgcgttccagatcaggccgggcatcgcaaagggaacgtccagtcgccagaaccgctgccagcccgagaggtggaagctcgcggtcgcctcgtcgaggtccttcggcacgttgcgcagtgactgatacatgctgaacgtcatgttccaggcctggctcgtgaagatcgcgaacacgcaggcgaactccgcgcccagcacgcggccgggaaacaggttcatgaagaacaccaccgtgaaggtgagaaaaccgaggatcggcaccgactgcaggatgtcgagcatcgggatcagcaccatctcggcgcgccggctcttggctgcgacggtggcgtagatgaacgtaaacaccgtcgagcagacgatcgccagcagcatccgcatcgtggttcggagcgcatagtaaggcaggttggccggatcgagcgacaccggcgtccgctcgagctcggacagcggcacggtggtctgctcgccgccgtagacgacgagcaccatcgcgccgaccagcagcaacagcgccgccaggtcccagaaattgggccgcagggagacaggtccccatacggctgagcgaacgtcccgaaacgtcataaagccaccttcagggggagcagaacccggctgattgcggcccgacggcatcggaaccggcccccaaggtcggcttataggcaggattcacgacaatagggtagtcgggagatgggcgcatgacgccctttcggaggatatcggaacctggtgtggcttatgagatcgggcggttggccgtacgtccgccgcagagccgtcgtcccctggttcaggaccctggctgcgtcaggaaccgggtgaccgcgccgcccagcgtggcgtggtcgagcggctcggagagcgatgccttggcgatttcgaccacacggtcgggcgccaggccgcggcgcaggtcgcacagcgcatcggcgtaatcggcggtgaattccggatgcggctgcaccgacagcgtcgtgccgttggcatagagcagtccggcatgcggcgtgaactcggacgacatgatggtgcgtgcggaggggggcggggtgatcacctggtcctggtgcgagcaggcggcggcgatcgcctcgccctggagcagcccattgtcgggcgtcagccggtagacgtggcggccgatgccccagcccttctccgatttgcgcaccgtgccgccgagcgcctgcgcgatcagctgatgaccgaagcagacgccgaccatcggaacatgcctgtcgtgggccgcgcgcacgaaggcttccagcggcgcgatccaggcgacatcgtcatagacgccggctgccgatcccgtgatcaggatcgcatccagcgtggccggatcgggcagcgcctcgcccgtggcgacgctcacgacgttgcaggcaacagacggatcggccgcggccaccatccgctggaacatctgcggatagctgccgtgacgctcgcagaactgcgggctgacgagcccggtttcgatgatggtgatgcgggacatgaaatgcgctgatggaagagcggggatgatccagcctttaatccgaaagcgcttgcggtcacaagccgcctgcggcgccggccgatcaattccgcgacggcgccgccgtgtcgatcgtcgcggtgtgctgcgctgccggcgtggtgttcgcggccgcaggtgccgtgctgatgatgacgggttcggtgcggtagcgcggcaattgatcttcgagcgaataaccgacgcagagcgcgaggctcgaccacaccgccatgctgaaatacagcgacatccaggcgatttcctcgcgccattcggcgatgtcatgggtcacgacccagcgccggctgacgtcgcgcaggccgtcgagcgggtgcagcaggctgccgccggcggcgaggttgatgcgccagcggttgaggtacatcgggacgtcgatggtcatcaggaaggcgaggaaggcggcaatgccgacgatcgcgacgatgaaagcccagcgcaccggaccatggaactcgggcagcagccggcacagcgcgatcccgaccaggaagaacaccacggcccagatcgagttctcgattgcgttgcagagataatgcgtggtcagcaccgcataccaggagaagcattccgcgatcacgatcagcggcacgatggtccaggcgatattcacggtggtctcggcgccggtcatggtgccgagctgatgcaggatgatcgcccattgcgcggcgaagcagacctcggcgacggtggcgacggtgcggcccaccatgacgctcgacagccagtggtcgaacaggcagatgcgctgcacgtcggcgcgcggcagcaccgaacggaaggcgcagccgaacacataggccgcgcacagcagcatcatcaggccgatgccggaggtgttgctgaagctgccgttcgactgctcatggaactggcggtacagcgcgaaccagatcgcgatgttggcggcgctgacgaagcttaggaagccccaccaccggaccactggattcgaccaagccagcgtaaccggccgtgcctgccgctccatgctcattcaccgctccgcctgtaaccgaattgatattgaactgtagtaattctgtcatagaaggtcgcgaatcacgactaaaaaatgcgtgtggcgcgggccgggcggctacggattgtgacagtgtttgtgacagcgcggcgtttgtgacagtgagcggcggcccggcgtttgtgacaacgcgcagcccgccaaacccctctcccgtcattccggggcgcgcggaacgcgagcccggaatgacggtggagagaacgggctgccccgccttcgcgatcgtgatcgaatgtgacacccgcgccggtaggcaggccccgcgccatcatctattgaacggcttcctttttctggccgaacccgcgcgggctggcttcaagcgaaggcgcctcgtgacgacggacatgacggccagctacgacccgctgttgcgcaggatccattgggcgacggcggtgctgttcatcgcggcgatgttgatcgggctgtattgcgggctgcagccggcggggacctcgccacggcgccagctgctcgaggtacacaaatcgctcggcgtcaccctgttcttcctggcgatcctgcggctgatcgtgcgcgctgcgaccacggcgccgccggagccgagatcgttctcgccgctggtgaagatcgcggcacggctcaatcactgggcgctctacgccatcctgttcgtgatgccggtgaccggctacatgttctcgtcggccggcggctactcgctgcgctatttctggaccttcagctggccgcgcctgttcgccgataacaaggcggtcgcagaggccggcgagctggcgcacggcgcgctcgcctatgtcgtctacgccgtggtcgcactgcatatcgccgcgacgctctggcatgtcgtcgtgaaaaaggacgagacgctggcgcggatgtggccgcgcacgagccgcaatgcgtcctgacgtctggtttccggattatccgcgcagcgcagtctccggaatggtgcggcgaaccacctcgcgcatcgcgaagctggaatggatgcgggcgacacccggcatccgcgacagatgctgcttgtggatgcgctcgaagtcggcgatgtcgcgggcgatgacctgcagatgataatcgtcgctgcccgacatcagatggcaggacacgacgtcggggcagcgcgcgatcgcggcctcgaaagctgcgagatagtcctcgctctgcttctccagcgtgatggtgacgacgacggtcgtgacgaggccaagcgctgatgcctcgaggtcgacgcggtagccgcggatcacgccgatctcctccagatgacgaatccgccgcgcgcaggcggtcggcgacagcccgaccttctcggcaagctcgatctggctggcgcgggcatcactgaccagctcggcgaggattctgagatcgatacgatcgagaccgtccacgcagttttccttcatccgctgagcttgccacgaaggatatgggcgtatctggctgtgggcaagccggaattcgctgagaaacgccgtgcggcggggcatagcctcgtggttggcggaaaccaattttgcaaggagcggaccatgcgtgtcggcgtgcccaaggaaatcaaggtcgaggagtatcgggtcgggctgacgccggcctcggtgcgggaatatgtggcgcacggccacgaggtcgtggtgcagcgcggcgccggcgacggcatcggtgccggcgatgacgcctatacccaagccggtgcgcggattgccgacaccgccgaagaggtgttctccgtcgccgagatgatcgtcaaggtgaaggagccgcagccgtccgaatggatcaggctgcgcgagggacagatcctgttcacctatctgcatcttgcgcccgacgtgccgcagaccgcggggttgatcgcctccggctgcacggcggtcgcctatgagaccgtcaccgatgcgcatggcgggctgccgctgctggcgccgatgagcgaggtcgccggccggctggcgatcgaggccgcgggcgccgcgttgcgcaaatccgccgacggcatgggcaagctgctcggcggcgtaccgggcgtgccgccggcgcgcgttgcgatcatcggcggcggtgtggtcggcacccatgcggcgcggatggccgcaggtctcggcagcgacgtcaccattctcgaccgctcattgccgcgcctgcgtgcgctcgacgacctcttcctcgggcgcatccgcacccgttacgccacgctggaagcgatcgagcaggaggttttcgccgctgacgttgtgatcggtgccgtgctggtgccgggcgccagcgcaccgaagctggtgtcgcgcgcgcagctcgcaggcatgaagcgccgcgcggtgctggtcgacgtcgcgatcgaccagggcggctgcttcgagacctcgaagccgaccacccaccaggcgccgacctatctggtcgacgagatcgtgcattattgcgtggccaacatgccgggcgcggtgccggtgacctcgagccatgcgctcaaccacgccaccttgccgttcggcctggcgctggcctcgaagggactgcgcgcgctggtcgaggatccgcatttgcgcgccggcctcaacgtcgatcgcggtcgcatcaccaaccgcgccgtcgccgagagccagcatctcgcggccgtgatgccggaggaagcgctggcgtcgtaacgtttgcgagccttcgcagcttttcccattgtcgtcccggcgaaagccgggacccatactctgcggcggatgttttacgggaattcgtcgacacggccgagcaagacaataggcgctcgtggttatgggtcccggctttcgccgggacgacatcgaatgcgttgtgcagtcgcggagtcatccgcacgacgcgccgagcgtccgagatgtcatttctcgacgaaccttgatccggcgttttccgtcagtttcttcagccggctctgcatcacttcaatgatgtgctcgcgctttgccgcgatccgttcgatggggccgccgatgccgatagccagcggcgcgcgtcgctttggtagcggaacaagcatgcctatggtgtttgcgcccggcgtcgtgcggccgcctgactcggaaaagccgcggcggcgaatgcgctcgatttcttcgagaaacgccgtttcgcgaacacgcgccgacggactcggctcatcggcattgttgcgacggatgatgccgcgaatcctggtgtttggcatttggctcagcagcacgtgtccaagcgcggtacgaaccatcggtcgtatttgaccagcatgtgtaatgaactgaagctgatagccgctcggcacaacgtgtagataccgcatcccggcggcgcccgtctgttgtccaagcaggatggtttcgcccccagtcgcgctccagagttcctccatcagatcggtcagctttgtgtcacggaacggagaacgacggatccaatcaccgagcagaccgacgcggtagctagggatgaaacgccgggtctttcgatcgtattcaaggtagttcaattcaacgagactgctaagcaacaccgacgtgctcgattgtggcatctccagcgcggaagctatttcggttacggaagcagcccgcttcgtttcccgaaagaactccagaactgcaaacgtgcgcattgcagatttgacaatggccgtcttgttcgcgctcggcatggttgtctccgcggcgcggcaatgaccgcgcctccatcacatatgtgatgttaggccaaaatggcttcacttgacgacaagtttggcacagattggcgccaatgagatcaagccgcatggaaacgcagagagcaggggaaggcgaatgcccggccgaagtttgctcgagaagatctgggaccagcatgtcatcgcccgtttgagcgaggacaccgatctccttcatatcgatcgccatctgctgcacgatctcggcggctcgcgcggactgctcgatctcaagagccggggcctcaaggttcacaatccggagctgacgttcgcgacgcccgatcacgcgctgtcgacggcgcccggtcgcgccgggaccagcaagatcggcatggaattgctggcggcgctgcgggctgagaccgcggcaagcggtatcaggttgttcgatgtcgatgagcccggccagggcatcgtccatgtcatcgggcccgaactcggcttgagcctgccgggcgcgacgatcgtctgcggcgacagccatacctgcacccatggcggcttgggggcactcgccttcggcatcgggtcgagcgagctcacccatgtgctggcgacgcaggcgctgatccagaagcgtccgaagacgctgcgtgcgcgcttcgaaggcaagctgccgctcggcgtcaccgccaaggacatgatcctggcgctgatcgggcagatcggcgccgccggcggcaccggctatgcggtcgaatatgcggggagcgcgatccgcgcgctgccgatcgaggggaggctcacgatctgcaacctctcgatcgagctcggcgccaagatgggcatggtggcgcccgacgagacaaccttcgaattcctgcgcggccgtccctacgcgccgcaaggcgagatgtgggatctcgcggtgaaagcgtggcgcgagctgccgagcgatcccgatgcggtgttcgaccgcgaggtcatgatcgacgtcgagaagatcattccgcaggtcacctggggcatcagccccgagcatgtcgtcggcgtcgacggcgtcattcccgatccgaaggcggtcgacgatcccttgcggcgcgccgcgatcgagaccgcgctggagtatatgggcctgcaaggtggtgcgccgatcgccgggacgccggtcgactgggtgttcatcggctcctgcaccaacagccgcttgagcgatctgcgtgctgcggccgaggtcgcacgcggccgcaaggtcgccgccggggtccgcgcctgggtggtgccaggctcggagaacgtcaagcgcgaggcggtcgccgaagggctcgacaagatcttcatcgaagccggcttcgagtggcgcgagccgggctgctcgatgtgcctggccgccaacggcgaggtggtggcgcccgggcagcgctcggtctcgacctcgaaccgcaacttcgtcggccggcaggggccgcgggcgcggacgcatctggcgagcccggcgagtgcggcggcctccgccatcgccggtgcgatcgccgatgtcaggatgatggggcgctgatcatgccgaaaccgttcgacaggctcaccgcaacggctgcgccgatcatgcgcagcaatatcgataccgacgtgatcatccgcatcgagcgcctggtcggcaattcgattcgcggcacgctcggcaaatgggcgttcggctcgctgcgctacctccctgatggctccgagaatcccgatttcatcctcaaccgcgagccgtaccgggaggcggagatcctggtgaccgggccgaatttcggctgcggctcgtcgcgcgaaggcgcggtgtggtcgctgcaggagcgcggcatccgcgccatcattggctcgagcttcggcgacatcttcttcgccaactgcttccagaacggaattctgccggtcatcgtcgacaaggtggtggtcgatcagctcgccgccgacatcgaggcgacgcagggtgcgggcaaggtctcgatcgacctggaggcgcagaccatcgtctcgccatccggcacccggcatgccttcgagatcgacccgcgccggcgcgaaggcctcttgaaggggctcgacgaggtggcgctgacattgcagcgcgacgccgaggtccacgcctttcaggcgtccgatcgcgcggcgcggccctggattcattcgacaaggacacccgcatgagcacgcaatccaacatggtcaagatcgccgtcgtcggcggcgaaggcatcggccccgaggtcaccgcgcagtcgcgccgcgtgctcgactggttcgcgtccaagcgtggcgcgccgatgacgctgcgcgaggcgcaatatggcctgatcccgtatctcgcaaccggcaaggtgttgcctgaggacaccgcggaagcgatggacgaggccgacgcgatcctgtggggcgcgaccggcggtcccgagaccaccgaagtgcccgcggcggcgcgcaaggccggcagtcttctgggattgcgcagcaaatacgatctctacgcgaacttgaggccgatcatggcgagcccggcactcgcggcgtcggcgccgctgaagcccgaggtgctcgacggcgtcgacttcgtcatcatccgcgaattgaccagcggcatctatttcggcgagccgcgcggcatcgagaccttgccggacggccagcgccgcggcttcaacaccgagcaatacaccaccaaccagatccggcgcgtggcgcgttcggcattcgagctggcacggacgaggcgcaacaaggtctgctcggtcgacaaggccaatgtgctggagaccagcgtggtgtggcgcgaggaggtgatcaggctgcacaaggaggagttctccgacgtcgagctgacccatctctatgtcgacaacgccgcgatgcagatcgtgcgcgagccgcggcagttcgacgtcatggtcaccggcaacatcttcggcgacatcctgtccgattgcgcggcgatggcctcaggctcgctcggcatgctgccgtcggcctcgctcggcccggtcgatcgcttcggccgccgcaaggcgctgtacgagccggtgcatggcagcgcgcccgatatcgcgggcaagggtatcgccaatccgctcggctcgattctcagcgtcgcgatgctgctgcggctgacgctgaatcgccccgaggatgcagacctgctggagcgggcggtacagaccgcgcttgcctccggtgcacgaacggccgacattgcggaagcgggtgcgaagaggctgtcgaccgcccaaatgggcgatgcggtgctcagcgcgctcgacatgatctcggccaaggagcacgcgtgatgcctgatgtcgccatgccccacatttcgcggcgttcggccctgacggtgatcgccgccggcggtgcgacgctggcgagcggacgggcatgggcacaggcgaccccgggccgcgcgatctatccggtcgcggtgccggtctatcagacccagttcgtcgcggaccgtatcggctacttcaaggaggccgggctcgactgcaagctggtgcagggcggcagcggcgtgaagacccgcgagatcatcgcctcgtcgcagggcgatatcggcatcggcgacgtcacccacccgatgcagctgaccaatcacggccgcgccgcgcgggtgctgctgccggtcgacacccggtcgagctcggtgatgttcatcctgcgcaaggatctgaaagagcagggcatcaactcgctggaggccttcgcacaatggaagcggcccgatggccgcaagccgatcgtctcggtctcctcgctcggcggcaccaaccatgtctgggcgtcctactacatggaaaccatggggctcgacgacaaggtgacctggatcggcaccggcaatgtcgacaccatgctgggctcgctgaaatcgaagcaggtcgatatcctcgtcagctcgctgtcgctgctgaacgaggcgcagcagcagggctggggcgaactgctgttcgacgggaccgatgaagcgatctggaacaagcatatcggcggcaaggtgcccgtcacggcgcatttcaccttgcaggcgaccatcgacaaggaccctgccaagatgcaggccttcgtgaccgcgttgtggcgcgcgtcgcaatggatcaagacgcacaagccgaccgagatctacgacgccatcgagccctatgtcggcagcacctcgcgtgaggccaatctgctggagatcacggcgatccagaaggtcgcggactatgaagggtcgatcgacgccgcgagttttgcgcgcggcgagaaggtctggttccgcgagatgaccggcatcaagccgctcaagatcgccgacgtcgtcaactcgaacctcatcgacgcggcacgaaaggcctatccgggttgagcgcgctggagacaagcgcaaccctatcgccgcgcgcctcggccgagcgccgcgtcgaagtcaagggcctgagcaagtcgttccagttcgcgaagaccacgatcgaggccgtgcgcgatgtatctttcgatgtgcgccgcggcgagttcgtggcgctgcttggaccgtcgggctccggcaagagcaccgtgctcaacatgatcgcctcgctgatccgcccaaccggcggcgagatcctgatcgatggcaagcgcgtcgttcccggcaaagcgacacctgatgtcggctacgtcttccagcgcgatacgctgtttccgtggcggaccgtcggcgacaatatcggctacgggctggagctgtcgggcgtgccggctcaggaacggaaggagcgcatcgccgaatgcgttgcgcaggccgggctcaagggatttgagaatgcctatccgtcggcgctgtcgggcggcatgcggcagcgcgcggcgctgatgcgcaccctgatcgtcgagccgcagatcctgttgatggacgagccgttcggcgcgctcgacacccacaccaagatcgacatgcacgaggtgctgctgcggatctgggagcgcgagcagcagaccgtgctgttcgtgacccacgatctcggcgaggcgctgaccctcgctgaccgcatcatcctgttctcggcgcggccaggccggatcaaggacatgtttacggtcgatttcgatcgcccgcgcgatgcggtgaaggtgcgcgagacaccgcattatgccgagctgttccagcatatctggcactcgctcggcgaggaattcgtcaagggccgcagcgcatgaagaggtatggcacgctcggcacgatcggctggcaggtcctgatctgcgccatcgtgctgtcggtctggcaatggggctacgacctgcgcgcaaagctgccttggctcgtgcccgatttgctcgatccgtatttcatctcgaagccgtcgatgatcttcgacaacttcctgatccagagctgcctgacctcgaagctcggcgtcttcaacggctggttcaacggcgagttcggaaaatgcctggcgcgcaacgagaacaatctctgggcggcgacggcgatcacgctgaagaacaccttcttcggcttcgtcaccggcgtggtctctggcttcgtcgccgggctgatcctcgggcggtcggatcgtctgagcgcgatcttccagccgttcatcaccgcagtgaattcgatcccgcggatcgcgctggcgccgatcatcgtgctggcgttcgggatcggcgacatgtcgaagatcgtgacgtcgtggatcgtcgtcgtgttcctggtgttcttcaacaccttcgagggcgcgcgctcgatcgacgagggcttcaccaatgccgcgcggctgctcggcgccagcgagtggcagatcacccgcaccgtggtgatcccctcgacgatggcctgggtgttcgcctcgctgacgcctgcgatctcgtttgcgctgatcggcgtgatcgtcggcgaattcatcggcgccgagcgcggcatcgggcgcctcatcatcgagtccgaggcgcgcggggaagcgtcgggcatgatggtcgcagtggtggtgctgatgctggtcggcgtcgtgctctcggcgatgatctggcggctgcaggcctatttgctgcgctggcagcggcagcgcagcaccgaatagacgagggccgtggtggcgtcgttccagccgccacggcccgcaggctcatgccgcggtttccgacggcgaggtctcgccgtcgagccaatcctgctccttcgccagcgcgcgccaggctgcttccattcgcttgaagcggttgtaggtcggcgcgtcgtcggcgcgctcggcaagctgcgcgcagttctccgcattgtcgaggaagtgctgcgattgcttcatggaacgtcctcctgttgccgaggacgtgggacatcaaatcgggctattcaacgtgtggaacatgagcatttcgccatacaggtgaatgcctgttcagcgagttccgtgtacggggcagcgcctcgcgcgaacccggaatccattcatccaccagttttgcggcccgatggattccgggctcggcgctgacgcatcgccccggaatgacgaagtgggttaggtcaccggcgccgggttgaacaacgtcagatcgttgtggatgccccagcggtccgaccatggcttggtgcgtccgctcgcgacgtcgaggatcaggcggaacaggtcccagccggtttcctcgatggtcttctcgccggtcgcgatgcagccggcgtcgaaatcgatcaggtccttccagcgccgcgccagctcgctgcgggtcgcgaccttgatgaccggggcggcggcaaggccatagggcgtgccgcggccggtggtgaacacctgcaaggtcatgccggaggcgagctgcagggtgccgcagatgaagtcgctggcgggcgtcgctgcgaacaacatgcccttctgccgcgccttctcgccgggcgacaacacacccgcaatcgggccggagcccgacttgacgatcgagcccagcgatttctcgacgatgttggcaagtccgcccttcttgttgcccggcgtggtgttggcgctgcgatcggcgccgccgcgggcaagataggcgtcgtaccaggccatctcgcggatcagcgcatggccgacatcctcgttgacggcgcggcgggtcagcagctggatcgcgtcgcgcacctcggtgacttccgagaacatcacggtcgcgcctgatcgcaccagcaggtcggcggcgaagccgaccgcggggttcgcagtgacgccggagaacgcatcgctgccgccgcattgcaggccgatcacgagatcggcggcgggacaggtctcgcgcttgcgggcattcagcaccttaagccgagcctcggcctgggtcatgatggcatcgacgatcgcgccgaagccgtcgaaggcttcgtcctgcatccgcacgatggcatcactgacgccctccggcaccagccgttccggcgcaagtttctcgcagccgaggccgacgacgaggatctcgccgccgaaattcggattgagcgcgaggttttgcagggttcggatcggcaccacggcatcgggcgccgtgatcgcgacgccgcagccataggcatgggtcagcggcacgacgtcgtcgacgtttgggtatttcggcagcagctcggcgcggatgcgcttcaccgcatattccatcgtgcccttgacgcattgcactgacgaggagatgccgaggatgttcttcgttcccaccgagccgtcgggattgcgaaagccctcgaacgtaaagccttcgagcggcggcagcgccggcggcaccgcggttgatatctcgagctgatcgagcggcggcgcgtcgggcatccgaatgcgcgcctcgtcgacccattcgccggccaggatcggcgacagcgcatggccgatcacttcgccataccggatgatcggcgcgccctcggcgatgtctgtgagcgccgtcttatgcccctgcggcacgaaggcgcgcaaggtcaggccgcaggcgaagcgggagcctttgggtaggccgaaatcattcacgacgatcgcgacattgtcgcgggcgttgagcttgatgaagcggggctgctcctgcgcgccgatcgactggtccatgatgcacgttcctcaaaagcaatgtgttggctgatgttctaggcggcgccgcgcattcccacctctccccagctgggagaggtcgcgccgaaggcgcgggtgaggggcgcaggtcccaacgagagagcgtaacccctcacccggattgcatctggcgatgcgttccgacctctcccacaaggggagaggtggcactttcgttgcggcgacggatgcaacttcatcttcaacccgggaacgtgtaagccgtcttcaccgtggtgtagaactcacgggcgtaggagccctgttcgcgcgcgccgtagctcgagcctttgcggccgccgaacggcacgtgatagtcgacgccggcggtcggcagattgaccatcaccatgccggcctcgctgttgcgcttgtaatgcgaggcgtatttcaggctcgtggtgcagataccggaggcgaggccgaactcggtgtcgttggagatcgccagcgcttcctcatagtccttggcgcggatcacgcaggcgaccgggccgaatatctcctcacgggcgatgcgcatctggttggttgcgcccgtgaacagcgccggctgcagatagaagccgggcgtctcgcggttcaggagttcgccgccccaatgcagccgggcgccttcgtcctgaccgatcttgatgtagcggaggtcctgatcgagctggctctggtcgaccaccgggccgacatgcacgccgctcttcagcgcgtcgtcgaccgagagacccttcatgcgctcggtcatcgcctcgacgaagcggtcatgaatgcctgcggtgacgatcaggcgcgaggaggccgtgcagcgctggccggtcgagaaataggcgccgttgacggcgacctcgaccgcgaccttgacgtcggcatcgtcgagcacgaccagcgggttcttgccgcccatctcgagctggaatttcttcatcggattggacagcacgcaggcctgcgcgatcttgcggccggtctgcaccgagccggtgaaggagatcgcggcgacgtcgggatgatccaggagcgtctggccgaccaccgagcccgagccgaccacgaggttgaagaccccggccggaatgccggaacgcgcgatgatctcggacagcgcatgcgctgagcccgggacgagttcggccggcttgaacaccaccgcgttgccgtagcacagcgcgggggcgatcttccaggccgggatcgcgatcgggaaattccacggtgtgatcatgccggcgacgccgaccggctcgcgggtgatctcgacatcgagacccggacgcaccgatgcgcccttctcgcccatcagccgcagcgcctcaccggcgaagaatgcgaagatctgcccggcacgcgccacctcgccgatgccttcgggtagcgtcttgccttcctcgcgcgccagcaggcggccgagctcttccttgcgggcgaggatttcgacggagattttggtcagcgcgtcgaagcgctcctgcggcgtcgagcgcgcccaggccgggaaggcggccttcgccgcggcgatcgccttttcggtctgtgccttgtcggccttggcgtattcgccgaccacgtccttggtgttggagggattgatgtcccgcgtgatgctggttccgtcgacccattcgccggcgatgaagttcttctggtgagcggtcatgtttctctccaaccttttgttgttagcgcacgaggcaaggacgcttgtcgtcgaaggtccagcccgggatcaggaattgcatggccagcgcgtcgtcacgggcaccgagaccatactgcctgtatagcgcgttggccgcctcgatggcaccgcgatcgagctcgatgccgaggcccggccgatccgggatcgcgatcttgccgtccctgatctgcagcggttccttggtcaacgcctggccgtcctgccagatccagtgggtgtcgatcgccgtcaccttgccgggcgcggcggcgccgacatgggtgaacatcgccagcgaaatgtcgaaatggttgttggagtgcgaaccccaggtcaggccgttgtcgcggcaggtctgcgccacccgcaccgaaccctgcatggtccagaaatgcggatcggcgagcggaatatcgaccgcccctaaccgcagtgcatgcgagagctggcgccagtcggtcgcgatcatgttggtggcggtcggcagcccggtggcgcggcggaactcggccatgatctcgcggccggagaagccggcctcggcgccgcaggggtcctcggcataggcgagcacgccatgcatgttgctgcacagccggatcgcttcatccagcgaccaggcgccgttcgggtcgagcgtgacgcgcgccttgggaaagcgttttgcaatcgcggtgacggcttcgatctcctgctcgcccgcgagcacgccgcccttgagcttgaaatcggcgaagccgtaatgcgcctgcgtcgcctcggcgaggcgcacgatcgcctccggcgtcatcgctacctgatggcgcaggttgaaccagtccgccttgccggtctcgccgtcgacgtagggcaggctggtcttccgccggtcgccgacgaagaagagataaccgagcgtctcgacgctggcacgctgctggccttcgccgagcaatgcggcgaccgggagattgagatgctggccgagcagatcgagcagcgcgcactccaccgcggtcaccgcatggatggtgacgcggaggtcaaaggtctgcttgccgcggccgccggcgtcgcggtcggcgaaggtctggcgcatcgaggccaggatgttgttgcaggcgccgatggtctggccgacgaccaggtcgcgggcatcttccagcgtcttgcggatcttctcaccgcccggcacctcgccgacaccggtgtggccggaattgtcggtgaggatgacgaggttgcgggtgaagaacggcgcgtgcgcgccgctcagattgaggagcatgccgtcgcggccggcgaccgggatcacttccatcgccgtgacgacgggggcgccggcaaagccgctgcggatcgagtcttgaatcatctgctcctcccttcgttgttcgtcgttcggcttattccgcggcctgccggctcgtcgcctgcggcagcttcgccaccagtgccgcgagctcggcaatctcctgttcggtgagatcggtcagcggcggccgcaccggaccggaattgcggccgatcaccttcatgccggccttgatgatcgacaccgcatagcccttcttgcggttgcgtatcgcgatcagcggcaggatgaaatccttcaggcctgcatggatggtctgatgatcgcgccggcgcaccgcggcgtagaattgggtggcgaattccggcacgaagttgaacaccgccgacgagtacgtcgtcacgcccatgtcgagatagggcagtgcgaaggtctccgcggtcggcaggccgccgatataggtcaggcggtcgccgagcttggtgtagacacgggtcatcagctcgatgtcgccgatgccgtccttgtagccgacgagattcgggcagcgctcgcagaggcgcgccagcgtatcgggctgcaggaccgcattgtcacggttgtagacgatgacgccgatcttcaccgacgagcaaatagcctcgacatgggcggcaaggccatcctgctcggcatgcgtgagatagggcggtagcagcaagaggccatcggcgcctgccttctcggctccgatggcgatctcgcgcgcgatcgcggtgccgtagccggtgccggccagcacgggaacgcggcccttggtctcctcgaccgcgatcttcacgacgtgcggaacttcggccggggtcagcgagaagaactcgccggtgccgccggcggcgaacaggccggcgacgtcatagccgcacagccagtccatgttggcgcgataggtcgcctcgtcgaacgagtaatccgcgttgaacggggtcacgggaaaagacaggagtccgccgccgatcttcgcggccatctcccgaggggtcatcttgctcatggcgccactccttgatgatgttgggaaggatgcgcgagcagcgcgcgtccatggcgatgtttctaggaaatgcttcgatgcgcgtccaagccaaacgcggtatcgagcgataccaactctgcatcaatcgccgcgcagctgcggcgctgcgatttcggttgcgatctcgatcaatgacggcagcagctggttctcgtgatcgcgccgccacaccatgaacaactcgaccggcaccggcgcgcgcagcttcagcggcttcagcttgacgtccgcgatcttgaggctggcggcggcctccggcacgatggcgacgccgagcccggcgcgcaccatcgcgaggatcgaatggatctggctgaggtgctggacatagcgcggcagcacgtcggcgcgggtgaacatcgacaccagcagatcgtgaaagtagcgcgcctcgtagggcgagtacatcacgaacggctggtcgtcgaaatccttgatgctgacggtctcgaccgccgccagcggatgcttcttcgggatcgcggcgagcagcggttcggcgacgacgcggcggcttgcgaattccggccgtgcgatcggcgggcgcagcaggccggcatcgatctggccggtggtcagcgcctcgaactgatcgccggagaccatctccttcagcgaaaaatcgacttcaggcaggcgggagcgggcggctgcaatcaggtcgggcaggaagccgtaggccgccgccgcggtgaagccgatcttgagcgagccggttttgccgagtgcgatgcggcgggcgacctgcgatgcggattccgcgagcttcaggatgcgccgcgcctcgggcaggaagctgcggcccgccggggtcagccgcaccgaacggctggtgcgttccaagagcggcgcgtcgatgatgtgctcgagcacctggatctgccggctcagcggcggctgggtcatgttgagccgtgccgcggcgcggccgaagtgcaattcttcggccaccgtgacgaaacagcggagctggctcaggtcgaacatcgatgctaaaccggaatggatcgcgcggggatttgtacgttctagcatcgatgcctcccactggccaagaagacaaaaaggcagacaaagacggcgaccgaagccgcctttgatatgctgttgctgcctgggctcaggccgccttcagctgtacccgtttgatctcgccgacgatgaagagataggcgatcgcggcgaccagcgcgttggcgccgacgaacaccaatgcgctgttgaacgagccggtggcggcgaagatgtagccgatgatgatcggcgtggtgatcgaggacagattgccgaaggtgttgaacagtccgccggagacgccgccggcttccttcggtgaagtgtcggagaccacggcccagccgagcgcgccgatgcccttgccaaagaaggcgagcgccatgaacccgatcaccagcgcctggctgtcgacgtagttgcagccgttgattaccatcgacagcagcatgccgccgacgatcgggatcttgcgcgccatggtcagcgagccggtacgacgcaggatgtagtccgagatcacgccgccgagcacgccgccgatgaaaccgcacagcgccggcaaggtcgcgacgaagccggcctgcaggatcgagagcccgcgctccttcaccaggtagaccgggaaccaggtcaggaagaaataggtcagcgtgttgatgcagtactggccgatatagacgccgagcatcatgcggttggcgagcaactggcggatgtggtcccagccggggccgctgtcctgcgtcttgccagccttcgccgcatccatgtcgaccagcgcgccgccctgcttgatgtagtcgaactcggcctcgttgatcccgggatggtccttcggctcgtagatcgtcttgatccaggcgatgcccatgacgatgccgagcccacccatcacgtagaacacgtggcgccagccatgctcatgggcgatccagcccatcagcggcgcgaagatcacggtcgcgaaatactgtccggaattgaagaaggccgacgccgtgccgcgctcattgcctgggaaccaggaggcgacgatgcgggcattggccggaaacgacggcgcctcggcgatgccgaccaggaagcgcaacccgaacagcagcaccacggccgcgccggcggagaggaacccgaccaggccctgcatcgcggtgaagatcgaccagacgatgatgctgatcgcatagacccatttggagccgtagcgatcgagcagccagccgcacggcacctgggcgatcacataggaccagccgaaggcagaaaacacgtaacccatcgcgacggggtcgagatgcagttccttggagagggcggtgccggcgatcgagagcgtggcgcgatcggcatagttcacggtggtgacgagaaacagcatcgtcacgatcaacagccggacacgggatcgccgcgcatccgtggcggacacaattgcgctcattagcgcctccttggaaatttcctcggggtctttcctagagagatgacgacaatgggtccaagccgaaacgggtattgatcgatgccgattttgaatggatcggcccggtgtcattccacccacgtcgcacttgcgtcggctcctaattagtgtacgatacgtacagttattaagggcgcggcatcgcgccctgccgatcgaggtgaccgcgcatgaccacgccacgcgactatcaggtgtttgaagcaggttcagcgaccttgcagggcggcgccgtgtttccgcggctttcgctcgcctaccagacctacggcacgctgaatgcggccaaggacaacgtcatcctttatccgacgtcgttctcggcacagaataccgacatcgaatggctggtgcagccgggcggcgcgctcgatcccgcgcgctacttcatcgtcatcgccaatctgttcggcaatggcctgtcatcctcgccctcgaactcggccgaggtgctcggcggcgcgccgtttccagctttcacttactttgacgcggtcgccatccagcaccggctgctggtcgagcggttcggcgtgagcaggctcgcgctggtctacggctggtcgatgggcggcatgcaggcctatcattgggccgcgcgctatcccgacctggtggagcgcgcagcggtggtctgcggcagcgcaaggtgctcgccttacaactatgtgtttctcgaaggcgtgaaggccgcgctgaccgccgatcccgcctaccgggatggccgctttgttgacaagccgaccgcgggccttcgtgcgatgggacgcgtttacgccggttgggcgatgtcgcatgaattctatcgcgaggagctctggcgcgcggccggcttcgactcgctggaaggctacctcgcaggctcgtgggacggtgccttcgcgcggcgcgacgccaatgacctgctggcgcagatcgcgatctggcaggccggcgacatcagccgctgcgacgaattcggcggtgacttcgatcgcgcgctggcggcgatcaaggcgcatgtcctgctgctgccgggacgtaccgaccgctatttcgacccgcgcgacaacgaggatgagctcagccgcctggtcaatgcgcgctcggccgtgttgcacgccatcccctcgatccatggccaccgcgccggcaatccgatcaacaacgcggaagaccgcgccttcatcaacgccgaaatctcggcgctcctccaacgctgacaggtgagacgaccatgagcacgacagagaccagcaatgccggacctcgcctgaagccgctcgacccgctgaccttgcgcgacctgtcgaccaagtcgaaccttgccggcgcggtgcgcgcggccagccattacgggatgatcctgatcgtgggcacgctgatatggctggccgcttcgcgttatggactcgcatgggcgctgccgctgatcgccattcagggctacttcgttgcgtttctgttcatggtggtgcacgagaccgcgcacaagaccgcatttcgcagccccgtgctcaacctagtcgtcggcaatctctccgccttcatgatcggtttgccctatcaatattactgcctgtttcactgggatcatcatcgccatacgcaggatccggagaaggatcctgagctgatcgtcggtcccaggccgatgtccgacacccagcttgcgatcgcctattcggggctgctgcaggtgttggtccggatttggctgatgttccggcatgcactcaccgggaaggtgatcgtgccgtggattccgcagcacaagcgcgcatcgatcgtgcgggaagcgaggctctatctcgccggatatctgctgctgctcgcggcgtcgctcgcgctgcacagtgcgatcctgctctttgtgtggattgtgcctctgctggccggacagctcatcctgcgcccctatctctacgcagagcataccggttgcgagcgaacgcgaagcgcgttcgagaacacgcgcaccacgatgaccggcaggatcatgaaatggttcgcctggaacatgccctatcatgtcgagcaccatgcctatccgacggtgccgttccatgcgttgccgaagctgaacgccatcgtcgatggccacatcgtctatcgcggcagcagctaccgcgccgtgacgcgcgagacctgggcctggtttcgccgccagcggcagcgctcggcctaagcgtcggcgcgcggccgcagcacgaggttgacgagattgcgggcataggccggcgtcaacggcttgatgccgaagatgtagcgatagaacaggctgccgtagatcgcgtcgtagatgtcgccgggtacccccgccgcgccgatgctgccgtccttctggccggcggtgatgatctccagcatcctggtgcgccgaaggccgagataacgctggtagaacaactccgccgtgccggtcctggagatgcattccgagatcactgcgagctgcacccgcccgaactcgccctgcaacgcctcgacataggtcgcgacatggcggcggatgcgggccaccggattgccggcctcgggcagcggcacggcccgcgaggcctggtcgaggaaggcatcgatcagcaaggcctcgcgcgacggccaccatttgtagatcgtcatcttcgatacgttggagtgcctggctatcgcgtcgatcgtggtggcagcaagatcggtggtcgccatcagcgtataggcactttgcaggatcgcggccgtggtcgcagccgagcgcggccggccgcgccgcccggttgccgcatcctcagtctccgccttgctgcctgccatggccggattcacgtcctgcgtttgaatcatcgtttcatgtatcggcatagcatggaatcgagccctggatgagaccagcgccgaaaccggaccgtcacagcgggacgtggcgggcttgcgcgcctgcaaccaaagtcagatcatgccgttgataatcggcattggcttgtgattctcgccgctcggcatcggccggccggtgggcagtagcgcgaggacggccatgactgacctgcttcgcatcgccatcgtgggtttcggcgagatcgccggccggcagcacctgcctgcgatcgcgaagacatcaggcgctgcggtcgttgcggtggtcgatccggtcaagactccgccgggcctgccgcatttccgcgatctgcaggaattgttgcgcgatgggccggagatcgacgcggtcgcactgtgcacaccgccgcaggcgcgtcatttgcaagctgccacggctctcgccgcgggcaagcatgtgctgctggagaagccgccggggtctacggtcggcgaactcacgccattgatcgcggccgcacaggaggcgaacaggacattgttcgcgacatggcattcgcgttacgcacccgcgattggcccggcgcgtaagctgctcgccggccgcacgatcagcaaggtcaccatcatctggaaggaagacgtccgtgtctggcatcccggccaggcctggatcttcgaggcgggcggcttcggcgtgttcgatcccggcatcaacgcgctgtcgatcctgaccgagatcctgccgcgctccgtcttcatcaagagtgcggtgctggactttcccgccaatcgtgaggcgccgattgcggcagcgatcgaactgtccgatgggagcggcttgccgatccacgccgagttcgattttcgccaggccgggccgccgagctgggacatcctgtgcgagaccgaggccgggcccgtgacgttgtcgaaaggcggacggcagctgcgcgaccgcgacgggctggtggtcgatgccgcggacgatgaatatcccgcgctgtatcgccgctttgtcgcgctgacatcgggtggaaaaaccgatgtcgacctcacgcccttgcggctcgtggccgatagcttcatgctggggcgacggcgcctcgtcgaggcgttcgaggcctgaacatgacatcagccagcattgcgcgcgcccccttcggcacattgcacgacggcaccgtggtcgaacgcgtgacgttgcgcggcgatcatggctttgaagccgcgattcttcccttcggcgccacgctgcaagcgctactggcgcccgatcgcggcgggcattgcgacgacgtcgtgctcggccacgacgcgttcgatggttacctcacgcagcgcaaattcttcggcgcgaccatcgggcgctacgccaaccgcatcgccgccgcgcgctttgtgctcgacggggaggcggtgacactcgacgccaacaacggccccaacgcgctgcatggcgggccgcagggctttgatcgcaggctgtggcggatcgtcgaactgtcggatcagccggggccaacgctggtgctggaacgcgaaagcccccatggcgaagagggttatccgggtactctccagacacgggtgacctatcgcgtgcacgctccgatggaactctcggtcacctatgaggcgacgaccgaccggccgacctgcctcaatctcaccaatcacagcttcttcaatctcgatggcgcgcgctccggcacgcagatcctggatcaccggctgacgatcgcgtccgaccatttcctcgcggtggacgccaccgcgatcccgttgccgggcccgtcgcggccggtcgacggcacgccgttcgacttccgcaaaccgacggcgatcggcgcgcggatcaggatgaatgacgagcagctgcggctcgggcgcggctacgaccacaatttctgcctggccgcggggacgggccttcgctttgccgcgcgcctcgaggcgccgcacagcggccgcgtgatggagctgttcaccgatcagccgggattgcagttctattccggcaatttcctcgacggctcgaccgcgggtaagggcgatcggctgtatcgccaatccgacgcgctttgtctcgagccgcatgcctggccggatacaccgaaccggcccgattttccgtcggcgcggctcgatcccgggcagatctatcggcgcagtatcgtctaccgcttttcaaccgtgtgagtgacgccatgaccgatcgtgccgccgagccgcttctcgaagaggtgccgacatccgtgctgtcggccgagcgttgtcatctcggtgagggcccgacctatgatgccgcgaccgacaccgcctggtggttcgacatccgcgagcgtcgcctgttcgagcatcgtcttgcagatggccgcacgatcattcacgcgctgccgaagatggcgagcgcgttggcgcggatcgatggcgagcggcagctgatcctgaccgaagatgggctttatgtgcggcaggtcgccggcggccatctggagctgttcgccgcgctggaggccgacaatccggtgacgcgctccaacgatgcgcgggtgcacccgtcgggcacgttctggctcggcaccatggggcgccaggccgagcagggcgcgggcgcgatctacgcgctgcagggcggccgtatcacgcggctttatcccgggatcacgatcccgaacgcgatctgcttttcgcccgcaggcgatgtcggctatttcgctgacaccgcgaccaacgtgctgcatcgtgtgccgctcgatccggcaacgggattgccgaccggcgagccgattgatctgatcagacgtcaaggcagcggcgggctcgacggtgcggtcgtcgacgccgacgggatgatctggaacgcgcgctggggcggcggctgcgtcgatgtctacgatccttcaggccggcacctgcgctcgctgaaggtgccggcgcgccaatcgagttgtccggcctttgtcggccgcgatttctcgcgcgtactggtcacctcggcctggcaggacatggatgcggcgcagcgcgccgctgatcccggacacggtcaaaccttcctgctcgatgccgcggcacgcggccgtgccgagcccgacgtcaagctgtcctgattgcggcctatggccgccttgttgacgtgacctgaatatttggacgatagtacaaatatggtccgcaaacctgccaaatccaacgtgaaggccgccgcgaaggacacgagcacccgcaagccgaacatgcgcgaggcgatccttgccgcggcggaggagttgttttcgacgtatggcttcaacgccgtctcggtgcgcgacatcgcgcaggccgccggcgccaatcccggcagcgtgacctatcatttcaagaccaaggacggcctgctgctcgagatctatcggcgccattgcggcccgatgaaccggcggcgctccgagcttttggcggcggcccggcgggtgcgcgatgtgcaggacaggctggaggcgatcgtgcgcgcctatgtgctgccggccttcacctctggcagcgaccttgccggcggcgggacgcggttcacgcggttgcgcgcgatcatgtcggccgagggcaacgaggtggtgcgcaagatcatcgcgcagaccttcgacgacaccagccatgccttcatcgacgcgatccatgacagcctgccgcatattccgcgcaccgacctggtctggcgcggccacttcctgctcggcgcgctctactacacgctggtgacgccggagcgcgtctcgcggctgtcgcgcggcagcgccgagggcaccgatgccggccatgccatcgaggagctggtgcgcgcgaccgttgccgcgctgcaggctccgccgctcgatccggcgatatcagcgccgcgcagggcgccgggctttactccaggacgagcactgacctgaccctgcggagttcatcgccatggagaaacttcggctgcgcgcggtgcttggcaatcacccgcacatccaggcggtgaagcgcggtgagctgcgctccgacctgttcgatctcgacttcaccgagttcacgccgaccaacgctgccttcaagccgatggtgcgcgagcaggcattcgacgtctgcgagatggcgatcgtgacctatctgatggcaagggcgtacggcaagccgctggtgctgctgccggcggcgatggtcggccgcttccagcatggccacgcgctctatcgcgccgatcgcggcacgcttgcgcctggtgatctcgaaggcaagcgggtcggcatccgttcgttcacgaccacgacgggggcgtggatgcgcggcatccttgccaatgaccatggcgtgaacctcgaccggatcaattgggtgacgttcgaggatccgcatatcgccgaatatgtcgaccgcaccgaacgggcgccgaagggcagcgccatcatcgagatgctgaagcgcggcgagctcgatgccgtgcttggcgaaacctcgagtgatccggcgctcaagccgttgttcgccgatccggcggcagaggcggcgcggtggtacgcgcggcatggcgtcgtgccggtcaaccatctggtggtggtgaccgaacagctcgcgacgtcacggcccgatgtggtgcggagcctctacgatctcctcaagcgcgccaaggcgaacgccggtccggcgggtgtgccggacctgctgccgttcggcgtcgaagcaaaccgcaagccgctcgaactgatgatcgactattgcgcacagcaggcgttgatcccgcggcgcgtcacggtcgacgagctgttcgacgccacaacacgggacttgaattgatgacaatctcgagcgatccgcggcaatggcaggtcggcatgctcggctatggcgaggtcggacgcatcctcgccgaggatctgcgccagcagggtatcaaggtcgcagcctacgacatcaagctcgaccgcggccagggcgcgccattgcgcgcgcacgcggcggagaccggcgtcgtgctcgcggaatcgcatgccgatctcgcggcgcgggccgatctcatcatctcggcggtgacggcgagccaggcggtcgccgtggccgaagcctgcgcgccggcaataggcaagggtgcctggttcctcgatttcaactcggcctcgcccggggccaagcaacgcgccgcggcccacatcgacggcgccggcggccgctatgtcgagggcgcggtgatgacctcgctgccgccgtcccggatcaaggtgccgctgttgctcggcggtcggggcgcgcgggagctggcgccgtcactgatcgcgctcggctttgcggcaaaggtcgcgagtgacgagctcggtgtgtcctcggcggtcaagatgtgccgcagcatcatgatcaagggcctcgaggccacggtgatcgagagcttcaccactgcccgcgcctatggcgtcgaggatgcggtgcttgcctcgctcaaggagacttttcccggcatcgactgggagaagcagggcgcctatttcttccagcgcgtgatcgagcacggccggcggcgcgccgaagaggtgcgcgaggtggcggagacagtgcgcgaggccgggctcacgccatggtcagcttccggcaccgccgagcggcagggctgggtcgccgatcttgccgacgagggcgtgttcggggccaagggaacggctgaattcgcccgcagcgccgattggcgcaccgaggccgaccggattctcgcgcgcatcaaatcctgagggcagctgcggagaatccgccgcgttccctgtcggcgcgcaatgcgctattgctccatgaacagttttgtcttggagacacgcccatgaagaattcccccaaggtcgtcgccatcaccggagcggcgcgcggcatcggcaaggcctgcgccgcgcgcttcctggccgatggcgccagggtcgtgatctcggatgtcgacgccgccgggctcgtccacgccgcccaggagctcggacatgacgatcggctgcggaccgtcgaagccgacgtcagcaagcgtgccgatgtcgatcgcatcgtggctcacgcggtgaaggagttcggtcggctcgacgtcatggtcaacaatgccggcgtcgcgcgcaaccgcgacttcctcgagatcagcgaggccgagttcgacgacgtgatggggatcaacctcaagggcgcgttcttcggcgtccaggccgcggcgcgccagatgatcgcgcaaggcggtggcggcgtcgtcgtcaacatgtcctcggtcaacgcgctgctcgcgatcccctcgcttgcgacctacgcgatgtccaagggcgccatgaagcagctcacctccgtggccgcggtggcgctggcgccgcacggcatccgcgtcgtggcggtcgggcccggcacgatcctgaccgagatggtggcaacggcgatcttctcgtcggaggacgcgcgacgcagcgtgctgtcgcgtacgccggccggccgctgcggcgagccgagcgaggtcgcttccgtcgtggccttcctcgccagcgacgatgcctcctacatcacgggacaaaccatctaccccgacggcgggcggctgatcctcaactacacggtgccggtcacggagaagaagtagggcgccgccaaaatatcgaaaacaaccccatgcaaaggagccgccggtagccggttgccggtcttcgatcagggggagttgacgcgtcgggcaactcagtggaataattccattattccgaaatcgtgcaaacggcgtctccgaaatgtcgcgagaacgccggcgtatgactcacagaccgcgccgcactttcccgtgtcgtcccggcgaaggccgggacctatagccacaaatccggattgttgcgcgatgctggaatgacgagtcccttcaacaacagccgccgcggagtatgggtcccggccttcgccgggacgacgcaggatagctttcgccgggacgacgccgcagggagccgcgcaccagtgtctcaggaatactggatcacccgcttttcgcgtgccggtgatgacaccgcatcgctaccggcccttgaactgcggcttgcgcttttccatgaaggcgttgcggccttcgcggaaatcggcgctgtccatgcagtcgatgccgatctgcctgatcgcggccatgtcgcggtcggcgggatccttcagcacctgcgcgatggtgatcttggcggccttgatcgccagcggcgcgttgcctgagatggtacgcgcgatctccatggtcgcgtcccagagctcggcatccggcagcacccgatcgacgaggccgatccgcagcgcttcggcgcaatcgatccgcatcccggtatacatgatcagccgggcccatgacgggccgaccagcgacaccagatggcgcagcccgtcatagccgtaggcgatgccgagcttggcggcgggaatgccgaactggccgctgacgccggagatgcggatatcggtcagcatcgcgacctgcatgccgccgccgagacagaagccgcggatgcaggcgatggtcggcttcgggtagtcggcgagcaaagcgcgctgggcggcgctgcgccgtgaatattcctcggaggcttccgcgttatggcgggtcttctcgaactggctgatgtcggcgcccgacacgaaggccttgtcgccggcgccgaccaggatcacgacacggaccgccgggttgtcgcgcagggcggtcagcgcctcgccgagcccttcccacatctccagcgacatcgcattgcgcttgtcgggattgttgaaggtgatgacgccgacgccgtcgaccacgctttgcaaaatcttgccgtcggcaagcgatcgatctgaggtgtttggcatggcggggtccggtgtgatttcggctaagcctagcaccccggcggaagccgaggcaggccgtttagggcacagcgcgattgcatcggtagcagatgtgcccacgagcagaccgaccgatgattggttgcccgacggacgagccccaccggtccactaggccagctgttccggatcgtcggccgcgcgcatccgcgcgatactgtcctccgtcgctgcgctacctgccgccgcgatcgcgatctcgcgcgccagattggtgcattcggcccacagcaggaagaacaccagcggcggccgctcgcgtgcctccagcatctgccggcagcggtcagcagcgccgtcgagcgcccaccactgccgggcgacgaccatgaccttgcggaagctgcgcagcgtgccggagaatttttgcggatcggcattcacgatggcgccgcaatggttcagccagttcagcgccgcatagatcgcgatgccgtagtcctcgatcgctgtgcccgtgaaatcgacgacggtgctgtcgtgcgcgcgctggcgcaggaaagcgtcgatggtctcggcctggctggcaggatcgaccagcagcgcgggttccttccgcggcaccatcgggatgtaacgcatcgcctcgaggcgggtgtgctcccagaccgccctggcatcgccgagcaggtcgccgggcttgcgcttgcaggccggatagaccagcacgccgttgtcggcgagatcgagatagcgcggcaccaccttgtcgagcgcggcgagaaacgccgcgggatcggtgagcccgcgcaggtcgctggcggcgtcctcggcttgtgcaggcttgttgacgcgtgtccagccgaaattggccatccccggggcgccccgatcccaacctgccggtcaggttaattggaaaatgcggcgatgcaaatgcggcatttgccactgcgcgcccgtgcgtgctgccggttgacgcgggaaagcgccgcgcctagctgatggttaacagcatgcaacgcaggttgccgccgctgtcgggacgcatcgccatgaccgcttcggatcgccaatcgcattggcagaccgtctatctgaccaagggcgagcagcaggtgagctggtcgcaagccgatccgcagccatcgctgcgcctgatcgaatccgtcgcgccgggacgggatgcgtcgatcaccgacatcggcggcggggcctcgcgccttgtcgatgcgctggtggccggcggctttcatgatctgacggtgctcgatctctccgaagcggcgctggcgagcgcgcgagagcggatcggcgcgagaggcgaggcggtgcgctgggtcgccgacgatgcgacggtctggcagccgccgcaggccttcgacatctggcacgaccgcgcggcgtttcatttcctggtcgaggagaaggatcgcgccgcctatctcgaccggctgcatcgcggcgtcaaggcaggcggccacgccgtgatcggcaccttcgcgccggacggtccggagaagtgcagcggcctgccggtgcggcgctatgattccgcaacactcggccggaccatcggcccggcattcgagttgatcgcgcatgaggcgcaccggcacgtcacgccctggggcgcgacgcagtcgttccagttcaatgtgctgcggcgcaggtgagcggccgcggagggagaggtgagatgacggacgcgccacggacgatcggcgagatcgcgagctatcacgcccatgtctattacgatcccgcaaccagccggggcgaggctgaacgcctgcgcaactggatgggcgagcgcttcctggtcacgctcgggcgttggcacgacgtcaaggtcggcccgcacgatcaggcgatgtatcaggtggcgtttgcggccgagctgtttccgaccctggtgccgtggctgatgctgaaccacggcagcctgagcatcctggtccatcccaatacgaccaatccgcgccgcgatcatcgcgacgatccgctctggatcggtacgccgctcgccgtccatgccgacaagctgcccgaggaggcggacatggagcaggcgccggcgccgaacacgtcgccgacattgcgcccctgagcgcctgaagcccgttggcctgatgcgtaaagtttgacgcaattcaattacaaccaagtcgtttcaaactcatcgcgttctgcaacgtcaggttaagtcgccgttcctaggctcaaccgactatttcagggttgggcgcattgggcatgttcttttcattccgaagctgggcgctgtggcgggtcgttgggcccctgctggcgatcgtgctgctgctgggtggcctgtcggccggcagcctgcaggtgatgtccgcggtcagggcctatgtggccggcgagagcatgtggtcgaaggggcagaaggacgccattcactacctccagacctatgtcagcaccggcgcgccgctctatctgcagaagttcgacgccgcgatcgcggtgccgctggccgatcgcacggcgcggcgtgcgctggaggcgccgggcaacaacgacgcggtggctcgcgccggtttcgccagagcgggcaatcatgatgacgacatcggcggcctgatctggctgttcaaatatttccgcaagatgcaccacgtggccggcgcggtgacggcctggcgcaattcggatgcgctgctcgatcagctgatcgaaatcaggaacgaggccgcgaacgacgtcgcgctgcatgatccctcggctgcgaccatcaagcactgggccgagcggatcggtacggtcgatgccgcaatgagcacgcttgccgtcgatttctccgaccatctggggaaggcctcgcgtcaggtctcggcgctgctcttgctggtcaatctcgtgatcgcggcctgccttgccggcatcgtcctggtccacacccggcggatgctgtggcggcgctggctggccgagaccgcgcttgccgtcgagaaggagcgcgcccagctcacgctggcttcgatcggcgatgcggtcatcgtgaccacgcaggacgatcgcgtcggctacatgaacgccgccgcacagcggttgatcgcggcggaacaggacgtaacgggatggcagctttcatcgctgttcaatatcgccgagcagccggtgcgcggatcgttccagagcgcggatgccgatgacgaaagccggccgcagcagcggctgctggtgcggccggatcattccagcgtgccggtctcggtggtcgagaccgcgatcgtgcatgaaggtgagccgtccggacgcgtcatgatcattcacgacatgaccgccgagcggcggctggtcgaggaattggcgtgggctgcctcgcatgacgcgttgaccggccttgccaaccggcgtcagtttgaattcgaactgcacaaggccatgtcgggcgggccggcgacgggcgccgatctgatgctgatcgacctcgaccagttcaagatcgtcaacgacacttgcggccacatggccggcgaccggctgttgaaacaggtggcgcggttgctgaccgccgaggtgggcggcagcggactggttgcgcgtctcggcggcgacgaattcggcattctgctgcgcgacgacggcgccgccacgcacgacgttgccgccgacgtcgcggagcggatcagggcggtggtcgagcagtcgaacttcgtccatgagggctcgagcttcaggatcagcgcgagcatcggcctggtcgggcttgccgacagcgccggcgtgcaggacgcactgcggcttgccgacgtcgcctgcttccttgccaaggacaaggggcgcaaccgcgtccaggcgcaccgtccgtccgataccggcatggccgtgcgggtcgccgagatgagctgggtcaatcgcatccgcaagggattggacgaggggcgcttctgcctctacgagcaggagatccgcccggtcaacggcgtgctgaagggcaacgatcgccgcgagctgctgctgcgcctgcgcgacgagagcggcgccctggtgccgcccggcagcttcctgcccgccgccgagcgctatgggctgatgccgctgatcgaccgctgggtggtgcgtcgcgccttcgagatcatcgccgagcgcaagcaccatccgcgcaagatcgcgagctacgccatcaacctgtccggcgccaccatcggcgacagcgacttcgtcgacttcgtcgccgcgctgttcgcgcagcacgacgtgccgccggcgctggtctgtttcgagatcaccgagaccagcgcgatctccaatctcgacgaggcacagacgttcattgcgcggttgcgcgagatcggctgcagcttctcgctcgacgatttcggcaccggcatgtcctcgatcgcctatctgaagcatttgccggtcgacatcatcaagatcgacgggtcgttcgtgaaggagatcctgaacagcaaggtcgatcgcgcgatggtcgagatgatcaccaagaccgccaagatcatgcagaagcaggtggtcgcggaattcgtcgagagcctcgcgatcctggacgagctgcgccagatcggggtcgactacgtccagggttacgcgatcgggaagccggtcccggtgctgaccctccgggaagaaaagatcgcctgagtcgccgaaattgtcccgaatcgggacttttgggtcatttcggctgtttctggggctgattccccggcattttccatccgaaaaacgtttaaaaatcctctcgttgcccgctccgtctcgattatgccttactctaattccctgatatgatgagcgatcggtgaatcccacgtgggccggccaacaggccccagaacaccgaacttggggatgatgggtcaacatacgacgaaagctgccgggcgtaagtcgagccgcggcatgtctctgatgggcagcacggcgttcgccgtgacggcgctcgtcatgtcgtctggccttgccgcctggatggtcggcatcgacccgaccgcgtggctgcacggaccagcgttcgccaacaccaccgcatcgctgaacttcgacgatcgcttcggctcgcgctccaccatcaacacggcctcgctgtattatcccctccgccgcggattccgttcgagccgcggcgatttcaattccgagttcggtcagatcgaggacgcgctggccggccagctgcgcgatacgcagaccgagttgcccggcagccagccggcgtcggcgtccgtcgccgcgacgaccaacacggcgacatcaggcgtgccgatgccgcggtcgcggccggccgaggccaatctgctcgcgcgcaatgatctgccgatgccggcgccgcaggcacctgtgccgcagggcgacaaccgcacgttcctgcagaagatcgccgacatgatgccgggcaagctgcagctggcctcggtcgatccgaatgacggcttgttgtccggtccgagccccgatctcggcgcgctcggctatgacagcaccacggcggtctatgacattaccggccgcatcgtatacatgcccgacggcaccaagttcgaggcgcattcaggtctcggcaatctgctcgatgatccgtcgcatgtgaacgcgcgcaatgccggtgcgacgccgcccggcatctatgagatgaagccgcgcgaaaagctgttccatggggtgcctgcactgcgcatgaccccggtcgacggcagcgatacgttcgggcgtgtcggcctgctcgtccacagctacatgctcggaccgaacggcgactccaacggctgcatctcggtcaagcactacgacaaattcctgcaggcctatcgcagcggcacggtccggcgcattgccgtcgtgatcagcatcaaggacgtcaagtcggcctcgacccgcgcagcgtcgaattcctaaatccgcacgccggcaccgccggcgcgtcaacccctgcttcagttcgtctcctggtcgccggcgcggatagcgccgggcgaggtgccataggcgcggcggaacgcacgggcaaaactctcgtggctcttgaacccgacacgcaacgcgatctcgccgatcggtagatcgttcaatcggggatcacgaagctggttgaggctgtggcggagccgcgcgtcgcggacatgcgccgcgaagctcgttccggcgtcggcgagcacggcaaacaaatggctgcgtgagatctgcagatgccggcagatatatttcgccgagagttgcggattgtgcagctcgtccaggatgaaggtctggatctgccgcagcatcacttcgcgctgtgatgccgatccggccgccggcacgccgatggtggtcgcgcgcaccagcaggctctcgagctggctggcggcgaggtcatcgaccagcgcgaaatcgtcggggatatcgcgcagcgcgccgagataggcggaggcgagccggcccgcgccgcggccggcgatgacgttcggcggccggcccggcatctgctgcaggtgccgccgcagccgcgtgccgggaatcgtagcgcagatcaggtcgcagccctgctcgaaccgcatcgcgaagggctcgttggtgtcgagcaggacgatgtcgccagggcgcgccagtgtcttttgcccatactgctcgaccacggcatcgccggcgatctggagattcgcgaagaacgatccatcctggaaactgccgattcccttccgcgtgcgatggatggcattgggcacggactgcacgcgcgacaacggcagtgccgcgctgccgatgctggtgatggcgccgtcgaaatcgtcgggcgagatcttctccggctcgagcggcagataggtttgcagcaccgcttcgcgccaataggcgaagcggtctgccggtgcgacgtcgtgcatattccaggtagcgcccatgttcgcgtgccggagtttgcctgtcaggacggaagccggcggcgagcttacaatcaattgccgtgccagtcaggcggacattttgccaaaccggcgtggacgcagtgtcaatgacttcggcaggccggcatctcaccttcggtcattcgacccgccggaggagagacgaccatgccgatcgatttcaccctgaccaaggaacagcgcgagctgcagatgtctgcccgtagcttcgcgcggactgtgctttcaggcgtcgccgacgcaacccgccatctcgccacgcctgcggagcgcttcgcggccacgcggccgttctacgaacaggtggtcaaggccggcttcctgcgccggatgatccctgcgccgctcggcggcgagggcaccggcgtgttcgacatggccatcgtcgccgaggagtttcagtccgtcgacgtcaacgtctcgctgacgttgttcggttcgctgctcggcctgatgccggtaatgctggcgggctcgccggcgcagcagaagacgttcatcgcgccattcctcgaacgtgccggcgcgccgctcgccgccttcgccttcagcgagcccggcggcagcgcgaactttgcctcgccggtgccgggaacaggcttgcggacggcggcgcatctcgacggcgaggactgggtcatcaccggtgccaagcaatgggtgtcgagcgcgaccggctgggacggcaacggcgccgacctgatctgcgtggtctgccgcaccgatcccgccgcggcgcccgacagcgcgatttccgtgatcgcagtgccgcggcccgccggcggcatcaagggcatcgcactcgagcgcgcggccgacctgatgggccatcgcgcccatctgacgccgcgcttccggctcgagcaggtccgcgcgcccagggacaatgtgttgggaggcgccggcggcggcctgcaactggtggagatgagctttgccggcaccgccgcgctggtcggcgtgttcggcgtcgccctgatgcgcgtcgccttcgactacgcgctgaacttcgcccgcagcgagcatcgcggcggcgcggtgccgatcatcgcaccaggcggtcggctacgcgctggccgacgccaagatggcgatcgaggcggcgcgctatctgagctggaaggcctgtcacgccatggacagcaatgcgcccggcgccttcgaactcgcgctgcacgccaaggtgttcggctcggaaaccgcggtgaaggtgatcaccgacctgatgcgcgtggtcggcatcggaagctacgaccaccaatgtccgctcgccggtctgttgcaggatgcgatggcctatccgttgttcgacggcggcaacatgggcgtgcgccgccgccaattgcatacgctcctgaagagtccgggctacgatccgttgaccgcgtccggtgcggcctaacggttccctctgcagcctcccgcaaaccgcgtcatatcgccttcagtttccgctggaggtggtgtggcgcggtccgcatttcgatatctgtatactgcaaaggcctttttagattattataatacctccatttgcaaaaaatgggagtttatgtatacataaagtatctgaaacgacccccagagggcgagcgatgccaaaacccttccccatgaacgcctggtatgcggccgggtgggacgcggagatcaagcacgcgctgctgccccggacgatctgcggcaagcacgtcgtgatgttccggaagggcgacggcgaggtggtggcgctcgaggatgcctgctggcatcgcctggtgccgctctccaagggccggctcgacggcgacaccgtggtctgcggctatcacggcctgaaatacaatgcgcagggccgctgcacgttcatgccctcgcaggagaccatcaatccgtcggcctgcgtgcgcgcctatcccgtcgtcgagcgccatcgcttcatctggctctggatgggcgatcccgcgctcgctgatcccttgctggtgcccgacatgcactggaatcacgatccggcctgggccggcgacggcaagaccattcacgtcaaatgcgactaccgcctcgtcgtcgataatctgatggacctgacgcacgagaccttcgtgcacggctcgagcatcggcaatgacgcggtcgccgaagcgccgttcgacgtcacccatggcgagaagaccgtgaccgtgacgcgctggatgcagggcatcgaggcgccgccgttctgggccaggcagttgcagaagcctggcccggtcgatcgctggcagatcatccgcttcgaggcgccgtgcaccgtcaatatcgacgtcggcgtcgcgccggccggatcgggcgcgccggagggcgatcgctcgcagggcgtcaacggctatgtgctcaacaccatcacgccggagaccgagaagacctgtcattacttctgggccttcgtccgcaatcaccgcatcaccgagcagcgactgacctcggagatccgcgacggcgtcgccggcatcttccacgaggacgagatcatcctggaagcgcagcagcgcgcgatggacgagaatccggaccgcgtgttctacaatctcaacatcgacgccggcgcgatgtgggcgcgccgcgtcatcgaccgcatggtggcgaaggagaatccaccgcagctgcaggcggcggagtaggcggcatggcggagcgcgaggccgaacgttcagtatcgcagaccgtgcgggcgcagctcgcgctgcgtgagctgatcgtttccggcggcctgcggccgggcgagcgcatctcggaactgcaggcggtcgaggtcaccggggtctcgcgcacgccggtgcggatggcgctggttcggctggaagaggagggcctgctggaggcgatcccgtccggcggcttcatggtcaaggcattctccgagcgcgacatcctcgattcgatcgagctgcgcggcacgttggagggattggccgcacgctttgcggccgagcgcggcgtctcgtcgcgcgatctggagccgctgaaggaatgcctcaatgagatcgacggcctggtgcggcaggagccgatctccatggaggcgttttcgtcctatgttgcactcaacgcccgtttccacgtgctgctggccgagctgtcgcgcagtccgccgctgatccggcagatcgaccgcgcctcggcgctgccgttcgcctcgccgagcggcttcgtgatggcgcaatcggccttgccggaggcgcgccagatcctgctgatcgggcaggaccatcatcgcgtcgtggtcgacgccatcgagaaccgcgagggcgcgcgcgccgaggcgatcatgcgcgagcatgcgcggctcgcggcgcgcaacctgcggctcgcgctgcgcaaccgcacccatctcgatctgctgccggcactggcgctgatctcggccggctgaacagagcacgccatgcgattcatcgaaacctggacgtccgccacgctgcttgccgtgcgcgatctcacgcccggcatccgcgaattcctgctacggcccgacgattttgccggcgcgccctatcccgtcggcagccacatcgatgtcggcgtcaccatcgacggtcagccacagacccgctcctattcgctggtcggcgaggtcgatccggaaggtcttcggattgcggtgcggcgtgcgccggattcccgcggcggctcgcaatacatgtggtcgctcgcgccgggagcgcggctcaacatcacgcggccggcctcgctggtgcagctcgactggacgcggcggcagttctgcctgatcgcaggcggcatcggcatcacgccgatcgtcggtgcggcgcaggcgctggcccgccgtgatgccgccgtgacgctgcattatgcggtgcgcacgcgcggcgatgcggcctatctcgacaggctcgaacgcctgctcggcgaccgtctcatcgtccacgccgccgacgagggccggcggctcgacctcgagcgcgtcttcgcagacctgccgcaggatacgatgacattgttctgcggcccgatgcggatgctcgatgcagcacggcacgcctgggaggcgtccggccggccgatgaccgatctacgctacgagactttcggatcgagcgggctgctgccgaccgaggcgttccgcgtgcggctcgcgggccaggggggcgagctgggcaccgagttcgtgatcccgcgcgaccgctcgatgctggacgtgctcaacgaagccggccatgaggtgatgagcgactgccggcgcggcgagtgcggcgtctgcgcgctcgacgtggttgatgtcgatggcgaaatcgaccatcgcgacgtcttcttcagcgcgcaccagaaacgggaaagccgcaagatctgcgcctgcgtctcgcgtgcgcgcggcaccatcacggtcgacacgctgcatcgcgccgacacgctctgacgcgcctggccggcgtggacgttcgatccgggttaaagcgcgagattaggttgaggtggaacggcgtcgaaagttcacctctcccttgggagaggtcgatttgcgcagcaaatcgggtgagggggttacggtctatcgagagagcaagagccctcacccggattgcttcgcaatccgacctctccccaacggggagaggtgaaccgagactgcggcaagctgatcaacccaaaactcatccggcttcacgccgcgtgcaccnnnnnnnnnnnnnnnnnnnnnnnnnnnnnnnnnnnnnnnnnnnnnnnnnnnnnnnnnnnnnnnnnnnnnnnnnnnnnnngggttacggtctatcgagagagcaagagccctcacccggattgcttcgcaatccgacctctccccaacggggagaggtgaaccgagactgcggcaagctgatcaacccaaaactcatccggcttcacgccgcgtgcaccgagtggcgcggatcgtgatcgagcagcgcggagatgtcgctgcccgacatcggccggccgatcagatagccctggacctcgtcgcaactggtctggcgcagatattcgagctgatcggcggtctcgacgccttcggccacgacgccgatctggaggtcctgtgcgaggccgatcaccgatttgacgatcgcggcgcaatccggctcggtcagcatgtcccggatgaaggactgatcgatcttgatgcggctgaacggcagcttgcgcaaataggtcagcgacgagaagccggtgccgaaatcatcgagcgcaaccgttagcccaagctcgagcagcccgttcaggatcgcgggcgcggacccatatttcgagatcagcatcgactccgtgatctcgatttccagccgattcggcgcgacattcgcctcggcaagcgcatcgacgatggtttgcaggatgccgacgttctgaaactggaccgcggagaaattcaccgcgatcctgatgtcgtcaggccagcgcgccagcatcgcgcaggcatggcggatcacccattcgccgagctggtggatcagtccgctctcctcggcgatcggaatgaagacgctgggcgggatcaggccgcgcgccggatgctgccagcgcagcagcgcctcgaagccggtgatgcggcctttgcggatgtcgaggaacggctggtagacgagaaacagctggttcgcttcgatcgcctgttcgagatcgcgctgcaacgcgcggcggtcgcgcgccgcctggtcgtcgctcgcttcgaagaagcggatcgtgcccgggccggatttcttggcccggtagagcgcgatgtcgacatgcttgagcagctcgtgcggattgttgccgtcgcgcggcgcgagcacgataccgacgctgatcgcgcctgatatctccagtccgtcgatcgggagtggatcggcgaacgccgcgacgaagcgttcggcgatcgcgagcacgtcctcgggtcgcgtcagattggacatgatcagcgcgaactcgtcgccgccgatccgcgcgacatgctcggccgcgcgggtgcagcgctgcagccgggccgcgacctgcaccaggaattcgtcgcctgcctgacggccgaacctgtcgttgatctccttgaagcgatcgagatcgagcagcagcacggcgaattcctcgccggagcgcgccagccggctcagcgcgccgttgagcgcctcgttgaaggcgacgcggttcggcagatgcgtcagcggatcctgccgcaccgtccgctccgcctcgtgctgggcgatgatgcgacgcctgaactcgaaggcattgacgaacacgccgcgcagcagcaccgagccgtaaaccagcacgaggacggccatcagcagatagatgaaatcgccgtcgcggccgaggcagatggcgatgccgacgaagatcggcgcggtgaaggcaatcgcggcgatcgggatggtggagaaggcgaaggcgccgccggcgagcattccggcgcaaagacaggtgatcaccagctgggcgccgctcgatgcgttggcgaagaaggcgaccgggacgacaccccaggcggcgccgagcgccagcgcattgcgcaccagccggtacatggtccggcgcgagacgaattgcggcttggtgatgcggcgcgaggcgcgcgcctgcaggccgaagaacagcgcggcgctgccgactgcggcggcccacaccagcgcaaaggcccagtccgccgattgccagagtgcaatggcgagcaccagcgcgttgcaggcgttggccagcatgatgccgaaggaatagccgagcacgagcgacacctgctcggcgcggatgtggccggcgagcgcttcatccgtcggtggtgcgccgagggccgcgaggtcaccggcgaacagggccgcgaaatatgatctgagatcgatacgcatctcaccacgttgcctgcgcgtcgttacgtcgccagtgcggttggccatggcgcaacgaccaagaattctatgcaaacctttgacaaactatgaactattggcgcgaacccggccaccgcggcacgcggcgcggctgcaccagggggattgctcccggatcgatacactgcgtgatgtgatgtcacggactcggcaagagctgccgggcgaagcgtggcttgatcggcagtcggtttttcgcaaagacttgggtcccagcgaatgaaatcaggtgcgcatgagcctcccgaccacgaaccacgatcccgggtttcggatcacgcgggcgagccatgtcgtcctgaccgtgcgtgacctcgcagccagccggcagttctacgaaaaagtgatcgggctgatcctgaccgcggaggagggcgacgcgctctacttccgcggcgtcgaggaggcctgtcatcacagccttgtgttgcgcaagggtgggggcgccgcctgcgcgcggctcggcctgcgggtgtttcgggacgacgacctcgaccggctcaaggcgttcttcgaagcgcagggctgccgcgccatttgggccgaggtgccgcatcagggccgcacactgcaggcgaccgatccggccggcacgccgctggagttctgcgcgaccatgccggtggtcccgcgcatgatcacccaattcacccgccatgccggcggctcggcgctgcggctcgatcactatcaggtgctgacgccggaggtgcgcaaggcctgcgagttctacaccgcggcaggcttccggctcagcgagtatatcgcgccggccggcaccttcgatctgcgtggtgtgttcctgcagcgcaagggcaatccgcacgacatcgtgttcttcaacggcgccggaccgcggctgcatcatttcgcgttcctcgcacccgaggtgcaccatctgctgaacgcctgcgatatcgccggcgagctcggctacggcgcggcggtcgagcgtggcccgggtcggcacgggccggggcatgcgatgtatgtctacatgcgcgatcccgacgggcatcgcgtcgaactgttcaacacgcactaccagatcatggatatcgagaacgagccgatcggctgggacccgtccgaccacaaggtctcgtttccatggggattgccggcgcggcaggcctggttcgaggaggcgacgccgtttgccgatgttccgatccgcgagccgcagctgaagccgaggccgctcacgctcgagagctacctcgcgaagtagcatgtcgatgccggtcgcgaacctcacctatgatgcggcaatcgtcggcctcgggccggtcggcgccgtcttcgccaatctgctggcaaaggccggcttgcgcgtcgccgtcgtcgagcgcgtcgccgatatctacgacaagccgcgcgcgatcacgctcgaccacgaggcgctccgcgtgctgcaggcgatcgggctcggcgacttcttggagcaggcgatcgccccgcataacggctcgcactatctcggcgtcgacggcgagatcatcaagatcttcgatccgatgccgccgccgtttccgctcggctggattccgaacgtcaccttcgtgcagcccgacctcgagcaggcgctgcgcaacaagcttgccgaatatccgcgtgtggacgtcctgctcgcggctgccggcgtagcgctgcagcaggacgatgacgcggtgacgctgaccgtacgccgcgagtccggcgagcagttgccgatccgggcgcgctatctgatcggctgcgacggcgccaacagcttcgtgcgcaagcagctcgatatcggcctggacgaccttgccttcgacgaatggtggatggtggtggatacgctgaccagcgatcccgccaagcggccggccaagagttttcaatactgctggccgtcgcgtcccggcaccttcgtgccgggtccgcgcaatctgcggcgctgggagatcaagctgctgccgggcgaggatcccgaggcggccggcgcacccgacaacgtcgtgcggttgctgaacggttttaccgacatctccgatctcacgatctggcgctcggcggtctatcgcttccacgcgctgctcgggcaacgctggcgcgaccgtcgtgtgctgctgatgggcgatgccgtgcaccagacgccgccgttcctcgggcaggggctgtgcgccggaatccgcgatgccgtgaacctcgcctggaaactccgactggtgctgcgcggcgatgccggcgaaacgctgctcgacagctacgagatcgagcgcaagccgcatgtccgcgcggtcgtcgccagcgccaaggagttcggcaagatcatcggcgagctcgatccggaggcggcagccgaacgcgacctgcggctgcgcgccgagctgaaggccggcaaggccgaaaccatcaggcagagattcatccccgatctcgtctccggcctgatcgcgcgcgatgccgtgctcgccgggcggctgttcgtgcagccgcatgtgcgcgcaccggatgggcggacatgccggctcgacgatctgctgaagccggaatttgcgatcgcgacgacggccgcggcgccgatggcgtggctatcggacgtggcctcttggcagggcctgtccggcgagcgcgtcgtcatcaccacgtcaggtgaaagcagcgatgccgacggcatcttgagcgtggtggagcgcgacgggctgttcgccgactggatgcggcagcatggtgctgcagcggtcatcgtgcggcccgaccgctacgtcttcggtgccgccggcaatgccgacgagctcaacaggctcgtcggtgagctgcgcgaaggtctcggcgcggcgccctcatcaattccggcgacatcagttacttcttgatgtcggccgcgaccagcacgcgatggccatgcagcagctcctgcagggcttgcagcgccgcgacgccgcattgggtgtcctgctcaccattgccgccgctcagcccgatgccgccgaccacctcgtcgtcgacgacgatcggaaagccgccgacgaacacggcgaattttccgtcgaagctccactggatgccgaacgcctcgttgccgggcaaggcaggtccgttcggcggctggttgaacaaatgggtggagcgcttgtgcccagccgcggtgaacgccttgttccaggcgatctgcgggccggtgacccgcgcgccatccatccgctccagcgccagcggatagccgccgtcgtcggtcacgcagaccgtctccgcgacgccgatctcggcggatttgcggatcgcggcggcgatcatgtggcgggcttcggcaagttcaagtttgaaggtctgtctcatcgctatcttccgggattggatagactgtcgaccgtggctcagacgccgcggtagacggtcttgatctgggtgtagaattcgaggccggtgcggccggactcgcggaaggtcgaggtgctcgaccgtttcaatccgccgaacggcgcgttgatcagattgccggtggtggtgcggttgatcttcaccgtaccggactggatgtcattggcgaaatcgtgcatcgcgcgcgggctgcgggtcacgatcgcggccgacagcccatattcgctggcattggccttggcgatcgcatcggcatagctgtcgaccgtgatgatcgcgatcacggggccgaagatctcctcgcgtgcgatcgtcatgtcctgggtcacgtcggtgaagatcgcgggcgagacgaagtatccgccgtcataggcggcgccggcgagccggtcgccgccatggagatgcgtcgcttcctttttcccgatcgcgacatagcgcagcacggtttcaagctgctttgccgtcgccaacggccccatctccatcccgccggtgaggccactgccgatcctgatcgccttcactctggcgagcagccgcgcggtgaattcggcacgcacctgcttcatgaccagcacgcggctggtgccggtgcaggcctggcccgccaacgacaggccgcccttgacggtcagatcgaccgccagatcgagatcggcgtcgtccatgatgatcagcggattcttgccgccgagctccatctgcgtgcgggtcacgaagctgaccgcgcggcagatctgttcgccggcggacgtcgatcccgtgaacgaaatcgcgcgaatgaccggcggctcggtgatcgcaggcccgatctcgccggccttgccggtgatgaagttgagcacgcccttgggcagacctgccgcaatcagcgcctccgccaggcgataaccgctgagcggcgcgtcggacgacggcttgaacacgacagtgttgccggtgatcagggccggggcgatcttgcgcgccgggatcgaaatcggaaaattccagggtgtgatgaccgacacgacgccgagcggctcgcgcagcgtatagaccgtcatgtccgcatcgtcgttcggaaacacctcgccggtgagcgactgtccctcgacggcatagaagcgcagggtctgggccgagcgcagcacctcgtcgcgggcgagaccgagcgatttgcccatctcccgcgtgatctcccgcgcgatgtgatctgcgcgtgcctcgagatgatcggcggcccggttcaggatggcggcgcgtttcgtgatcggcgtccgtctccagccttcgaacgctgcggcggcggcatcgacagcggcttgagcgtcggcggcggtcgattgctggaagcgtccgaccaggtcggcgttgtcggcgggattgatgttcgcgaacaatcgaccggaggcgcttgaggtgcgctcgccggcgatcaggttcggaaacgcctcgatgtcagctgcgccctctgcggaagggtgcgcgttgcgtaccgtcgtgtcagctatcgtcacgggattctcctcagtgccagatcaggaccgcgcagacggtcgataccgccaggccggtcaatacggggaccatcgcggtccgcacgatctggaagaccgggacgcgcgcgaagccggccaccgcgatcagcgacgaccaggccaccagggtgccgccgccggtccacaccgcgcccatctggccgatcgcggcgagcgtcgccggctgcattccaaccgacggtgcgagcgcacccgacagtgagccggtcagcggcaggccggcaaaacccgagccgtcgatgccggtgatcatgccggagatcaaaatgccgaaggcgacgaagaattcattgccggggatccaggcctgcgcggtctggatcagttcgaaaagcaggcttggcgcctgggccgccggaaccccgaggatcggcgcagagaggcccggttcggcgccgagaaagaagaagcccgcgatcggcagcacggatcccatcgccttgaaggcgaacacgaagccttcggtgacgtgatcggcgctggtgtcgaggaacttgcgcagattttcagagatggaggatgcgcagatcatcagcatcgcggcgacgccacccaccagtgcggccgcgtcgccgcccttgaggtcatggccgatgccgagcttggccagcaccatcacggcgatgacacagaggaaggcgagcggggtcgcgaccgcaaagaatttcgaccagccttcgcggcgcgtcggcaccccggcaagtgccttgtcgatctgggcctgggtcgcaaacggccgctgtccctcggcggtgccgcgcgcgatctccgccttgtcgaagctgccctcctgctccagccgcgccagttcgccgttgctcgactgggcctgccagcgctccagcagccggtcgtcgggcttggtgatcgacttgcggatcgaaagataggcgagcgtcaatgcgatgccgccggtgatgagggacagcaccagcgcacggtccgcgacggtggcggcactgaccgcggcgccggccgccttggcgctgatcccgggcgcgacgccgatcacgtagtccgacgacagcgccatgccctgtcccgcgatcgcgatcgcaatggcgccgccgagcggcgacaggccggcggcgatcgccgcgggcagcagcaccgcggagaccagcggcacggccggcgtcggccagaagaacagcgagatcacataggtgatcgcggcaagcacgaaataggctgtatgtccggtcttcatcacggcgcggaacggttcgaccatgcggatgtccgagcgcagcgccttcaatgcgttcagcagcgccgtcatcaacgcgatcaccaggaaaatgttgaagagctccttggcggcggtgaagctcgcgttgaagacgctggcgagcgccgcgaccggactgtgcgtccatgccagcgcgaccagcagcgttgcgatcaccgacggcaccacgacgttggcgcgccagatcatggtgagaacgatgacggcgacgccgagcagatagacccaatgtgcggcgacgatcggagcgtgctgcatgattgtttgtttccccctctaacgcgcaaataatgtatactgtattcaagaatggcaagctcaaattccgagctcgcggtccgcgcggcatataagggcgggaagcatcatgaccgcatttttgtgcagaataagcacaaaatagcggctgcgtcctgcggataatgccgcagggaaggcggggcgaagaacctagtcttcggtgttgacagttatataaatcgtatacagtatacaaataaggtcgagccagaatgcggccaatggcccgtcgcctggacggcaagttcttcacggcacaggagcgccacgatgcagaagatgatggatcatgtggaatttcgagcggccctcgaaaacgccatcaaggggaagagcgccaacaaggcgccgttcagcgtcgcctgggccagcggcaagctcagccgcgcgcatctcgcgcgctgggccgaaaaccactaccactatgtcggcccgttcgccgactacctcggctacatctatgcgcggatgccggagcagtaccaggaggccaaggacttcctgctcgccaacatgtacgaggaagagatcggcggcgaccgccacaccgatctcctgatccgcttcgcggaggcctgcggtacgaccgcggcgcgcatcaaggaccccgacaacatgacgccgacgacgcgcgggctgcagagctggtgctatgcagtcgcgatgcgcgaggatccgatcgtcgcggtggccggcctcgtggtcggcctggaatcgcaggtgccctcgatctatcgcaagcagacgccgacgctgcgcgagaagtacaaattcaccgacgaggaagtcgagttcttcgaccttcacatcgtgtcggacgagatccacggcgagcgcggctaccagatcgtgctggagcacgccaacacggtcgagctgcagcagcgttgcctcaagatctgcgagatcggcgcacagatgcggctgctctacaccaccgcgctgtatcacgactatgtcgcaaacgacattccgctggcagagctcgatctcgccagcggcgtctccgccgaagagcgcgtgctgttgcaggcctgagccgcggggagcgcgccgcgatgcccaacgtgatttttcaccgcgacggcgagaccttcgtcggcgaggtcaaggagaacaccaatctcgtcgtccgcgccggcattcgccagtttccctatcccaacttcctgtacggctgcgggatggggaagtgcgggaaatgcgcgtcgctgatcatcaagggcggcgagcatttgccggagccgaactggaaggaaaagaagcgcctcggtgccagaatcgagcagggatatcgccttgcctgccagctttggctcacgcatgacgttgaactgtcgcaggaggcggcgccgctggccgacgtggtcgcgcctgccggcacagtggttgggaggacgtgaccaatgtatgtgatactgacgagcaagccggggcagtttcgcaccgagatcgtcgagggcctgcggccgctcgcggcctatgactatctgttctacggcatcaggaaggcgacgttcgtgattgccgagctggtcgcggagaccaaggtcaaggtgatcgacgaggcctggtcgccgccgatcgtgaacgaggtgccctcgaaattcctcgaaaagttcgaaacgccggagcgggcgctgaacgagctcgagcacctcatcacgttcggccatatggacaccaagctgcgcaagcgctgagcggatgccgggatgatcgaagtcacgtttctgaccaatggcgggaaaaccgtgaccgccgcggagaacagcaacctgctgcgcgtctcgctgcgcgagcagggcggcattccgttcaagtgcggcggcggactgtgcggaacctgcaaatgcctgatcgagaagggcatcgagaacaccgatgcgatcaagccgaaggagcgcaagcacctcaccgaggagcagttcgccgccggctaccggatggcgtgccagaccttcctcaccggcagcgtcagcgtgtcgtgggtgccgaagacagcagtgcaggcggcgcggtccgtagctgttgacggcgaatgagcgcggcttgatggcctgcatccggcggtctaaatacgcaatcgcggtcattcggccaggtgtctggcggctcttgggacctgtggcgtccttgcattgagcgaagcgcggccggacaggtcagttcatggcaggcaggctcggaagctccaaacgtctcggcgacgactatctctccctccacggcagggtgatcgaggagctgcggcaggcgatcctgagccggcggctgaagcccggcgagcggctggtcgaggggcgcctcgccgatgagcttggggtgtcccgcaatccggtgcgcgaagcgatccgcgtgctggagtcggaagggctcgtcgaggtgaccgcgcggcgcggcgcctccgtcatcacgatgagcgatgaggaggcgcgcgagacggtcgaggtgcgcgcgctgctcgagggacagaacgcgcgccttgccgcccgtcgccgcgaggagagcatcatcaagcggatcgcggcggtgttgaagcagggcaacgaggcggtggccgggcggcgctacgacctgttgccggatctcaaccagcaattccaccacgaactggccgaggccggccgcaaccgcgtgctcgccgatctgctgaagcggctgcgcgaacgcacggcgatgctgttctcgcccaccgatccggtgcgtcaggcccgcacctgggatgagcacgctgcaatcctgcgcgccatcatcgccggcgacgagcgtgctgcggccacgcttgctgcagagcatgtgatgcgggccggcgcggactttctctcgagcctgcacgtgcctgacgaggagacttcgcttgaggcggcgtcggcgaagtacggcctgccgtccggctctcgcgccgatcaagtggcgaccaagcctgtgcgccggaaccaggagcgcgccggcacgcggcggcggaaggcagggagctgaacgcgcccgccgcgtgttgatggttttatggcctgccgatccggggttcagaggtccggtggtaccgctccgcatcgtgcgcttactttcttgaccgtatctgcctcgctcgctacctctcttcccaatgctgggcagggacgcaactctgccggccgcgccgcatggccgggggaaaccaatgaacaacaacaatcatggcgcgccggcgaacgacgtcgccgagtatgattacatcgtcgtcggtgccggctcggccggctgcgtgcttgccaaccgcctgagcgccgacggcaagcactcggtgctgctgctcgaggccgggccgaaggacaccaacatctggatccatgtcccgctcggctacggcaagctgttcaaggaaaaatccgtcaactggatgtaccagaccgagcccgagcccggtctgaacggccggcaggtgttccagccgcggggaaaagtgctcggcggttccagctcgatcaacggcctgctctacgtgcgcggccagcacgaggactatgaccgctggcggcagcgcggcaatgccggctggggctatgacgacgtgttgccgtacttcaggaaggcggaagatcagcagcgcggctccgacaaatatcacggcgccggcggaccgctgccggtgtcggactggcgctaccatgatccgctgtcggaagcgttcgtgcatgccgcggccgaagtcggcattccgaccaatccggatttcaatggcgcgacccaggagggcgcgggcttcttccagaccacgacgcggcgcggccggcgggcctcgacggcgcggtcctatctgcggccggcgttgacgcgcggcaatctgcgcgtcgagacctcggcgctggcacagcgcatcctgttcgacggcaagcgcgccagcggcgtcgcgtacaagcaggacgggcagttgcgcatggccaaggcgcgcaaggaagtgcttgtgtcgagcggcgcgtacaactcgccgcaattgctgcagctctctggcgtcggtccggccgatctgctgaagcagcacggcatcgagatcgtgctcgatgcgcccggcgtcggcaacgatctgcaggatcacatgcaggtgcgcatcgtcacgcgctgcgcgcagagcgtcacgctgaacgacgtcgtcaacaatccggtgcgccgcgtcatggccggcctgcggtatgcggcgttgcgcaaggggccactgaccattgccgccggcacgtcgggtgcgttcttcaagaccagtccgcggctggcgtcgcccgacatccagatccatttcctgccgttctcgaccgacaagatgggcgagaagctgcatccgttctcgggcttcacggcctcggtctgccagctgcgtccggagagccgcggctcgctgaagatcaggagcgctgaccccagcgtgccgccggaaatccgcatcaattatctcgcgaccgaaaccgatcgccgcgccttcatcgacggcatccgcatcctgcgcaagatcctggccgcgccggcgctgaagtcatattcggtcggggaggtcgatcccggcgccaaggtggtcagcgacgatgacctgctcgagttctgccgccgcaccggcagcacggtctatcatccgacctcgacctgccggatgggcaatgatccgctcgcggtcgtcgacaacaggctcaaggtgcgaggcatcgagggtctgcgcgtggtcgacgcctcggtgatgccggacctgatgtcgggcaacaccaacgcgccgacgatcatgatcgcggagaaggcgtcggacatgattttggaggatgcgcggtagggatcgcggtggcgtagcccgagtggagcgcgcgaaaatccggggccgtccgttccgtgtggcaagaacccggattacgctgccgctctatccgcatcctcttcgtattccggggctcgcgaggcgagaacccggaatccatcgggccgcataactggcggagacatggattccgggctcatcgcttcgcgatgccccggaatgacggaaagtgtgagacaagcagcaagatcggatggatttcgctgcgctccatccgggctaccggaaactcaccccttatacgcgcgtacccgtgcgaccatctgctcgacatgggcgatcggcgtctcctgcaggatgccgtggccgaggttgaagatcagccggccctggccgaaattctccagtacatcgtccaccgcgcggtcgagcgtggcgccgccggcgatcagcgccagcggatcgaggttgccctggatggcgacgcggctctgcacccgctcgcggatcatcgacggttcggctgcccagtcgatcgaaacggcatcgaccccggtttgctcgacataggctggcagcatgcccgccgcgccgcgcggaaagccgatgatcctggcatcggggacctgcttgcgcaccccggcgacgatgcgccgggtcggctcgatcgaccagcgcgcgaattcgcgcggcggcagcacgccggcccaggtgtcgaagatctgcaggcaaccggcgccggctttgagctggccgacaagatagtggatcgagttctcgaccagcacgtcgatgatctccgcaaacgcgtccggatgacgataggcgagcatccgcgccggagcctggtccggcgtgccctgaccggccaccatgtaggtcgcaaccgtccatggcgcgccgcagaagccgatcagcgtgatgtggggctcaagctcgcgccggacacggcgcagggcctcgaagaccggctcgagcgtgtcgaaattggcctgcgttgcgagcgtcgcgatctcgccgggcgtcgccaagggatcgagccgggggccttcgccggcctcgaagcgcaccgaacggccgagcgcgtgggggatcaccaggatgtcggagaagatgatcgcggcgtcgaagttgaacctgcggatcggctgcagcgtgacctcggtggcgaattcgggcgtgaagcagagatcgaggaagccgccggccttggcgcgcagctcgcggtactccggcaaatagcggccggcctgccgcatcatccagagcggtggcctggcttgccggtggcccgacaggaggtcgatgagcggcttcttgatgggatcctggggcacgcgaaaattcctgatctcggtcaaattctggcccctgatacacgctgcggtgcagcgggccaaggcggttctggaacccccggcgcactcccggctgaagcagggccgaccttcccggcgtccgatccggtcggcgccacgcaggccgcgccgtcgaagcgcgacggcaattgcgacaattagctgttatatcgcagcgattgctaaccacgatgcgaaatgagttcgtccgcgcggggaacgatcggcccggcggcggacgcgcgaagcgcgcccatggtccggcctgcgatcgtcgcggccgcaattgctgtgatgctgtggctgatgctgcccgcgtgaaacccgtgcggccggttccgctcagcgaagccgccgcatgccggaatcaacttacagggggccgcttccggggcgctgcatccggtcgaactcgaaggtcacgccgagccggcgctcgagccgccagaccagaatgcagtgccgccggatcggctcgctctcgatctcgaggtcgaacgcgaacgggagtgcggcgtcgctttccactgcgagccccgcccctccggtcgagatgttgagcacaaggcattcgacgctggtgttgcggaagaagatcgtgccgcgcttcatcagggcgattcgctggctgtcggtcttgtatcttcttattgttgtactcaaggcagtctcctaccccggtgatgcccggtcgcgaccgttccccaaacgagaatccaaagcgcgatgacgattcaacctggtctcatcgcgcgtcagttcaccagcaccgcgccgtcgcagcggatgcccagcacccagacgtcgacctggccgagcccgatgccgagcgtcgagagcagcgacgccagcacctggtcgatcggacttgtcacggcgctcaggatgccggtgaccagcgcgcccaatcccgggagcggaatgccgccgatgttgagcgtgaggtcgccgagcagacttgacgtgagcgaagtcaggaagttggtcgtcgtcacggtcttcttggtccctgcctggatgtcgctgtagctgaaattgacattggtcggcgtggtgttgcccatgccggcatgggccaggccagtgatcgggatccccagcacagtgaccagcgtcgccggcggtggattgggcttggtcgtgaagttggtcatgtcggccatcgtcacgttgccgatccaggcatcgacgattcccggggtcacgccgatggtgacctgcgaggtgttgatgttcggatggccgcacgacaccgcattgagcgtcgcggtccccgaggcgacctcgacatagaccggcagattgatcgacgcgatgctgccggagccgagcacgttgatcgtcgcaaggatcctggtctgcgcggtgtggacgctgacgccctgggtgcccattgcgatccagctggaaccaacgggtcgctcgccgatcgttacgaccacggagacgttggcgaggccgggcaggccgagattgaccgaggtcgcgatctggttgctgccgttggcgatctgcgccaccgtgttgatgaggtcgaacaccgaaacgctggcgccgaccttcggtttctgcccgatcgtgagattggcgaacggaccgaggtcgatcagggtgccaggcgaaatcttggtcgatgagccggtgacggcctgggagatcgtcgacagcgcggtggtcgcggcgttggcgccattggtgatctgctgcgtggtcagcgcggctgcgattatgtcgccgaccttgacgttgctgttcaggaggtcgttgtaggtgccggcggtcaggttgacccgggtcgccagggccgacaggaagtcgagcgcgtcgatcttggcgctgatcagcgcattatagtccatcaccgagagcgacagcgtggtgccgagcatcgcgccgagcagcgcattgagtgcgccgccgttgaccgagagcagccgcgagccgatcgcgaacgtcgccatttcggtcgaggtcgcggtggcggtcgtcgtgatgttgaaatagctcgcgccggtcaggtagcgcgcgaagtagagcggggtcttagtcgtcagggtgacgcgcgcggcgttcggaatcgcgaccgccggggtcacgaaacgggcttgcggcgcgatcgcgctgtttgcggtgtaggtcccggtctcgaccttgaccagcgcgctggccggatagttgttctgcgtcaccgtcgcggtggcggcgttgaccgggttgctcagattggcggcggcgacgatcgcggcgaggtcggcggtgctctgggtcttgcgccgatcggcgaagatcgtgccgagatcgatcgcaagcccggcgcacccgatcatgagcgtcatcaggccggcgctgatcatcgcgaaatttccccgctcgtcggcgccgaagcgccgcatcagcatgaggatgccgctcatcctagaaccctccatactgaatcgccgcggagcgtacgatggtgctcgcgggcgccggcacgaagggcagcttgtagatgaagttgccggccgcgttgtagttgagcgtcacgatgtagacgttcgcgttcgacggcgacggcgcggcattgacggtgagattgctggcaacgagcagcggataggtcgatacgttcgcggtgacgtaattggtcgcgaggctgttgcgttcggtgtcggtcatgcctgcgatggacgaccgcgccgcttcggcggcgagctgctgaacgccatgcaccatcgcgagataggaaccgaatacaatgatgccgaaaatgaaggcgaggaacagcggcagcatcagcgcaaattcgacagcagaagcgccgcttcgacagcgaaagaacctggtcatggcacacctcaaacgcgaacgacggcgccacgttgcgaggctttgattaaggaaaactatgaaaacgcttccgcgaatcagtgacgtcaattcagatcaatggcagcgctcgaatttatcgggtgcgcgatgcgttatggggcgatcagaatctttgatgccatacccgcagaaatccggggtctgatggtgtcgatgtgctgcatgcgcgtgcggatgcagccgtcggataccgtagcactacgtggcaatgcacgtaacaatacatatgacgtacgatcaaagcggcgatgcaacaaattgaagctaaacgaaagtgcaaccaaatgttagtatagctgaatcacatactggagaacgtagttgcgtcccgtgctgagattggagggctcgcgatgcacagaccacgtcagcatttgaatattccgacagagatcgttcgcaccgtcgttgcaattgcagagacgggaagtctatcgaaggccggggaacgactcggcctgagccagccggcgatcagttcgcaggtgaagcgactgcagagcctggtcggtggcgcactgtttgtcagaacggcaaacggcaccacgacgaccgagcttggcaaggttgccgtgcagcaggccaggcgcatcctcgaagcgaatgatcagctgcttcggctcggcggcaatcacgaaggaccgcagccgttgcggctgggcatgagcacgatgctcgccgaggaattcctcaagctgcatcccgccgacgcgctcgccgacgtgctggttcacgccgacatgtcgccgatcgtcatcaggggattgatggacggctacatcgacatcgccttcgtctacagcaacccatcgcttgaaaacgaggacgaggtgacgatcgctgccgaggccgacgagcgctcggtgtgggtacgatcacgcgattttgtcctgcggccgggtgccccgatcccgatcctggcgtggccgggtgacgactggatgatccggacgctcaccaagcacaacatctcgtacaagatcgtgttcagaagcccgaaccaccaactgcgactggaagccgcacgggccggatacggcctgacggcgtgccccgagcggatgatcccctccgcgctgatttcggcgaaggactattatcttccggagctcccgatgcagaagcgactgctgtgcgttcgcccgggcctcgagggcagccgcgcgacggcgatggtgcagcggttgtccagcctgttcttcagcggcgcgaagccgatgcgtcaggtgagcaacatgtagtccggtgcccgccgatcaataatgcggtgggcgctcgttggtcggcccgggcgcttggcgttcggcctcctgaagccggtcgcgcagctcagcgagctggcgcgtcagcgcgtcgatctgcttccattgcgccgtgatcgtctggttcagcgtctcgatggtttcgtcctgataggtcaggcgaacctccagcgcatcgatccgttcgctcagtcttgccgtgtcattcatgcgtggcgtccccgcgtccccgctcgcgcagcccgtggccgagcgcgacgcgctcgtcgaacacaaagcagtcgccgcgccagcggctgtcctgctgcggtgtttcctcgagatacttcaggatgccgcccttgaggtgatagacctcgttgaagccctgcgcgagcagataggcgctggccttctcgcaacggatccccccggtgcagaacattgcaatcctgcggtgcttcgcgggatcgaggtgccgggcggcaaactccttgaattgtccaaagctcgcgatcctgggatcgaccgcgccttcgaagctgcccatcgccacctcgaacgcgttgcgggtatcgagcactaggatgtcgggcgaggcgatcagctcgttccagtcgccggcgtcgacataagtgccgacctgccgcgtcggatcgacggtggtgtcgccgagcgtgacgatctccttcttcaaccgcaccttgagccgctggaacggcatttgcgcggcttcggagaatttcagctcgagattgtcgagacggccgccgaacagcggcccgtgtgcgagctcggcgacgaagccgtcgatgccctcgtcgctgccggcgacggtgccgttgatgccctcgtgcgcgagcagcacgctgcccttgagctcgagctccgcgcagagcgcacgcagcggctcgcgcaaggcgcggaagtcgggcagcgcggcgaattggtagaaggcggcgaccttgaggggcatggccggggtttatcaggcgggcagtgtcggcgaaaccccgcaaagccatgcattatcgggataatccctctggcatgccaggcattgccctgcccgggatgaatgtgccatgtactcgcacccatccgccgcagcagtatcagaccatcacgatcaagcgagctctccgttatgaggaatttccacttcgccggccgctccacggtccatgctcagaacgcgatggtcgcaacatcgcacccgcaggcggcgcttgcggcgatcgaggtgatgcgcgagggcggcacggccgctgacgctgcggtcgccgcctgcgcgctgctcggcgtcatcgaaccgcaatcgaccggcatcggcggcgactgctttgcgctgatccagccgaagggcgagggcaagatcacggcctacaatggcagcggccgggcgccgatggcggcgaccgccgactggtacctcgaacgcaagatccattcggtgccgctgacctcggcgcatgccgtcagcattcccggctcgatcgacgcctgggatgtgatcctgagggatcacggcaggttcggcttcgaccggctgctgcagcccgcgatcaaggccgccgaagaaggctatgtcgtcgctccgcgcatcgcgttcgactggaagaacggcttcgagaagctgaagaacggcaccaacaccgagcgctatctgctgccgcacggcaagccggcggtggccggcgacgtgatccgccagcccgagctcggcaagacgctgcgcgcgatcgcgcagaatggccgcgacgcgttctacagcggcgagatcgccgccgacatggtcgacacgctgcgcggcatcggcggcctgcatacgttggaggactttgccgcgcactcgaccgagacgacctcgccgatcggcacgatgtacaagggctacgacgtctggcagtgcccgccgaacggcccgggcatcaccatgctggtgatgctcaacatcctgtcgcgcttcgatctgacacagttcaagccgctcagcatcgagcgcttccacctcgaggcggaggccgcacgcatcgcctacatgatgcgcgagcagtatatcggcgacccgcagcacgcgcatgtcgatgtcgccggtatcctgtcgaaggaattcgccgacgagcacatcaggaacatccggatggaccggctgctcgagctgccgaacgtcgcgccgccgatgaatccgtcgaccgtctacatcacggtggtcgacaaggatcgcaacgtctgctccttcatcaactcgatcgcgcattcgttcggctcggcgatcgtcaccaacaagaccggcatcctgctgcagaaccgcgccggcggcttccgcatccagcccggccatccgaactgtatcgcgccgggcaagcgtccgctgcacaccatcatcccggcgctggccaccaggaacggccgcgccgtgatgccgtacggcgtgatgggcgggcagtatcagccggtcggccagacccatgtgttgaccaacatgctcgactatggctgcgacatccaggaagcgatcgacatgccgcgcggcctgcattacgagggcgtctatcagctcgaggacagcgtgccggcggagatcgtcgaaggcctgaagaagatcggccacaagaccaccagcgtggtcgggccgctcggcggcgggcaggggatctggatcgattgggacaagggcacgctgaccggcggctccgatccgcgcaaggacggctgcgcactcggctattgatcgcgatcgatatcaatcaaggaaggacgtcccggatgcaatcttcacgacgcacgatcatcaagactgcgttcgccggccttgcggcggcagtctccacgtccgttgccggtggaccggcaatggcccaaactgcagggaaacccatgaccacagcttcaggccttcagatcatcgacagcaaggtcggcaccggcgcctcgccgaagcccggccagacctgcgtcatgcactacaccggctggctctacgagaacggccagaagggcaagaagttcgactcctcggtcgaccgcaacgaaccgttcgagtttccgatcggccaggggcgcgtgatcaagggctgggacgagggcgtcgccaccatgaaggtcggcggcaagcgcacgctgatcatcccgccggatctcggctatggtgcacgcggcgccggcggcgtgatcccgccgaatgccacgctgatgttcgacgtcgaactgctgggcgtgaaataggcggtacccgggaagaggaggcgcagcgatgaagatctcgatcctcgatgattatttcgacacgctgcgcaccctcgattgcttccacaagctcgacggctacgacgtcacgatctggaacgaccatgtccaggacgtcgatgcgctcgccgagcggctgcgcgacaccgacgcactcgtgctgatccgcgagcgcacccagatccgcacgccgctgctcgaaaggctgccgaagctgaggctgatcagccagcgcagcgtctatccgcatatcgatatcgatacctgcacgcggctcggcatcatcgtgtcgtcgagccagcatgccgatacgccgtcctacgcgactgctgaattcacctggggcctgatcctcgccgcgatgcgcgcgatcccgcagcaaatggcggcgctgaaggcaggcaagtggcagatcggtgtcggccataccctgcgcggcaagacgctcggcatctatggctacggccgcatcggcgcggtggtcgcgggctacggcaaggcgttcggcatgaacgtgctggtctgggcgcgcgaggccgcgctggcgaaggcgcgcgccgacggctatgagaccgcggccagcaaggcggatttcttcacccgctgcgacgtgctgtcgctgcacatgcggctggtcgacgcgacgcgcggcatcgtcaaggcggacgatctcgcgcggatgaaacagaccgcgctgatcgtcaacaccagccgcgcgccgctgatcgaaccgggtgcgctggtcaatgcgctgcgcgccggccggcccggcatggccgcgatcgacgtctatgagaaggagccgctgcgtgacacgtcggaccccttgctcaacatggacaatgtggtttgcacgccgcatctcggctacgtctcgcgcgacgaatacgagattcagttcaccgatatcttcgaccagatcgtggcctatgcggccggcgcgccgaccaacgtggtcaatcccgatgtgctaacgcatgcgcgtccgcgcagctaatcaataagcggcacgaaaaagaccggccgaatgggccggtccgctcggtactcgatcgcgcaagagatcaaggcttgcggcccgccgcgccggtcgccttgtcgactgcatccctggcaagatccttggcgtcgcccagcaccttttggcccctgcccttcgcctcctgcagcgcgccttcaccctgcatttttcggtctccagtggcttcgccgatcttctgcttgaccttgcctatcgcctcgttggcggtacccttgatcttgtcggtggtgctgctcatcggtctctcctctgactgtatggaagcttcgagcaggcaacgcgcggcggcgccggaacgttcccattttctgctcgcctgcgcgcctgcttttgggtagcgttccacgcacgaaaacttgagcaccgaaagcaagaacgatgaccggttcccacgatcacacccattcccacgatcactcccatgatcaccaccatcacgacgacgagcgctggaagcatgacggcgtccgcgtgatccccggcaaccagctcgacccgaacgtgccgtcgaccgccggtatggaccgcaaggccgccatcaatttcgcccgcgtcggtgcacagaaattgtgggcagggaccgtcagcatcaagccggatgccaagaccggtgcgcatcatcacggccatctcgaaagcatcatctatgtcgtgaagggcaaggcgcggatgcgctggggcgagaagctgcagttcaccgccgaagccggtcccggcgatttcatcttcgtgccgccctacgtgccgcaccaggagatcaacgccagtccggacgaggtgctggaatgcgtgctggtgcgctccgacggcgaggcagttgcgatcaatctcgacattgagccggtcgagaagccggagaacgtgctgtgggtcgatccggtgcaccggcatcccgacgagaaaaaataacgtcgcggcgcggcccgaggcgaacgataataacagcaagatcagggaggccagcatgacgctcgtccattacgagagcgcggattacgtcgccaccatcacgatggctcgcagcgaaaagcacaatgcgctgaacaacgcgctgtgcagcgagttgcgtgacgcctggctgcgcttccgcgacagcgacgatcgcgtcgcggtgctggcttccgcggaggagacgtatttctcggtcggcgccgatgtggccgatcttcccgccaacatgtggcacgcggttcctggcctcggcatcgagctggacaagccggtcatcgcggcgacctcaggctgggtcgtcggcggggccttcgtgctggtccagatggccgatctatgcgtggcgtccgagacgacgcgcttcatttatccagagggcaagatcggcaccacggctggtggcgtctcgtcggtgatggcgcggatgccgcacaagatcgccatggaattcctcctggtcggcgaggaaatgtcggcggagcgcgccttccagatcggcttcgtcaacaaggtcgctccgaaaggtcagcatgtcgcgatggcgcggcagatggccgcgaagatcgccggcaacgcgccgctcgtggtccgcgcgttgaagaagctcgctcgtgaagccatgccgaaggggccgctggagaccgtcgccgacgtgcggcggctgctcgacgaagtgcgcgacagcgacgatctcaaggaaggtgtcaaggcattcagcgagaagcggaagccgaggttcacggggaagtagatcagcgcgctctctcctcggggctcgcgaagcgagagcccggaatccatcccgccaaacgatacgtggccaaatggattccgggctcgacgctgcgcgtcgccccggaatgacgtgacgatgggctacacaaacacccggtggtcgatcaccccgttcggcaccacatagccgtagcgtgtgttcgacggctcggggccggccttctcatactgggccttcatcatcgcgaagcggtcgcccttgaggtcgagcatcgcgcgcttcggctggatgttgtagagccgggcgttgttgtcgccgaagatggcggtcttcaccggcccgtcggcaggaccgagcggcgcatatccgaacttcttctgcatcatttcggggatctcgagccgccgcaggccctcgatctgccattgcggcgcgccggtccacagcgcatccgtgccccagacgacatgatcggcgccgagccccttgatcagggtgcccatcagcgcagcgcagacattgggctcggcgaccagcgtggtcgcgaacaactgcccgacatcgccatagacattgttgacgccatactgcgccgggatgtcggcgagatcggaggtccatgcgatccggccggtgcgctcgaactcggcgagcgcgacccgcggatcgccgccgacatggcgataggccgagtgatagatcacgaaattgagctgcggccagtccttggccgcctggccgacatcggcaacgtcggcgaagccgcgcaggttcggatattgcttctcgatcccgggcgggaacagtcccttgtggacgcagacattcttgatgcccgccttcaccatcttctcgtagcccttgtaggcgaccttctcatcgtcgagccgccagggatagcggctgatctccttgtgggtgttgtcgccgatcgtgtagcccttgcaggattccggcttcaaggccagcgccgcatcgagcttgtcgagccagccgggttgccccggcgtgaagatcgcgtgacagaacacgcgccgcgagccggcctcgtcgttgatcttcttgcgcgcgtcggccatctgctcgttggtcaggaaccagtcctgctcgatatccgacggcgccgaggagatcagcgcgatcttggtgtcggaatcgagaaacatctccttcttgtagttgttgaacttgagatcctcgatggtttgctcgtgatcgttgagctccttgttccagccggccttgccgaccgacttgcgcatttcaacgaagcccatgatgcgggtgtcgtcgcgcaggaaatgcgtgtgcatgtccatgatgaactggtccttcaacccgttggcgcgctcctgcgccatcgcgggtgtcgcggcttctgccggcgtcacgtcgaacagctcgccgtagacctggttcatcgcgacaaaggaggcggccatgccggccgcggtctggaagaatttgcggcggtcgagaccttgcttgccgccgagatcgtcagccatcgccagcaaccgcgactcgacctggcgctgtcgctcgttctgcgggtcgggatagaactcgttgctggcgacgatctgggtcgggatcggggtctggtattggcacagttcggagggcatcaaggcggcaagttcttcgtcggtgagattgctgctcattctttgctcccgcttctcgccggatttttccggtcggaccgcgccggagactaggaccaagtgcgtcgatcgtccgtgccgattgccgctatcagcgttcacaaaatcgtgcgtcgcatttgcgatcgtgaaccagcggcgtcgcgcatcaagtcgtgtgcgctgttatgctcggtcgtaccggatcgtcaaagagtccggacgcaatgagacggggaggcggttatgatgcatgatgatgggaagcgcaacgatcgtcgcgtcggtgagcattccggtcgtcagttggcttgccgtataggccacgccgccggtttcgatccacacctcacccgcaggcgtatttctgaccgcggccatcttcttcagcttcgtggtttcgccatcgaacgcgtaggcgaggaaactcgtcccgtcacgagacgcctgagtcttcggtggacgccactttggcaccgggccgtagctgacctcaccgctcttgtcggacaccacgtaccagaatgtcgggaaattgcgggtgatctcgtccagcctcgacgtcggcttgagggccagctgcccggcctcgttgcgtatgacggcttccttcaatgcatcggcgacgtcggccgccgcccaggtgccgtcatcgtcaccgccgaaccggatgagcagagcggctgcgcagatcagcatgatggtcgtcaccgcaccgatgagcgtcgccgacagcaccgcaatcgagcgatggatgcgcttgagcgtttgccacttgaaagtcatcattcgccactcaacagatatccgaggccgcggactggtttgatgacgatcctgcagttggccgcgcgcaggcgtcggcgcagccgcgaaacatgcgcctcgatcgcgtttgactgtatttcatcgtcaaaatcataagccgcaacttcaagcgtctcccgcaggacgacgcgccctattcgccgaaccattgcttccagaatcgccaattcacgtcgcgggacgacaatcggctggtgatcgacgcagacctcgcgattgaggacgtcgtagctcagattgccgatgcgaacgatcgcccctcgatccagaaagagacgccggagcacggcctttgcgcgcgcaaccagctcgatcggttcgaacggcttggccacgtaatcatccgccccttcgtcgagggcgcgcgcaatatcgatgggatcgtcgagcgccgtcagcacgatggttgccgggctcggcttctgttgcttcaggtcgcgcagcaaggccaggccatcgccgtccggcaggccgcggtcgatcacgacgagttcgaaactgcggacagcgaccgccgctcggccttcctcgagggttgtgaccatatcggacgagccgaaggccgttcccagagtatcccgcagccatggcccaagctgagggtcatcctccacgaccagaactcgcaccgcattctcccaagcatgagacacggcttctaccattacggacagattacaataagattacgtccgcccgggaaagtgcgatatttcttcgcaatacactgacgtaattggtcttttcttggtgattccatcagctttctcgaatggcgggagggatgagatcgccgcccgacggggggtgcctgagaggcacgtcggggggcgccgaagctccatcgacggttcggcttcctcgtcagcgctggacttcagatggctgccaggtcgtctcgtgccttggtccgtcacctgtacgcgtgagcagcagcgcttcgacgcgctcgacgcgcaaggctggcatcgcggccgtatgctcatcggcaggagcgggccggaatcccgcaaccgctgcaccggcacatgcgcagccgatcgccgaagcgtcaatgactgttgtggctacctttgccatgcaatcggcgtcggctccgggcaccaagcgctcctaagccaatcagcgtcatgaccatcatgatggcgagtcgtctcatggatgtctcctcgatgggatttctccgctagaggcatcgatcaacgttaccggcaaatgacagccacgagcgtttgcggcggcaccttggagaaatgagccgagccacgtcaggctaccgtaatgctagctgtgaagagcatgtcgatggaagtcgccgacacggcgctcgcgatatgaaaacgaagactgcatgccggtagattttgctttgtcggcgatggccaagcggtcggatcgctgcccggcgtattggcgccgcccgttcaatcggtggctcgaaggggtcgaagcagggtggtcggtcccgctgctgctcgcctgcttcgtcggcatctggacggtgtatctggcagtggcctatcacggcgcgggcctgcatcccgacgtgctggagacctggacttatggcaggcatttcgcgtgggggtatcccaagcacccacccttgatgggctgggtgaccggtgcgtggactgcggtgtttccgctgaccgactggtcgttacagttgatggcgatgacgaatgcagcgttggcgttgtggttcgtcgatttgattgcaagaaggtttgtcagcggacacaagcgcctgctcgtgctgctcctgctcatgctgaccccggcataccagtttcatgctcagcgcttcaatgcgaacgccgtgttgctcgctgtctggccccttgccacctactgtttcctccgcgccttcgaaacaagggccccgctctgggcggttgccgcaggtctgacggctgcgcttgcaatgttgggcaagtactattccatctttctggtggcgagcttcgcgctgtcggcaatgatccacccgtcgcggcgtgcctatttcacctcaggttcgccctggatctcgaccgccgccggactgattgcgctgtttccgcatctccactggttggccacgacgggtgcggagccggtctactacgcagcgacacatgtgcgggccgatttcctgacggctctgcaggatgccgtcaatttcctgatgggccttgccgcggcggtaggggtgtcggccgcgacctgggtgatgatcgccgggtatcgaatcaagcgccttgcccgggatcttgcggcgtcggatccgaacctgaagctgatctgccatgtcgcgatcggcacgatcgtgcttccgttcattacgtccgttttccttcgcaccgacttgccgtcgttatgggcgcttcaaggattgttcctggttgccgtgcccgttgtctgcagcacgcgccgtcggatcgagcgcttctacaccgtcaatgccacgctcctcgtcgccggaatagcgatcgtcgccgccgtggtggcggctccggttcacgcgctctaccgcaacagccacggctatgaggaggggcgcagcttttatcaccaggcggcagccgaactcacccgtctgtggcacgagcagatggggacccctctgtcgatcgtcggaggcaacgatagcctcgggctcgcagtggccttctacagctccgatcacccatactatggcgacccgttcgcctaccaatattcattggaactgcctcgtcacgtgacgccggagcgcggctgggcggcgctctgcttcgaccatcaagacgattgcatcgaatggaccgaggcaatggcggccgaggccggcggttacgtcaaacgcgaattttccgttcaatcgagcctgttcgggattcccggcgccaggcgaagcctcgttgcattcatggtggcgccgcatcgcgagccggatagcgcggcgtcacgcctcgcagcgacgttcgccagggccaaggcgcgtgtctccgcgcgcagattcgccgctgcgcgctgagccggattccgcgcctcgaaagctgttttcctcgagatgtgacgcagacgatcgatctgcgatcgcgaccgtaagcttgcggtaatcgatgcccgctttatcggcgaccgggtcaagggcgtcgtatcaaaggacaatggtccatgttcactcgattcgtttgcatctgcgtcggtgtttgtatcatcggtgcgaccgcactcgcgcagacatctccatccatgaccggttcgacccgccagaaacccgcgacacaggagccggtcagccgggctgaaaagatcaacctcaacaccgcccctgtcagcgaactggtgaagcttccgcacctcagcgttcgcgccgtgactgccatcaccgaagcgagagcgaagtcgaagttcaaggactggaacgacttcgtgggcagacgggtcgtgccgcgctttgtcaggagcgagctcaaggagcttgtcacgttctagagcgtctgttgtccgcgtgccgaccgttcggcgcaggagagccgacgcaagaacccgaagggcgcggcggagcggagtgccgatcccgcgacgatgtcatgctgcggtaagctcgtcggtcgatcgccgctgccggacggcgcggtcgttgaactcaaataaggatatgcttgcaatgaaacgagtagctgttcgcacgatcgtagcggtcatcgtcgtggggtgtcttgcgtcgacggaagccaccgcgggtggccggcggggcgatgccgtagccgccggcatcgtcggcggcctggccgtcggtgccctgttgggctcgaccatgaccgcgcggtcggctccagcctatgtctatgagagggactattattcgccggcccccgtcgtccactatcatcgtcacgtgtacgaatacggcgacgagtatccgggcggatatgatcgcggctattcgtatgggtaccgcgaaggctactcggacggctattgggataacgattgaacctggccgcgcgtcgcgatcacgagaggctgagcctgcgatcgacttcggtgctgttggcgcgggtcgtttgccgggttcggcttgtcgccgccgaaccgattgactaccgtcgaccggtgggcatgggtggggcagggtgatgcgcggccggactgacggtgcttcctttggatcgagggcggacgccgtgatctggccggctatcgtggtcatccttgcggcgggcatcggcttttcctggaatccgacgccgatggcgcagttgcttgcggccgtgttcgttgtctgcgggatcatgcacgcggtcatctcctatggatcgcgggccgcgctcgtcttcttcgcaacctgcgtcgcggtcggattcgcaatggagaatatcggtgtcgccaccggtttcccgttcggcagatatcatttcgagatcggtgccgatcttccgaacgtgggacgtatcccgttcatcgtcggaccgatgtggttcggtgccggctatttctcctggatcgttgccgcgaccctgctcggcgaggccgaccgcaagctggatcgccggttcaacctgatcgccttgccggtcgttgcggcgttcgtcactgcgcagtgggatctggtggtcgatcctcccagcgcgacgatcgccaaggcgtggatttggcacgacggcggagccgtgttcggtgtgccgccgtcgaatttcttcggctggctgctgacctcatggctgttctttcagggctttgccttgtacctgcaccatcgcaacgatccggtcaggcccgatcacgccgccgatcgcaagttgcgcctcgtcggcatcctgttctacgtctccggcggcattacgcacgtggtgccatggatgcttgggcagtcgggtgacgtcgtggacgccgcgggccagtcctggcgcttgcaggatctccgtggagcgaccgtcgtgatcatggtgttcaccatgtgcttcacgtcgctgctggcgctgatccggctgctcgacagcgcgccgcgagacggcaggccaggtcctggggcctgatccggaaatcctcaccctacccctttttatccgccggtcggcgggcatgagtagactggtcagttggctcagggtttggatatgatgcctggccggcctgcgcacgctgcatgacagtttcaaattgctcgaagagcagggaggaatgtccatgttccgtaagctcatgattggcgcgctgggcgccctggccgtcttgttctcgacaacggcattcgcgcaagggtctgcggcggatgccaaggccatgcttgaaaaaacggttgcgggcatcaaggccgatagggccaggacgctcgaccagatcaacaagggcgaaggcggcttcctcgttggtgacctctatccgttctgcttcaatctgagcgacgggctcctggtcgcggtcggcaatcccaacgtcaagagcttgctcggcaaggatgcgaggacattcaaggacccgacgggcgacctgtatggcccaaggctctatgacgcggccaaagagggccaggtcaatgaggtcggctacatgtctcccaaggccggcgctgacaagacctgggtgccgaaggcgagctttgttgccgcggtcgccggtctgggatgtggcctcggttactacaagtagttcggtctgcttgccttcgttcagccctcgtcaatagctgcgccttgacgaggccctatcctagtaactgatccgcagcccgacgccgccatggaccgtgttgccgaccggctgcggtccggcggtgccgttcaggaagatgtcggcgacccagcccttggtgatgcggaagccgacgcggccgccatactcgaaccagccctggttgcccatcgtcggcacgatggtgccgtcgccggtcaccgtggcgacgatgccggaatgggtggcgaaggattgcacccagccgccattgatgttggtttcgatgttcgatccgaacagatgcgtccactggccgccgatcttgaccaggctggtgcggtcggtgccgtcggcgatggtggcatcgaacggattgaaggcgacagcaggatcgctgtagcccttgacccgttgccaaagctgccagacctcgacggatgccgcgacctcgtcacgcgccgacagccggccgatccagcccgcgcggccgtacacgccgtaattctcgctcgaggtctggccggtgaccgacaccggaccaaggctcgttgcgtagctgcgggtgtagcgcaccttctcggacggcgagaggatggtgccgatgtcgacgaacggccgcgacgagccccagtcgacaaagtcgtagcgtagcgcgaaggcgccgatcggcgcgctggtgacgttgtagccgccttcgccatactgcgtgtaggcgatgccggcgagcagcgacaaattcggcgtgatggtcttgcggccatggatgccggccgagaacgagccggcggagccgaacgcgctgatgcaatcgtcgcaattgatctgctcgttgacgccgagcagcaccgtgccgagcacacggttggtgatcatctggttgaagcgctggccggcgaggttgttgatcgaactgccgctcgacggcgcgccggtgatcggcgtcggtgaggggctcggtgttggtgtcggcgtgggggtgggcgtcggcgtcggcgatggtacggtagttggtgtaggcgtcggtgtcggcgtcggcgtcggtgtcgacgtgcagcctggcgcggccgacagcgactccgacggaatcgaggtgcagctcggcgttggagtctgagcctgggccggcgcaaccggcgcctgcagcatcgcaagcgacagcgccatcgtcagggctgccggcaggatcagctgatagattcggcgtgccatgatcaccgtccgcacagcatgccggcgggatcgtcgccgaccggtgtcgcatcggcgaactgggtcacggtgcagagccccgccgcctggctacaggtcgcggcaaaggtccagggcgggttgttggtcttctggatcgtggtgcggccgccgctcgaggtgatgatcgcggtgtcgccgggctgggtcaggtcgatgcattgccggctcgacgtgcagaccgtcgacgcgccttcctgcagcaccacaatggtctggccgcgctgtgacaggatatcgagcaccgtgccgcgaacgccgatcgtcgcaagcggcgtcgtgatcttgtaggcggccttttcggaatggccggtgacgaagcggaacgcgcccgaggtcaggcggaccgcgacatcgcgatagtgatgctcgtcgtcgaacacggtgcggtcgagcttgagcgaggcatttggcccgagcgagaggttggtgctgtcggccatcaccagtcgcgcggcgctctcgaggccggtgcgcaccgtctcgtcgcgcagcagcgcatcgccgacattgatcggcgtggttgcagccgcgacgcggagaacttcgttcttcaccatcgccgcttcgccgacgcgactttgcgcctgagcgggatgggccgtcagtacgacggcaagaccgattgctggtaacaagaaaaagcggtgaggcgaattcattgcaataccgatcgagttaatgtcgtcatcgtaccggatcgtgtacgcatctgatattgtatatatgtcacaagcggtaccgagctgactggatggtgggtgtctgtcgattcgaccacgttcaacgatgtggctgtgaaagtgagttcagatcacgcacgtcacatagtcacccgcgtcacgtgcgacgtatgcacgcgtagctcacacttcgctcacacttgttcccttctcaccgtgcccgccctttgagcatcgcaaccaaatcctcgtccgctgaccgccgccctgccgcccgtgcggcgatcgttgcggccatcatcttcgttgttgcccatgtcttgctgctgctcggaatcacgacgcccgacaagctctatttcgatgaggtgcattacgtgccggcggcgcggcagatgctccagccggtggtcgagggcccgatcctcaacccgatgcatccgccgcttgccaaggagatcgtcgcgctgtcgatcaaggcgttcggcgatgggccgctcggatggcgctatcccgccgcgctgttcggggcgctggcactggtcggcgtctatctcgccgcgctcgcgctgttcgcatcgcaggaacgcgcgatcgcggccgtgctgatcgccttcttcaaccagatgctcttcgtgcagtcgcggatcgcgatgctggatattttcgcgctcgctttctgtctgttcgcgatcgcagctttcatccgcggcttcaggcaaacgcggccgcactctgccttcgcgctggcgggattggccgtggggctggcgagcgcctgcaaatggagcgggctgttcgtgctcgcgacctgcatcgcgatcgtcgtagtgatccgcctgatgcagggctggcgcacgcgctttgccgatgccaatgcgcaggactggtaccagccggacctgtggccggatttccgtcttccgcacgtcatcgtctgtttcgttctgatcccgtcggccgtctatctcgcgaccttcgtgccgttggtcggcctctcgttcagcggcctcgtcgaggcgcagcgccgcatctttgccgacaacacgacgaccgcgattgcgggccatacctatatgagttcatggccgacctggccgttgctggtgcgcccggtctggtatctgttcgagaaggccggcgatgacaggttcgcggcggtggtgtttctcggcaatccgctggtgctgtggccggcattgatcgcgctgatcgtcgcgctgcgcgactggatcgtcgaccgcagccgcgatgcgtttctcgtgcttgcgttctacctcggcccgtatctcgcctgggcgctgctgccgcgcacgcttggcttcatctattactatctgccggcggccaccacagcgagcttcgtgctggtctacgccttgacgcgcaaaggggcgccgcgctggctgctgtgggccttcgtggcagtcggatgcgcagggttcatcgcgatgctgccgatcactgtcgccgcgatcgggacctcgatcgcgaccttcaatcggctgatgctgttccagaactggatttgaatctgttgggaacaggcgatccgcctgccggcttggccggcggatcgaaggtgcgggagattactgctgtgccgtcttggtatccatgttgaccacctgcacccgacggttggtcggatccatcggcgcgttcggatccttgggccgggtcttgccgtagcctacggtcacgagatcagagccgttcaggccgtaatgctcgaccaggtatttcttgatggtgtcggcacggcgttccgagaggtcctgattataagcttcgctgccgattgcatcggtgtggccggcgaggacgaaggtcgagcccttcatgctggcatccgacagcgccttgccgagctcctgcaccgcctcggtcgagcccttggcgatctcagccgagttgtagtcgaagtgaatctccagatcgatcttcggcttgttggcggcgatatcggcgatctcctggcgttcgcccattgacagcgagcgggtctgccggttgcggacggtgctgaggaagctcgcctccttggccgaagcggccgggtcgacctgcgtgccggcggagaggccgcgggtggccgacttcggcttcagcgcattgaggatctgggcggccggaacggtgtcgctgccggccagtgcgacgcccgccgtcatcgacagcgcggcgccgattgtcaaaacagacaagaaaagggagcgggtcatggttttggtccttaaatgtcaggccagccaatccggctgctatcgttttgatgccgggaacctaggacgggttcaacgtccgcaatgtgatttatgtcacatttgagtgggcgggccctgctgccatgcaggggcgcgcggcgatgaggaggaggatatggcccacgtcaatcgcgtgctccgctcgatcaatgacgaagatgccgcgcgctgcgtcgatatcttcctgcgcccggacggcaccctcggcttcgaagaatatcggcgtgacgtcgaagatggccgcggctggtttccgatcggcggtcatgcatcccgggtcttcccagaggagagcgccgcgctcgcggcggcgctggcggacgttccctggttgcggagagccgttggatcgccataggcggcccgaagcgccgccagacctccgatcatgcacggctgatttccctcgcgcggctctccacagcggcgcgaatctcactacattgccggagcaatgccccgcgccgccgaacccttgtccctgaacaatgccgccgcccgccatatctggctacgtgcgcagcggctcgatacgaaggcaccgttcggggagggcgcgtcggccgtggccgccgccgtcgaccatctcggctatgtgcagatcgataccatcaacgtgatcgagcgctgccatcaccacatcctgttcacccggattccggactaccgccgcgccgacctcaagcaggcgcagagccgggacaagagcgtgttcgaatactggacgcacgcgctgtcctacgtgccgtccaaggacatcaacattttcctgccggcgatgaaggcgcacaagcgcgagggccataaatggttctcgtcggtaacgccggcggacacccgcaaggtgctgcggctgctgcgcgagggtccgctgaccatccgcgacatcgatgacgacgtgctgaccgagaaggagcatctctggcagagccggaaaccttccaagcgtgcgctgcaactcgccttctatggcggcgtggtaacgatcagcgagcgcgccggcatgttgaagacctatgagctgatgcacaggcatttcggctgggacaagccgccgaagccggcgccggcctcggctcggacagcctatctgctcgatcgcgcgctgcgctcacagggcgtcgtcagcctggattcgatttgtcacctcgatgcgccgagcaagaaggcggtgcgcggcctgatcgaggcgagggtgcgccgcaaggagctggtccgggttgcgctcgacggcgccggcaagcaggagcattgggcgcggccggaggtgctggaagcgaccggcgagggcgatccgtccctggtccacatcctctctccgttcgatcccctgatcatccagcgcaagcgcaccgagctgttcttcggctacggccacaggttcgaggcctatgtgccgaaggagaagcgcctgttcggctatttcgcgctaccggtgctggtcggcgacgatatcgtggcggccctcgatctgaagacggaccggcggaacaggaagctcctgatgcagaaatggagctgggtcggcaacggcaagaagcaggcctcgcgcaaggaactgaagcgccgcatcgaggaggagctcgaccgcttcgcgcgcttccagctcgcggagtaggtccgggagctctctatccgtcattgcgaaccaaagcgaagcaatccatcgcaccgcaagatggtcagattgctttgtcgcatcagcgcaaaattgccccgcaatcttgtcgcgggctcctcgcgatgaggccgtggataaagtccgatcttcccgcttgcaccgcgtgttgcgactttttgccattgcccaatgccgggccagccaatattcctcagggcaagcaacagcctgggggaaacagatgagccagaccgcaaccgctgcgcctgatcgcggcacccgcagcgaggtcgagacgtccacgatccgcgcgatctcctggcggctgattccgttcctggtcctggcctacttcttctcctatctcgaccgcgtcaatctcagcttcgcggcgctcaccatgaatgccgagctgaagttctcgcccttggtattctcgttcggtgccggcatcttcttcatcggctatttcgtcttcgaggtgccgagcaatctggcgctggagcggttcggcgccagcaagtggatcgcccgcatcatggtgagctggggcatcctctcggcgttgatggcggcggtctatgacgagcacagcttctacgcgctgcgcttcttcctcggcgtcgccgaggcgggcttcttccccggcatcattctctacctcacctattggtacccggccgaatatcgcgcccgcttccttgctgccttcgcgatcgccgtcccggtctcgaccgcgatcggcgcaccgatctccggcctgctgctcgggctcgacggcgtcatggggttgaagggctggcagtggctgttcatcatcgagggcgtcccctcggtgctgctcggcatcgtcacctggttctatctcaccgaccggcccgagaaggccgattggctctcggccgagcagaaggcgtggctgaagggcaagctcgacgccgaggtcgcagccaagcaggcggcgaagcacttcacatttctcgaggcgctgtcctcgtcgaaggtgctggcgctgagcgcgatctatttcggcttcgtcgcctcgctctacggcatgcagttctggctgccgcagatcgtcaaggcattcggtctgaccaatgcgcagaccggcttcgtcaccgcgatcccctatgcgttcggcaccgtcgcgatgatcctgtgggcgcgccgttccgacgccacgcgggagcgcgtgtttcatgtcggcgcgccgctcttgctcaccgcactggcgctcgccgtgtccagctacatcaccgatccgaccatgaccatggtcgtgctgacggttgccgcgatcggcgtgttctgcacctttgcggtgttctggacgctgccgaccgcctggctcgccggcaccgcggccgccggcgcgatcgcgctgatcaactcgatcggcaacctcgccggttttctcgggccctacctgatcggctgggtgaaggagacgaccggcagcacctcgaccggcctgttggtgctgtcgctgctgccgctcgcggcggggctcttggttttcctcgggagccacgagaccaagaccgagttcgtggaagcgaagtaacggcgcaacggctccttggctgcgtgggatgggcagagcgaagcgaaacccatcaattatgcgcggcgaagatgatgggtttcactgcgttctacctatcctacagtctgtctcctgcgcttagatcggatagcgccacttcagcgcgcgtcggacgaagaagatcgccaccagcgtggcgccgagcgccgcaagccacgtccacttcagggtgccgccctgtgtgagcgcgtagtcctcggaaagcgtcagtgccaccagaatgccgatgagccctacgccagaccaatagagcggcgaacgcagcattccagtcgcggcatgttcagccgcgcgttcgcgcgctctgccgacagaccagatcaagaagccggcgtaaccaagggcaaagatctatgacatccccgcaacctcgcacgccggtgcttccgggatcgtgaagggctgaagcgaaagtcgcggtattgggcggagaagcccgatctcggccttccacctcacgaataggttactactgacgattattgacattcatcagtgataaatcgatactcttcatcagtcgtcagtccgatggagatttcagatgttcgttcgttccgttttgtcgagctactacaggctcttaaccggagcgtcgctggctttcgcggtgttcgcgctgaccggctgtaacgaaaaggcggccgaaaccgccgatccgggacgccccgttctggtggcgaccgtccattacgaagctgaaacccctgagcgcagctttgtcggcaccatcaagccccgtatcgaagccgatatgggcttccgggtcgccggcaaggtggccaagcggctggtcgaggtcggacagacagtcgacgtcgaccagcccttggccaccctcgacgaggtcgacctgaagctgcaggcggagcaggcggaggccgaattccgcgccgccaccggcgtgctggcgcaggccgcggccgccgagcagcgcgccaaggacctgaaggtcaagggctggaccaccgatgcggcgctcgattccgccaaggcggccggcgatgaggcccgcgcccggctgaaccgcgccgagcgttcggtcgagctgaccaagaattccctctcttatgcaacgctggtggccgacacccggggtgtcgtcacagcgaccatgatcgagcccggccaggtggttgccgcgggccaggcctcgatccgtgtcgcccgacttggcgagaaggaagccgtcgtcgcgatcccagagacgcttcttgctcgtgccaggtcgggcgttgccacggtgacgctgtggtcggatgccaagaagacctatgccgccaggctgcgcgaggtggcgccgcaggccgatcccgccacccgcacctatctcgcgaaattctccctgcccgatgccgacgaggccgtatcgctcggcatgaccgcgacactgacgctggccgacaaggcgagcgagcgggtggccaagctgccgctgtcggcgctgtacagccagggcggcgatccctcgctctacatcgtcgacgacaagggcgaggtcgcgctgaagccggtcaaggtgaaggcctatgagagcaacaacgtcgtgatctccggcggcgtcgacgacggcgccaaggtggtcgccctcggtgtgcagaaactcgatccgagccagaaggtgcgggtcgtgtcgtcgctgtcgttctgatcctcgcaatatcagcagaaacggttctgggacctggtctagaacttggagagttcgatgaagcgcttcaacctttcggcctgggcggtcagccatccgacgctggtgctgttcctgatgatcatcctcggcgtcgccggcttcttctcctatgagaagctcggccgcgccgaagacccgttcttcaccgtcaaggtggtgaacgtctcggtgatgtggccgggcgcgacctcgcaggaaatgcagatgcaggtcgccgatccgatcgagaagaagctgcaggagctgccgttcttcgacaaggtgcagacctattccaagccgggcttcaccgcgatgcaggtctccttcaaggattcgacctcgccgaaggacgtgccctatctcttctatctcttgcgcaagaagctggtcgacgtgcagggcgaactgccctccggcattctcggtccggtcgtcaacgacgaattctccgacgtcgattcgatcctctatatgatgaccggcgacggcgccgattatgcgcagctcaagaaggtcgcggaaggttttcgccagcgcctgctgaaggtgcctggtgtcaccaagatcgatctctacggcgtccaggacgagcgcatcttcgtcgagttctcgcatgccaagctcgcgacgctcggcatcaccccgcaggcgctgttcgattcgctcgccaagcagaacaacgtcacgccggcgggcaccgtcgagacctcgtcgcagcgcgtgccgctgcgcgtcaccggcgcgctcgacggcgtcaaggcggtggccgagacgccggtcgagagcaacggccgcgtgttccggctcggcgatatcgcgaccgtctcgcacggctatgtcgatccgccgaccttcaaggtccatcaggagggcaagcccgcgctcggcatcggcgtcgtcaccgccaagggcgccaacatcctcgagctcggcaaggaggtgcagcaggcgacctccgagttcatgaaggcggtgccgcagggcatcgacatccagcagatcgccgatcagcccaaggtggtcgagcatgccgtcggcgagttcgtgcactccttcgtcgaggcgctcgcgatcgtgctgttcgtctcctttgtcgcgctcggctggcgcaccggaatcgtggtggcgctgtcggtgccgctggtgctcggcatcgtcttcatcgtgatgaacgcgatgtcgctcgatctgcaccgcatcacgctcggcgcgctgatcatcgcgctcggccttctggtcgacgacgccatcatcgcggtcgagatgatggtggtgaaaatggaacagggctgggaccgcatgaaggcggcgtcctttgcctgggaatctactgcgtttccgatgctcacgggaacgctggtcacagccgctggcttcctccccatcggctttgccaattcggcggtcggcgaatatgccggcggcatcttctggatcgtggcgatcgcgctggtggcatcctggttcgtcgcggtgatcttcacgccctatatcggcgtcaagctgctgccgaacatcaaggtgcaccagaaccacgatccgcacgcgatctacgagacgcggatgtatcgtggcctgcgcagcgtcgtgcagtggtgcgtcgatcaccgcatcaaggtggtggcggcgaccgtcggcgtgttcgttgccgcgatcataggcttcggccacgtccagcagcagttcttcccgctgtcggagcggcccgagctgttcctgcagctccgcctgcccgagggcacggccttcaacgtcaccgagaaggcggtgaagcaggccgaggggctcttgaagggcgatgacgacattgcgacctacaccgcctatgtcggccagggctcgccgcgcttctggctcggcctcaacccgcagctgccgaacgaggcgttcgccgagatcgtgatcctcgccaagaacgtcgaggcgcgcgagcgcatcaaggccaagatcgagcaggccgccgccgacggcgcgctgaacgaggcgcgggtccgggttgaccgcttcaacttcggtccgccggtcggcttcccggtccagttccgcgtgatcgggcccgacgccaacaaggtgcgcgacatcgcctaccaggtccgcgaggtcatgcggcagaacaagaacgtcaaggatgtccagctcgactggaacgagcagtcgccctatctgaagctcgccgtcgaccaggaccgggcgcgcgcgctcggcctgaccccgcaggacgtctcgcaggcgctggcgatgctgatctcgggcgcgccggtcaccacgatccgcgacggcatcgagaaggtcggtgtggtcgctcgcgcggtgccgtccgagcggctcgatctcggccgcgttggcgatctcaccatcacgtcacgcaatggcgtggcggtcccgctgcagcaaatcgcaaagatcgaatatgcgcatgaggagccgatcctgtggcggcgcaaccgcgacatggcgatcacggtgcgctccgacgtcgtcgacggcgtgcaggcgcctgatgtcaccaaccagatcgcgccgaagctcagggatatccaggctcatctcgagccggcctaccggatcgagccgggcggggcgttcgaggaatccgccaagggcaatgcgtcgatcttcatcctgttccccgtgatggtgatggtgatgctgacgctgctcatgatccagctgcagagcttctcgcgcctgaccttggtgttcctgaccgcgccgctcggcatcgtcggcgcctcactcgggctcaacgtcgccaaccagccgttcggcttcgtggcgctgctcggcctgatcgcgctcgccggcatgatcatgcgcaacaccgtgatcctggtcgatcagatcgagagcgacgtggcgtccggcctgacccgccgcgaggcgatcgtcgaggccaccgtccggcgcgcccggccggtggtgctgaccgcgctggccgcgatcctggccatgatcccgctgtcgcgctcggcgttctggggcccgatggcgatcaccatcatgggcggtttgtttgttgcgactttcctgaccttgctgtatctgccgggtctttacgccctctggttccgcaagaccctcgaggagagcggccccgagcagatcaatactgcgccgcaacatgccggcaatgcgcaacacgcatttccacttgctgaagcggctgaataattgaagattgagcagcaggccaacatgacgctgatccaggaacatagcgaaaccgacacccgcgagcggattctcgtggtggcggagcgcttgttccggcagatcggctaccagaagaccacggtcgccgacattgccaaagagctgcggatgagccccgccaacgtgtatcggttcttcgattcgaagaaatcgatccacgagggcgtggcgcgcggcctgatgggcgaggtcgaggtcgaggcgcagcgcatcgcgcgctcggaaggtccggcggcgatgcgcctgcgccagatgatgacgaccatcaatcggatgaacaccgagcgctatgtcggcgattccaaactgcacgagatggtcgagatcgcgatgcaggaggactgggaggtctgcgtcgcccatatggagctgatcggccagatcatcggcgaggtgatcgcgcaaggcgtggcctcgggcgaattcgaggtcgaggacctcgaggtcgccgcgctgtgcgcctgcacggcgatgatgcggttcttccacccgcagatgatcgcccaatgcgccaccaagccgggcccgaccatcgaccagatgatcgatttcgtcgtcgccggcctgtcgccgcgcgcccgcgcccattgagcgccagggctgacgttttcgtcagttgacttccttgtcattccggggcgatgcgtaagcatcgaacccggaatctcgagattccgggtctggtgctcgcgcaccatcccggaatgacgagggcgcacccgtgaccgagaaagacctgcatttctacgagccgaagaacggccacggcctgaagcacgatccgttcaacgccatcgtggcgccgcggccgatcggctggatctcctcgcgcgacaagggcggcaacgtcaatctcgcgccctacagcttcttcaacgccttctgctatgcgccgccgatcatcggcttctcctccaccaactggaaggacagcgtcgccaacatccaggacaccggcgagttcgtctggaacctggcgacgatggatctcgccaagcacatgaacgcgaccgcggcgcatgtcgcgcgcgatgtcgacgagttcaagctcgccggcctgacgcaggtacccggcaagctcgtcaacgtcccgcgcgtcgccgaaagcccggtgtcgttcgaatgcaaggtcagccagatcatccagctccagggcgccgacggcaagaaggccgaggcctggctgacgctcggcgaggtcgtcgccgtccacatcgacaaggccttcatcaaggacggcgtctaccagaccggtctcgcgcacccgatcgtccgcgccggccggcgaggcgactatttcgagatcaaaccggaaaacatgttcgagatgatccggccggattagctcttttttctccctcgccccgctcttgcggggagagggttggggtgaggggccgtctccgcgagttgtgatcgtcgtgagacctgtaccccctcacccgaaattcaagctgcgctcgaatttcgacctctccccgcaagcggggcgaggtgaaggacgccgcgctgctgcgcgttcacgcgcgccgcgataacgaccttcaccacaacaatgtgaaatttccgcgcgctgcgatgaaaaaccgtcactcgcaacctcggcgcgagcagtctaaccttccgcgcgccaggccggatcaacggccggccaacagagtgggaggatgcgatgacacgtcaagagcggcgcgatccgaacgtttcacgacgagcacttgtccagggattggcggtgggggcggccgctgccgcaaccggcgtcggtggcgcgctggcccagaacgcgcccgcgccggtggggccaccgacaaccatcaccagcccgccgcgcgacttcagtccgcgcggcgcgccgaccacctatttctgggaccccgacatcatcgcggtcgatccgtccttcaacgacctggcccagcccaacacctcgatcaagcggctttacaccggtctgttgtgggcggaaggcccggcctggagctcgcagggccgctatctcttgtggagcgacatccccaacaaccggcagatgcgctggtcggaggatgatggccatgtcagtgtgttccgcatgccgtcgaactactcgaacggcaattcgttcgacttccagggccgccagctgtcctgcgagcatctcacccgccgcgtgacgcgctacgagaatgacggcactgcgaccgtgcttgccgattcctacaacggcaaacggctgaactcgccgaacgacatcgtcgcgcatccggacggcagctactggttcaccgatccgccctatggcggccagctctatgagggcgagcccgacgcggccggcggaccgagcaactccgccggcaagctcaatccccggatcggccagccggcgggcttcgtgccggccaagcgcgagctgccgaccaattgctatcgtatcgacccatccggacgcgtcgatctcgtggtgagcgaggatcaggtgccggatccgaacggaatctgcttttcgcctgattacaagaagctctatgtggtctcgaccggcaagggaccgggcgacaccggggcgggcggcaagggtgacgtgttcgtgttcgacgtcggcgccgacaacaagctgtccaacggcaagcggttcagcgatttcacgatcgacggcgtaaagtgcgggccggacggcatccgctgcgacgtcaacggcaatgtctggtgctcgagcaatgccggccgcgccgtcggctacaatggcgtgacgtgctggtcgccggaaggcaagctgctcggccgcatccggctgccggaggtctgcggcaacatcaccttcggcggccccaagcgcaaccgcctgttcatggccgcaagccagtcgctctacgcggtctacaccgcgacccaaggcgccgggccggcgtgatctaactacacctctccccagcggggggaggtcgatttgcgaagcgaatcgggtgagggggcgctgctccaacgagagaccgtaactcctcacccggcgctgcgcgccgacctctcccaagggagaggtgaattcgccatcccccgctacctgattgtcgcacctcaactttcggaactgaacgcgcgacctgccgttaacagacggcggcctggccgcgtcaatttcgctttatttgaacagcgaagtgttcaccggggaccggcactttccgataggattatgcatccgcgccgccgatccatgaggaccccaccatgagcttccgtcgcgattacctttccaagccgatcttctcctgggcgcgtggtgtgctgccgaccatgtcggacaccgagcgcgaggcgctggaagccggcgacgtctggtgggacgccgacctcttcaccggcaatcccgactggtcgaaattactggccttcgcgccggccagactgaccgacgaggagagcgccttcctgcacggtccggtcgacgagctctgcgcgatgctcgacgagtggaagatcaattgggaatggcgcgatctgccgcccgaggtctgggccttcatcaaggccaagaagttcttcggcatgatcattccgaaggagtttggcggcctcggcttctcgccctatgcgcattccgaagtggtgcgcaagatctcgtcgcgctcgctgaccgcggccgtcaccgtgatggtgccgaactcgctcgggccgggcgaactcctgatgcgcttcggcaccaaagagcagcaggaccaatggctgccgcgcctcgccgccggccaggacattccctgcttcgggctgaccagtcccgaggccggctcggacgccgcctcgatgatcgacaccgggatcatctgcaagggcaatttcgaaggccgtgaggtgctgggcctgaggctgaactggcacaagcgctacatcacgctggggccggtcgcgacactgctcggcctcgccttcaaggcctatgatcccgatcacctcgtcggcaatcaggaagagctcggcatcacggtcgcgctgatcccgacccatctgcccggcgtctcgatcggccaccgccatctgccggcgatgcaggtgtttcagaacggcccgaactggggccgcgacgtcttcatcccgctcgactacatcatcggcggccaggagagactcggccagggctggaagatgctgatgacggcgctcgccgccggccgcggcatctcactgccgtcgctgtcggccgccggcgctgcctatgccgcgcgcaccaccggcgcctatgcccgcatccgcgagcagttcggcatttccatttccaagttcgagggcatcgaggagccgctggcgcgcatcgccggcaccgcctatctgcttgacgccgcgcggcggctaacttgtgctgcgctgaacgaggggcaccaccccgccgtgatctccgggatcatgaagctgcacgccaccgagcggatgcggatcgcgatcgacgacgccatggacatccatggcggcaaggccgtgatcgacgggccgcagaactatctcggcgggctctaccgctcggtgccggtcggcatcacggtcgagggcgccaacatcctgacccgcaatctgatcgtgttcgggcagggcgcgatccgcgcgcatccctatctgttgcaggagatgaacgcgctcagcgagaccgatcgcgacaagggcctgacgacgttcgacaccgcgttctggaagcatgtcggccacagcttcgcgaccatgttccgcgcctggggccgcagctggagcttcggcctgttcgcgccggcgccggatgccggcgatgcgacagggttctatcgccagctctcgcgctattcgtcggcgttcgcgctgtgcgccgacatagcgctgcttacgctcggtggtgcattgaagcgcaaggagatgctgtccgcgcgcttcggcgacatcctgtctgaactttacctgctgtccgccgcgttgaagcgctggcaggacgagggccggcagaaggaggatctgcctgcgctcgaatggtgcatggcgtccggcttcaagaccattgagaaccgctttgccgaaatcctcgccaacctgccgaaccgtccggtggcatggctgctgaaattcctgatccagccgttcggcgcccgcgtcaccggcccgtctgatcgcgtcgtgcatctgtgcgcgcagctcgtgttgtcgccatcggcggcgcgcgaccgtctgacgccggacctcgcctttgtcgaggatgacggcggcatcgcgcgactggagaaggccttccgcctcgtcactgcggccgaggatgccgccaagcagctgcgcgcggcgcggctgcatgactggaacgagggcgtcaagaagggcgtcatcacccaggatgacggcgagaagctcgccgccgctcacgaggccatcgccaaggtcatcgaggtcgatgattttgcgccggaggcgctgtccccgatttacaagaaatccgccgacgtgcatcagttcttccaggagcttggtgagcagagggcggcgagctgatggcgcgaccagtctttatcgtcgacggcagccggacgccgttcctgaaggcgcgctccggtcccggcccgttcaccccggtcgatctcgccgtgcaatgcggccggccgctgctggcccggcagcctttcgcgcctgatgcattcgaccaggtcatcctcggctgcgtcaatgtcatcgccgacgagatgaacccggcgcgggtcgcggcgctgcggctcggcatgggcgagcagatggtcgccttcaccgtgcagatcaattgcggctccgggatgcagtcgatcgacaccggctatcgctatatccgtgaaggcatctccgacctgatcctcgccggcggcgccgaggcgttgagccacgcgccgctggtctggccgaattccggcgtgcgctggttcgctggctttgccggcgccaaggggctgggcgccaagatcgccgccgcgctgaaagtgaagccgagctacttcaagccgatcatcggcctcgagcgcgggctgaccgacccgatcaccgagctcaatatggggcagaccgccgagaaggtcggccatctcttcggcatcacccgcgcgcaatccgatgcgtacgccgccgaaagccatcagcggctggcgaaggcgcagaaagaaggcttcctcaagggcgaggtcgagaccgcgttctcgcgcgacggcaagttctacgaccatgacgacggcgtccgcccggattcgacgtcggacacgctggcgaagctgaagccggtgttcgagcgcccctggggccaggtcaccgccggcaattcctcgcagatcaccgacggcgcatcctgggtgatcctggcgtcggagaaggcgatggccaagcacggcctgacgccgaaggccgtcatcctcgacagccagtggtcggcgctcgatccctcgatcatgggcctcggcccggtgttgtcggcgagtgcgcttctgaagcgcaacgggatgaccttgcaggacgtcgagacctgggagctgaacgaggccttcgccacccaggtgctgggctgcctcgcagcatgggctgacgacaaattctgccgcgagattttgggacttgacggcgcggcgggcgagatcgaccgcgccaggttgaacgtcgacggcggcgcgatcagcctcggccatcccgtaggctgcagcggcaaccggatcgtgctgcatcttgtcaatgcgatgaagcggctcggcaccaggcgcggcgtcgccaccgaatgcatcggtggcgggcagggcggcgcgatgttgatagagacggtgtgatcatggattcacggatcatggaccttctcgccgaccgcgtgctcgagctcgggccgaagcccgctgcggacagcccgtacaggaatttcaagctgacgcgtgacgaggacggcatcgcctggctgctgttcgaccgcgccgacaccagcgccaacacgctgtccgccgacctgctcgaagagctcgatgccatcgtcacggcgctggagagccagcggccgaccgggctcgtggtgcgctcggccaaaaagagcggcttcatcgccggggccgacgtcaacgagtttcgcggcgtcaccgatcccggcgcggtcgagacccagatcggccgggcgcatgcggtgatcgaccggctggaggcgctgcgcgtgccgtcggtcgccgtgatccacggcttctgcctcggtggcggcctcgaggtcgcgctcgcctgccagatgcggatcgcgatcgacgacgcgcggttcggtttccctgaggtgatgctcggcctgcatcccggcctcggcggcaccgtgcgcttcaccgagctggtgaacccgatgcaggcgatgaccttgatgctgaccggcaagacgatcgacgcgcgccgcgccaagtcgctcggcctggtcgatgccgtcacccaggagcgccatgtccgcaatgcggtgaaggacgcggtgttcggccggctgaagcgcgccaagccgggtgcgctcaattcgctgctcaatttgggcccggtcaggggcttcctcgcctcgcggatgcgtagcgaggccgagaaggcggcgccgcgcaagcattatccggcgccctacgcactgatcgatctctgggagaagcatgccggcaaccgttcggcgatgctgaatgcggagaaggcctcgttcgccaatctgatggtgacgccgaccgcgcaaaacctgatccgggtgttcttcctgcgcgagcagatgaagaagctggcgggctccggcaacaaggttgcgcacgtccatgtcatcggcgccggcgcgatgggtggcgacatcgcggcctggtgcgccaaccaggacatgcgggtgaccttggccgacatgaaggccgagccgattgcgggggcgatgaagcgcgcctctgacctgttcggcaagatcatgcgcaagaagatcgatcagcgcgacgcgctcgaccggctgatccccgacatggacggcgagggcgtccgcaacgccgatctgatcatcgaggcggtgccggaaaagctcgagctgaagcagaaggtctatgccggcctcgagccgaagatgaagcagggtgcgatcctcgccaccaacacgtcgagcatcccgctgcaggatctgcgcaccacgctggcgcggccggagcggttgctcggcctgcatttcttcaatccggtgtcgcggctgcaactcgtcgaggtcgtcagccatgacggcactgatgccgccatgctcaaggaggcgctcgccttcgtcggcgccatcgaccggctgccgctgccggtgaagagctcgccgggcttcctcgtcaaccgcgcgctgacgccgtacatgctggaagcgatgatgatgctggatgagaagaccgaccagcgcctcatcgacgcggccgcgatcgagttcggcatgccgatggggccgatcgagcttgccgaccaggtcgggctcgatatctgcctcgatgtcggcgacatgctgcgctcgaagttcggcgacaccttgccgccgacgccggcgtggttgcgtgaaaaggtcgccaggggcgaactcggtcgcaagaccggcaagggcttctacatctggaaggatggcaaggcggagaaggcgccgctgccggacaccggccccaaggtaagcgatgaaatgatcgaccgcttggtgctgccgatctcgaatgtctgcgtcgccgccttgcgtgaaggcatcgtcgacgatcccgacatggtcgacggcgcgatgatcttcggcaccggctatgccccgttccgcggcggcccgctgaattacgcgcgcagtcgcggcgttgataatgttgtgtcggccatgcaatcgctgatgcgcaagttcggcggacgatttgcgccggacaccggctgggagggcttcaagtgaccgacacccaagcgcctgagacccaaacgcctgaaacccacgttcacgccccgtcgatcagcggcaacgaaccgcagggagatctctgcatccgcacgctggcgatgccggccgacaccaacgccaatggcgatatcttcggtggctggctgctcagccagatggacgtcggcggcggcgtgttcgcctccaagctggcgaagtcccgcacggtgacggttgcgatcgaggcgatgaacttccgcaaggcggtctatgtcggcgatctcgtctcggtgcacgccaatctcgtgcgcgtcgggcgtacctcgatcacggtgcacctcgaagcctgggtgctgcgccgccgtgagcagcagtcgatcctggtcaccgacggcaatttcacctacgtctcgatcgacgagcagggccatccgcaaccgattcagcgtgacggcgcgacgatttcgacctgaatgctttcgcgccaagcatgctgctgattcggcgcggggggaacgcgtcgaaactgagaccggagcgcggcctgattgcaaaaacggcgcttcggttctcaaataaaccgaggaacaaacgttcagcgatcccgttgtcggcccggaataaaccgaggccgataatgtcagactgctacgtcatcgaggtaagttcagagatcgcgggtatcgtggtgcgcgataccaagggttacgagttttttgcagccgcgcaccgcttccgcgccctcgaaggccagatttttcgcaatgcacgtgaggccgagcgcgccgcgcgacggcttgtcaccgggcaagatctgcagctggcctcctgacgcggccggtgcggtgcgtcatttgcgtgcgccgcgagagtctgtattgatgcatccgaactcatggaaacgtttttcggatgtcgcagacacaaggtaaagcactgctgttcgatatcgacggcacgctcgccgacaccgacccgctgcatctggcagcgttcaaccgggtgctcggcccgcatggacactccttcgatcacgcgcgcttcggcagggagctgcaaggcttctccaacgcatcgatcggcgagcgctttctcgcccacgtgccgcctgaacgccgcgccggcattctcagcgagaaggagcggatcttccgcgagctggtcagcggccagatcgtgccggtgccgggattgatggcgctgctcgaccgggcggatcgcgccggcgtgccgatggtggcggtgaccaatgcgccgcgcgcgaacgccgaattgctgctctcaggactcggcgtcgcgcaccgtttcaaggccctcgtgatcggcgacgagctggagcatggcaagccgcaccccttgccgtatctcgaggggctgcgcctcgccggcgcggccgcatccgcgtcgctggcgttcgaggactcgcgctccggcattcagtccgcgacggcggcgggcatcgcgacgatcgggatgcgaaccgggctcagccatgccgatctgctggcggccggcgccgtcgccagcgcgcgggcgttcgatgatccggaattgatccgcctggttgcgtcggccatgacttggtaaaccggcatgctgcaacgcagttcttaaccccggcgatgcttgctcgttgacctcggtgccgaacggccgcaccatgggcgagagcatgatccggaaaagtggcaaccggttttccgaaatgatcatgctccaaccaattgccgttcaagggggccgccgtggccggactctctcatcgccagactgaaatcctcaatatcgcacgcgcattcggccgggtcatggtcgaggaccttgccaagcgcttcgaggtgtcggcgcagaccatccgcaaggacctcaacgatctctgcgatgagcggtcgctgacccgcatccatggcggtgcgatcatcgcctcgggcgtcgagaacctcgcctacgaggcgcgccgcttcgtcgccgccgaggagaagaaggcgatcggcgccgccgcggccgcgcggattccgaacggctgctcgctattcatcaatatcggcaccaccaccgaagaagtcgccagcgcactgacctcgcacgaggatctgctggtcatcaccaacaacctcaacgtcgcgatgctgctgtaccgtcatccgcgcatcgaggtggtggtggcaggcggcacggtgcgccgcgccgacggtgcggtggtcggctcgaccgcgacgcagttgatcggccagttcaaggtcgattacgccatcatcggcgcgtccgcaatcgacgaggagggcgcactgctcgacttcgactatcgcgaggtgcaggtcgcgcaggcgatcatcgccaatgcacgcaacgtgatgctggtgtcggatgcgacaaaactccgccgcagcgcgccggtgcggatcgcgcatatgagccagatccagaccttcgtgaccgactcgcccttgcctgcgggcctcgccaacatctgtcacagcagagggatcgaggtcgtcgttgcgatggacaagccgcaagccgatatcgacgacaacgccgacccggcaccggcaccggcgacgctgcgcagcgcgtagcgcttcaatcctacgcgcctttgcgcgcgtctcgaaggatcgacggccaccagccgggccgtgcacccttcgaggcttgcccagcggcgcaattgcgtcgcaaggctcacgcctcagggtgacggtccaaaccgcggcttgcgacggtggctcgtggaccgcctgcccccgcagcggtcatcccgcccaaaaaatccccaaccaaagttccccattttcgctttgctttcgtttttggttgtgatctactctaattcgaaagtaaaaccgtcaaagcgaaggcggttgccgggggaagcgttctttggatcgaatttacgacctcgccatcattggaggcggcgttaatggctgcggcatcgcgcgcgatgcggcgggccggggcaattctgttttcctctgtgaaatgaatgacttggccagcggaacgtcgtcctggtcgaccaagctcgtgcatggcggcctgcgctatctcgaatattatgagtttcgtttggtgcgcgaggcgctgatcgagcgcgagatcctctggcagatcgcgccgcacatcattcgtccgctgcgtttcgttctgccgcatcacgccggcctgcgcccggcctggctgctgcggctcggcctcttcctctacgaccatatcggcggccggcacctgctgccggcgacgcgctcgctcgatctgacccgcgatgtggtcggcaagccgctgatcccgggccgctacaccaagggctttgaatattccgactgcttcgtcgacgacgcgcggctggtggcgctgaccgcgcgcgacgccgccgatcgcggcgccgagatccgcacccgcacccgcgcagtcgagacccggcaggtcgacggcgtctggcatgtcaccgtcgaggacagcgtcagcggcgcccgtgagacgatccaagcgcgcgtgctggtcaatgccggcggtccctgggtcgagcaggtgctggcgtccggcgccggcgtcaacgcgcgggccaaggtgcgcctggtgcagggctcgcacatcgtggtgcccaagctctatgaccacgaccgcgcctacatcttccagaatgccgacggccgcatcatcttcgtgattccctatcagaacgaattttcgctgatcggcaccaccgatcgcgactatgacggcgatccggccaaggtgaaggcgacgcaggaggagatcgagtatctctgcgcctccgcgagcgaatacctcgcaaagccggtgaaacctcaggacgtggtctgggattattccggcgtgcgtccgctctatgacgacggggcgagcgaagccaaggccgcgacccgcgactacgtgttcgagctcgatacgcccggcggtgcgccgctgctgtcgatctatggcggcaagatcacgacctatcgccggctgtccgaggaggcgctggagcggctcgcgccttatctcaagggcgcgaaagcgcaggagggctggaccggcaaggcgccgctgcccggcggcgacatggatgtctccgcggtcgcagcgctcgccgccgagctggttcgcaaccatccgttcctcgcgcaatcccatgccaaccgtctcgcgcatgcctacggcacgcgcgccgcaaaggtgctcggcgatgcagcatcggctgaagatctcggccgcgccttcggcgccaccttgacggaaagtgaagtccggtacctgatggcgaacgaatgggctcggactgcggaagatgtcgtctggcgacgatccaagctgggcttgcggatgacggcgggtgaaatcgccgcgctcgacgagtggatggccgccaaccgcgtgtccggtgaacgtcccctccgcgaagcgggaggacgggcatgagcgttacactgcagaacgtcacgcgaaccgtggatggcgttccgaccatccgcgatgtttcgctgacgctggagcgtggcacgctcagcgtgctgctcgggccgacgctgtcgggcaagacctcgatcatgcggctgcttgccgggctcgacaagccggccaccggccgtgtgctggtcgacggcaaggacgtcaccggcgccgacgtgcggcagcgctcggtggcgatggtctatcagcagttcatcaattatccctcgctgacggtctacgagaacatcgcttcgcccttgcgggtgcagggcaagccgaaggccgagatcgagaagcgggtggcggaggcggccgcgttgttgcggctcgagcctttcctcaagcgtaccccactgcagctctccggcggccagcagcagcgcaccgcgatcgcgcgcgcgctggtcaagggcgccgacctcgtgctgctcgacgagccgctcgccaacctcgactacaagctgcgcgaggagctgcgtgccgaactgccgcgcatcttcgaggcctccggcgccatcttcgtctacgccaccaccgagccgtcggaagcgctgctgctcggcggcgacacggtgtgcatgtgggaaggccaggcgctgcagaccggcgcaacgccgaaggtctaccgtcatcccgacacgttgcgcgtcgcgcaggtgttctcggatccgccgctcaacatcatcggcatcgagaagaagggtgaccgggtgacctatgccggcggcgaacaggcggccgcggccggcctctatgccaacctcccggacggcgcctaccggatcggcttccgcgcgcaccaactcgacgtcggcaacgtcgcggccgggcgccacaagttctccgccacggtgacggtgaccgagatcaccggctcggaaagcttcgtgcacgtccatgtccacgactccaactgggtcgcggtgctgcacggcgtgcacgaatacgaacccgggcaggtgctcgacgccgcgctcgatcccgacaacatcttcgtattcgacgcggccgatcgcctcgtcgcttcacccgcaacaagtttctcgaagtgagggagatgcttgatggcccgcattgacctcgtcgatctcgcccagtcctacaacggcaatgacgcgccgctggaatcctttgcgctgaagccggtcaccatgacctggcggcagggcggagcctatgcgctgctcgggccgtccggctgcggcaagaccacgctgctcaatctgatttccggcatcgtgacgccgtcgcgcggacagattctgttcgacggccgtgacatcacgccgctgtccacgcagaagcgcaacatcgcgcaggtgttccagttcccggtgatctacgacaccatgacggtgggtgagaacctggcgttcccgctgaagaaccgcggcgtcgccagggccgaagtcgatgcgcgggtcaggcagatcgccgacctgctcgacctcacgccttacctgaaccgcaaggcgacgcgcctcaccgccgacgccaagcagaagatctcgctcggccgcggcctggtgcgttccgacgtcgcggccgtgctgttcgatgagccgctcaccgtcatcgatcccgagctgaagtggcaattgcgctccaagctgaaggcgttgcatcgcgagctcgacctcacgatgatctacgtcacccacgaccagaccgaggcgctgacattcgccgacaccgtcgttgtcatgcatgacggccgcgtggtgcagagcggcacgccggccgaattgttcgacaagccggcgcataccttcgtcggctatttcatcggctcgcccggcatgaacatcgtgcccgccgaggtcagtggccacgaggcgcggatcgacggccatgtcatcggcctgcatcgaaattatggtgtgctgccggccggcaagaagatcgagatcggcgtgcggcccgaattcgtggacgtcgctccgccggcgtccgggctgctctcggccacgatcgagcggatcgacgatctcggccggatccagttcgcccgcgtgcgcgtcggcaacaccaagcttgcggcgcgcgtgccgccgggcttctcggtctccggcgacaccgccggtctcgttttcaatcccgcctatgtccacgtctatgccgacagccatttggtggaaggggtcgcctgatggacaagacgatcaaccaaaaagcctggttcctggtgctgccggtgttcctggtggtggcgttctcggcagtgctgccgctgatgacggtcgtgaactattcgatgcaggacaccttcggtaacaaccagttcttctggaacggcgtcggctggttcaaggagctgctcgatccctcgaccgatctcggcggtcgcttcctggcctcgctcggccgcaatttgttcttctccgccgtgatcctcgcgatcgaggtgccgctcggcatcgtcgtcgcgctgtcgatgccgcgcgagggctggagcgtcgcggcctgcctcgtcatcctcgcgctgccgctgctgattccgtggaacgtagtcgggacgatctggcagatcttcggccggcccgatatcggcctgctcggctatgtgctgaatcacctcggcttcaactacaactacgtcgccaacgatatcgatgcctgggtcaccgtcatcgtgatggacgtctggcactggaccagcctcgtcgcgctgctgtgctacgccggcctgaagtcgatccccgacgcctattaccaggcggcgcagatcgacggcgcctcgcgctgggcggtattcaaggcgatccagctgccgaagatgaaccgcgtgctgctgatcgcggtgctgctgcgcttcatggacagcttcatgatctacaccgagccgttcgtggtcaccggcggcggtcccggcaactcgacgaccttcgtctcgatcgagctcgtcaagatcgcgctcggccagttcgacctcggcaaggctgcggcgctgtcgctggtctacaatctgatcatcctgatcgtttgctgggtgttctacaccgtgatgaccaatgccggcaccgagcggccggtcaaggaaggagcggcgtgatgcactcgatccccggccgccgcctgatcatggcgctgttcctgatcttcctgctgttgccgatctattggctcgtcaacatgagcttcaagaccaacgccgagatcgtctcgacgatgacgctgtggccgcacacgccgacgctgcagcactaccggcgcatcttcaccgacgagagctggtattccggctacatcaattcgctggaatatgtcgtcatcaacaccgtgatctcgatcgcggtggcgctgccggcggcctatgcgttctcgcgctaccgcttcctcggcgacaagcatttgttcttctggctgctgtcgaaccgcatggcgccggcggcggtctatgcgctgccgttcttcaacctctattcggcgatcggcctgttcgatacgccttgggcggtcgcgctcgcgcactgcatcttcaacgtgccgctcgcggtatggatcctcgaaggcttcgtttccggcgtgccgcgcgagatcgacgagaccgcgttcctcgacggctattcgttcccgcgcttcttcatcaagatcctggtgccgctgatcgcgagcgggatcggcgtcgccgcgttcttctgcttcatgttctcctgggtcgagttgctgttggcgcgcacgctgacctcggtgcaggccaagccgatcgcggcgatcatgacgcgcacggtgtcggccgccggcatggactggggcctgcttgccgcggccggtgtgctcaccatcatccccggcgcgctcgtgatctggttcgtccgcaactacatcgcgcgcggtttcgcgctcggccgggtctagcgtcatgatgaagcaatcaggcaccatctcgcgcttcacctctcccaaggggagaggtcggatttggcgcgaagcggcaaatccgggtgaggggtttgtctcgatcgatggaccgtaccccctcaccccagccctctccccatgggagagggggcgcaccgtatcgcgtgggaggacttgagctatggaatccatcgcatggatggcctggacgctgccgaccgcggtcttcttcgtgctgctggcctcgacgctcggcgtcatgacctggctcgcggctgcctatcccgaagcggagcgggtcggcgtgctgcggattccgaccacgcgcggcgatcgcctgttcgtctcgctggtgctggcggcggtgatccacttgctgtggatcgccctcgtcggcaccgatccgattttcaccttgccgatcggcgagggcgtcgagatttcgagcctgtggctcggaacggtaatttcgcttctttcagccgtggtgatctttcgcaccgtctgaagaacgcgaaaaagagcagatccggggtctacccgggcctggatttagtcgctgcaaccggaggaatcacatgcgacatttaccaatgactaaagatagacttttgacgatgaccagcgcgatcgcgctcgtcgcagcatcggtcacgcttgccgcgccggcccgcgccgacgaggccgccgccaagaagtggatcgacagcgaattccagccgtcgaccctctccaaggacgaccagatgaaggagatgcagtggttcatcaaagccgctgcccccttcaagggcatggagatcaacatcgtctccgaaacgctgaccgtgcacgaatacgaatcccgcacgctcgccaaggcgttcgaggagatcaccggcatcaaggtcaagcacgacatcatccaggaaggtgacgtcgtcgagaagatccagacccagatgcagtccggcaagaacgtctatgacggctggatcaacgactccgacttcatcggcacccacttccgttacggccaggcggtcgacctgacggaatggatgaagggtgaggcgaaggacgtcaccgatccgatgctcgacatcgacgacttcatcggcaagtcgttcaccacggcaccgaacggtcacctctatcagctgcccgaccagcagttcgcgaacctctattggttccgctatgactggttcaccaacccggaatacaaggccaagttcaaggccaagtatggctacgatctcggcgtgcccgtgaactggtcggcctatgaagatatcgccgagttcttcaccaacgacgtcaaggagatcaacggcgtcaaggtctacggccatatggactatggcaagaaggatccctcgctcggctggcgtttcaccgacgcctggctgtcgatggccggcaacggcgacaagggtctcccgaacggcctgccggtcgacgaatggggcatccgcatggaaggctgccgtccggtcggctcgtcggtcgagcgtggcggcgatgtcaacggcccggcgtcggtctattcgatcgtcaagtacctcgactggatgaagaagtatgctccgccgcaggcacagggcatgaccttctccgagtcgggcccggtgccttcgcagggcaacatcgcccagcagatcttctggtacaccgccttcaccgccgacatggtgaagccgggcattgccgtgatgaacgcggacggtacgccgaagtggcgtatggccccgtcgccgcacggctcgtactggaaggacggcatgaagctcggctaccaggacgtgggttcgctcacgctcttgaagtcgaccccggtcgatcgccgcaaggcggcctggctctatcagcagttcatcgtctccaagacgacaagcctgaagaagagccatgtcggtctcaccttcatccgtgaatccgacatctgggacaagtcgttcaccgagcgtgcgccgaagctcggcggcctgatcgagttctaccgctcgcccgcgcgcgtgcagtggaccccgaccggcaacaacgtgcctgactatccgaagctcgctcagctgtggtggcagaacatcggcgatgcgtcgtccggtgcgaagacgccgcaagccgcgatggacgcgctggccgcggcccaggattcggtgatggaacgtcttgagaagtccggtgtgcagggcgcctgcggaccgaagctgaacaagaaggaaaccgccgagtactggtacaagaaggccgagaaggacggcaccatcgctccgcagcgcaagctcgcgaacgagaagccgaagggcgaaacgatcgactacgacaccctgatcaagtcgtggccggcgagcccgcccaagcgcgccgaagcgaagtaaggcgatagggcgtaccagcccacgcgatacgaaacctgcgaaggccgggagcgatcccggcctttttgcatcatcggcgcctctatccggaagagtggagcgcccttcgggattgtgctcaaatgacgcgacgaagctcatcatgcgtctcctcgtcgtcgcatcatgatcccggagtttcaccatgcgcatgattttccgctgcgatccgcggcttgccgagcatctgccgcggccgttcccggcccgtactgcgttgcccgattggctgcgcgcgatgccggcaaaggcacattccgacatccacgaccgcgacatccgcacggtcaagcaatgtccgcccttcgtcgatgcgatggcccacggggtcatgatcccgctgccttgcgatgtcagggtcgagcgcggtgcattcgcctgggactgggacattccggagcctgcgacgcagggccatccgcgcgcgccgctcagcttccatcccgttgcgcagttcgccggcgcaccgttcgccaacgggcaggccgcgctgaagttcaacagcttctggaccatcgagctcgaaccgggctggtcgctgttcgcgacacatccggtcaatcgcgacgacttgccgttccggtcgatctcggggctcgtcgacgccgaccggtttcacgacggcgggatcaatttccccgcggtctggacggagtctgattttgccggtgtgctgccgaaggggacgccggtcgtgcaatgctttgcggtaccgcgcgaggctcccgaactggtgtttgagcccttcgacgacgcgcatcgcgaagcctatgcgaaagtcgtcggcgaggtgttggctgcgcccaatgtctaccgcaagcatttccgcgccatgcgcgggcggttaaccagctagcgcgttccgcagggccctctcatcgagccacaggcgtccgtgcgaggccgaggtcagcgccatcgcgatcgatccgaacaattgcggacgcaggccgtaggcgcgtgcgaaggcctgcatcgcggcgtcgggcttgccgtcctcctgcagcgcgataccgagattgagcgccgcctcggcgtaatccggcttgatctcgagcgccttgcgataggcgttcgcagcgccgtcatggtcgcgcatatcctgccgtgccacgccgagatcgaaccacaccgaggccggtgccgggctcgcggtagcgcacgcaagcaggcttgtggccttggccaattcgccatcctcccaggccagccgcccgagccgcgcgttggcctcctgatgctccgggatgactttcaggatcgcctcccaggcctcgcgcgcctgcgccttgcggccggccagctccagcgtgcgggccttctcgacgaatgcatcgcgctgcggcttcagcgcgatggcgcggtcgagatgcgccagtgccgcgtcgaattcgccaccggtgcgggcgaggcgggcggcgagcaactgcgccgcggcattgtcggggcgccgcgccaggctggcttcgatatggctgcgggccggcgcgatctcgcccttcgcaaacagcacggctgccagcaggtggctcagcatcggctcgccgggttggcgtgcaaggccgcgctcgcagagcacgatcgcctcgccatgccggccggcattgaaggccgtggtggcgcgtcgaacgatatcctcggcgttgtctttgctcatttccgtacgtgaccatcttcaggccggaccatgctatgcggcgtcggaaggcatggccagcgtctatcgcgccgtggattgtccggccgccgcgcgcacctgcatgtgggcatggtgctgtgccagtgtcagttcctggctgatatgcgacagctcggtcgcggcggcttcggcggcctcaccggcgggcccggcgacgcgcgcgaacatctcggcctcataggtgcgcaccgcctcgcgccaatccggcgaacccaccagatgccgtgccaactccaccgcatccagcatcgcagcgttgacgccttcgccgccgaacggcgacatcagatgcgcggcgtcgccgagcaaggtgacaccgggccgattggtccaatgatgcccgactggcaacgcatggatcggccggagcgcgaactgatcgctgctggcacggaacaggtcgagcagggcggcggcccagccggcgaattcgccgagcagcgcctggcgcatgccggatggcgaagtgacgtcgaagcgccgttccgcccattcgagcggcacgcggaagatcgcgtaaccgcgcagatgggcgttgccgttgcgctggacgatcacgctgcggccggcgccctccgcgcccatcttgccgcggccgaccagctgcgacagcgccgggtagcgttgatcgacgtcgtcgatgccgaactcgatgaaggtcagcccgctatattgtggctgatagcgcgacaccagcgggcgcacccgcgacgacgcgccgtcggcgccaatcacgagatcgaacggcccctcgcgcgcgctgtcgaagacgagatcgtaacgtccgtcatggcgtggcgtgacctcgcgcaggccatgaccccagcggacggcgtccggcggcaatgattgcagcaggagatcgcggagcgcggtgcggtcgacctcgggacgatcaccggtcatgtcgtcgtccgcgagcagcagccggccgtcgctgtcgtaaagccggctgccctggtcctcgtaacgggcgacgcgcaggaaggcgtcggtgagcccggcgcgcgccagcgctagctggccgctctcggtgtgcaggtccagcgtgccgccttgcggacgttcggtcgccgatgtctcccgctcgaacactgtcgtcgtgacgccagcgatacgcagcaggcgggcgagcgtcaggcctccggggccggcaccgacgacggcaatgcgaattggcttcgaactcatggacaccacgctcacatcaggatacataggtacctatttactataaatagggacctatgtaaatggtggcatcgtgaccgattgggacctgttcgatcgtcccgcgccgctggtgaacatggcttcgcgcagcttcctgcggctcggcgagcggcgggtgaagccgcacggcttcagcatcggccagttgccggtgctctatctgttgcgcgacggcaaggcgatgtcacagcgcgacctcgcccgcgccgcgaaagtcgagcagccgtcgatggcgcagattctggcgcgcatggagcgcgacggactggttcagcgtacgccgatgccgggcgatggtcgcagccagctggtttcgttgacgaaggccgccagggccaagttgccggccgcgcgcaaggcgctccaccgcaaccagaatcaggcgctggccgggttcagcacggtcgaggcggcaacgctgctcgatctgctgcggcggctcaaccgcaacctcgaccggatggtggcggaggaggtggagagtggtgaggctgtcgatgcgtaggaagtcggatgtgcgggcgcgcaacgaaaaggccgggagcgatcccagcccttttcaatcgcaattgcagcaatctctttcgtcattccggggcctgcgaagcgcgagcccggaatccatcccaacgcgcatgatgcggatcaatggattccgggtctgcacctggcgccgcatcctcaggtgcgcaattgcgcaccggggaaatgacgaggtagaccaagcccgatcttactccgccgcttcggttgccttcagcgtcgggtaatccgtgtagcccttggcgccgccgccgtagaaggtcgccttgtcccattcgttcagcggagcgccggccttgagccgctcgacgagatcaggattggagatgaacggcttgccgaacgcgatcaggtcggcagcgccggcctccagcaccttctccgccagcgcgaagtcgtagccgttgttggcgatgtaggcttgcttgaagcgcttgcgcagcgaggcgtagtcgaacggcgcgttgtcgcgcgggccgccggtcgcgccttcgatgacgtggatataggtcagcttcagcgcattgagatgatcgacgatatagtcgaacaacggctgcggattgctgtcggaaacatcgttggctggggtcaccggcgagatgcggatgccggtgcggtctccgccagcttcgcccaccactgccttggacacttcaagcatcagcttcgcgcggttctcgatcgagccgccataggcgtcggtacgcttgttggtgccatccttggcgaactggtcgagcagatagccgttggcgccgtggatttcgacgccgtcgaagccggcggcaatcgcgtttgcggtggcgcgcttgaaatcgtcgatgatgccggggatctccgacagctccagcgcgcgcggctcggagacatcggcgaaggtgccgttgacgaaggtcttggtcttggcgcggatcgcgctcggcgccaccggtgcgccgccgttcggctgtagcgccacatgcgagatgcggccgacatgccagagctggatgaagatgcggccgccgcgctcatgcacgcgatcggtgaccttgcgccagccctcgacttgctccttggaatagatgccgggcgtgtcctgatagccctggccctgctgcgagacctggctggcttcggtgatcaggaggccggccgacgcgcgctggccgtaatactccaccgcgagcgggcccggcgcgaagttcggcgccggcgcgcggttgcgcgtcagcggcgccattaccaggcggttcgacagggtcagcgcgccaagcttgtagggctcgaggagtttggtcgattggctcatgtgaaatgttccagataatgatggatgacggacagttgtgcattgcggcgacgagcgcaatggcccgtccgcagatcagccacgcacgattccgcccatgtgaccggcatcgaggaacagggtgtgcgcgttcacgtaggaggattcgttcgaaatcaggaacaatgcagtatacgcgacctcccagccggtgccctggcggccgaacggtactgtcacggcgcggtccgaccgccttcggctggcatcgcggcccatcggcgtatccatgaagccaggcgcgatcacattgcagcgaatgcccttgtcctcgccggcccgcgcgatcgcccggcccagcgcgatctgcgctgccttggaggattcataggccggattgcggccgccggcgcgctggcttgccatcgacgaaatcaagatgatcgcaccccccggtgccatcagctccagcgccttctgcgcgaacagcatgtggctgcgcacgttgacggcgtagtcgcggtcccaggcttccgccgtcatcttgggcagcgacaggccggaggagatgccgacattcagcgccagcccgtcgagcccgccgagcttttgcgcgcagcgttcgaccgcgggcgcgatcgccgcgacgtcggagacatcgaccacgtcggtgaaggccttgccgccctctctggtgatctgtgcgactgtgtcgtcagccgcttccttgttgacgtcgaggcaggctacggaagcgccctcgcgcgcaaacagcacgctcatggcacggccgttgccgatcggcggtgcttcatcgaccgttgtgcgttgtccggcaccgaccacgatgatgcgccggcccgcgaggcggcggtggttttccgccagccccagcgcttcggcgtgcagtgatgctgacggatcgatggctctcggcgcgtgggttgtggtcgacatggcgtgctccctgaagtcttgttgttgtcagggagcagtagcacggctgggagcgtgaggctaaaatcccgcggcggggaatatcgcgtcagctgacgccgaggaaatcgcgcttgccgacctcgacgccgttgtggcgcaggatgccgtgcgcggtgacggcgtggaaatagaagttcgggaacgagaatgcgctgaggaattgctggcccttcagggtcatggtgcgctcggcgccgatcgggaaggtgacgtcccttgcgtccgcgccatcgaactgctccggtttgaacgacttcacgtagtcgatcgtcttggccagccgctgcttcagttcactgatgctcttctcggtgtcgggcgtcgacggcacatcgctgtgggtcagccgggcgcagccgcgtgcagcgtggtcgcagactagctgaatctgcttggtcagcggcagcatatcgggatagagccgcgatcccagcagcacctcgggcgcgatcttcttcgtctcgcaatgcgcctcggccttggtcaactcgccggtgaggctgttgagaatctgcaaatatgcggggacgatggcgtcataaaaggacatgggatgctccctggtgctgataaaagtccggatgttaccgaacggcgatgctgcaaatggggccgcagttggaagaatacaactgcggagggctgtaacaggcggtcaaatattctttgttttcccgtcatcccagcgcaatggcgtagccattgtcgctggaggagcgccagcggggccgcgcgaagcgcggccccgctgacaggctccgcgcgtctcgaaggatgcacggcccggccggtggccgattcatcctacgaggctcgcccagcggcgcaattgcgccgcaaggctcgcacctcagcgatgatgggctgagagctagactagcgattccggacgatatgccgacgtctaccgcgcccccggcactgcggcatccgcagccggctgcgtgcggccgccgccacgcatccgcgccagcagctccgcggtcggccaggaatccgccggcaggccgtatttcatctgcatcgccttcaccgcgctgcggctcgcctggccgagcacaccgtcgatcttgccgacgtcgtagccggcgcgcgccagcagcgattgcagctccttgatctcgccgaacggcaactgcgcgaccggcgcgtgcggccgttgcatcggcggcgcgcccgcgatgcggctggcgagatagcccgcagtggtcgaatagatcagcgagttgttccactcggtataggcggcgaagttcggataggccaggaatgccggacccatccggcccatcggcagcagaagcgaggccggcaattcgtcgctcggtagcggcttgccgtcggtcgaggtgacgccgagcgcaacccatttcgagcgcggcagcttgatcgtaaggtcggcctgatcccacgggaaattggcggcctgcggcacgcgcacctcctgcagccacggctcgccgcgccgccacttcaatccattggcgatatagtttgccgtcgagccgatcacgtcggggccgctggcgagcagattgcggtggccgtcgccgtcatagtcgaccgcgtagttgaagtaatgcgtcggcaggaattgcgtctggccgagttcgccggcccacgagccgatcatctcgtcgggcgtcagatcgccgcgctcgatgatcttgagcgccgcgatggtctcgccctggaacatctcggagcgccggcaatcataggccagcgacaccagcgatttcagcgtcggcagattgcccatctggacgccgaaatcgctctccagtccccagaacgcggcgatgacagccggcggcacgccatactccttctcggcgcgggcgaacgcggccgcataggtccggatgtattgctggccctgctgcatgcggtagttcgcggccatgcggccggcgaactgggtgaatatctggccgaacacgcgctggccgcggtcgcggttgacgatgccctggtcgtaaaccagatagggcgcggcctcggcgatcgtgcgctgcgagacgccggcggcgaccgccttctgcttcagttcggtgaggaagcgatcgaagctctgcccattgtggcaggacgcagcgcggggctgcgccacggtggccgggcgcgccctggacgggcccggacccgcggggttggacagcggctgctgcgccgaggcaagggacgagacgagtgaggagagtgccagcgctcccgcgatcgctgcgatcctgatcggggcgcggagtgggcatgctggcatcgatgtcaccggctgaaaaagggggaagtggcccaaactgcatacaccagggcaacaccaggcaacaacggggaggccgctcccgggccatttgggcttcggcagcctggacggtcgccgctatgattgggcgaagtgattcgcgggcaggggtgtcggcggatcgatcacgcccggagggacccatgtggagttttctcgagcgtctgttggattcgtcgacgttttcgccacacggcatctgcctgttgtgggaaccggagctgatctggctccacgtgatttcagacgccatcattgccgcttcgtatttctcgatcccgtttgcgctcgcgatcctcgtctccaagcggcgcgacatccagtttggctggatggcctggccgttcgccgccttcatcctcgcctgcggcctcacgcatgtattctcgatctatacgttgtgggtgccgatctacggcctcgaaggcctggtcaaggcgctgaccgcgatcgcctcgatcgtcaccgcggtactgctgtggccgctgatcccgcggatcctggcgatcccgaccgaggcgcagctgcgcgaggcgcatgtcgcgctcgcggaggaaggacgccagcgccagcgctcggaattccttctcgagcgtttccgcgaggcggaggccaacgagagcacgatccgccaggcacagaagatggaagccgtcggccagctcaccggcggcatcgcgcacgacttcaacaacatcctcaccgtcatcaccggcaccatcgacatcctcgccgaggcggtcacccacaaccgccagctcaccgagatcaccggattgatccgcgacgccgccgagcgcggcgcatcgctgacgcgacacctgctggcgtttgcgcgcaagcagccgctgcagccgagcgacgtcgacgtcaacgcgctgatggtcgacaccatcgagctgctgcgaccgaccatcggcgaccatgtcgatatcgatttccgcccgatgcccgatctgccgcacgcgctggtcgatgccaaccagctcgtcaccgcgatcatcaatctcgcgctgaacgcgcgcgacgcgatgccgaagggcggacggctcacgatcgagacccgcaccgccgagctcaagccgtccgacgtgcacggccatgacgggcttgccgccggcgtctatgtcgtgatcgcgttgatcgacaacggtcagggcatcgcggaagccgatctggcaaaagtgttcgagccgttcttcaccaccaaggacgtcggcaagggcaccggcctgggcttgagcatggtctacggcttcgtcaagcaatccaacggccacatcgtgctcgacagcgagctcggccgcggcaccaaggtcatgctgttcctgccgcgtgcggcggcggtcgcggcggccgcggcgccgcccgagcggcggcagccggagatgcgcggcgcgcaggagatcgtgctggtggtcgaggacgacaagctggtgcgctcctacgtgctgacccagatcgagagcctcggttacaccacgctgtcggcaaagaatggcccggaagcgttggccgtgctcgacagcggcgcgccggtcgacctcctgttcaccgacgtcatcatgcccggtgcgatgaacgggcgcgacctcgccaccgaggccgagaagcggcggcccggcctgcgcgtgctgttcacgtcgggctacactgagaacgccatcgaccaggacggcaagctcgagcagggcatcctgttcctcggaaagccctacagccgggcccagctcgcccgcatgctgcgggtcgcgctgcgcgagaaggaggcgcggcacgcgcaggagccggcagagtaggcgtgagattcgcagcaggcgtgaagcccggctgaagcgaagcgtaatccggcgcaatctgtccgctgtgagatagtcccggattgtgctgcgcgtcattcgggtcacggatcgccgcacatgaccaatcgttaatccgcgccgcgtcgctgcgacgcacgacgtccccttgcggtttcagcggtaaaatccctacctgagcggcgtcggttgtggcagcattccgctgccgcccgggaaccacgatgaactattttcgcaccgcgcttctgcttgccggcctcaccgcgctgttcatgggcgtcggctatctgatcggcggcggcaccggcgccgtgatcgcgctggtcgtcgcggctgcgacaaatctgttcacctactggaattccgatcgcatggtgctgtcgatgtacggcgcccatcaggtcgatgcgcgcagtgcgcccgatctccacaatctggtcgccgagctggcgcagcgcgcgagcctgccgatgccgcgggtgttcgtgatggacgaggcacagcccaatgcgtttgcgaccggccgcaatccggagaacgcggcggttgccgtcacgacggggttgatgcagcaactcagccgcgaggagctcgccggcgtgatcgcgcacgagctcgcgcatatcaagcatcacgacacgctgaccatgacgatcacggcgacgatcgccggcgcgatctcgatgctggcgcagttcggcatgttcttcggcggcaaccgcaacaacaacggccccggcatcataggctcgatcgcgatgatgatcctggcgccgctcggcgccatgctggtgcagatggcgatcagccgcacccgcgaatacgccgctgacaattatggcgcgcgcatcgtcgggcagccgatgtggctggcgtccgcgctcgccaagatcgagaattcggcgcatcacgtgccgaacatggaagcggagcgcaatccggccaccgcgcacatgttcatcatcaacccgctgtcgggccatggcgtcgacaatctgttcgcgacccatccttcgacggccaaccgtatcgccgcgctgcagcagctcgccgccgagctcggcacccagaccgcaccgcgtccggccggcgcgacctatccgccgcgcagcccgtggggcggtgcctcaggccagcgcgggccgtggggttagagcaacataggatcaggttgaacagcggccgcgaaggcggtgcgtccctctcccgcttgcgggggaggcgcagcgagttcgtcgccagagcgattcaactaaaattcatcccgccgttacgcgctcgcggcatccagccgtgagacctggtccttgctcagctcgagcttcgccgccgcgaccagcgttgcgacctgctcgggcttggtggcgctggcgatcggcgcggtgatgccgggcttcgccatcagccaggcgagcgcgaccgcggccggctcggcgcgctgttccgcggcgacctcgtcgagagtggcgaggatgcgcatgccacgcgggttcatgtaccttggaacgctgcgcgcgccgcgcgggctcttggcgaagtcggcctccgagcgatatttgccggtcaggaatcccgcggccagcgagaagaacgtgatcacgccgacgtcgttctccacgcagacgcgttgcagcgcgccttcatagctcgatcgttccgccaggctgtattcgggctgcatgctctcatagcggggcagcccgttcgctttggcaatatccagcgcgctcttgagccgctctgccgaaaagttcgaggcgccgatcgccctgatcttgccggccttgatcagtttgtcataggccgcgagcgtctcctcctgcggcgtggtctcgtcgtccttgtgcgactggtagagatcgatgatgtcggtctgcagccgccgcagcgagtcctcgaccgcgcgggcgatgtaatccggcttcagcccgacattgccgcctcccatgtccatgccgaccttggtggcgagaatgatgcggtcgcggttgccgcgcgtcttcatccacttgccgatgattgtctcggactcgccgccgtgatggcccggcacccagcgcgaatagacgtcggccgtatccaggaacgtcagcccctgatcgagcacggtgtcgagcaggcgaaaggatgaagcctcatccaccgtccagccgaacacgttgcagccgaagcaaagaggagggacggtgaggccggagcggccgagcggacgatgcttcatgagtgttctttcgcttgttcttggtgataggcccaggagactgaggcagttcggccttgtttgcaaggcgctgtgccggttgaacgacctgaggtgaagtcagcagggatcagttggaagacatcgggcgtgcgtcaggtcaacctcgctgcccctcagtccgcgtcatcgaatgatttcgtcgcagcacctgaacgcgatttcatttgtcgtgcacttgatgtagattgtgcggcgagctgccaccggttacgccgaactccggagaatgcgcggcagcgcccatggccatcggcaggccctttcttcttcatttcagtacgaaatcctcttctgcctgggcgacgcccgagtgaacgcctttttcattcccagccaaatggagcaattgccatgcatttctgcttctcaggggaatacacgccgcgtgcgatcaacaacatcatggagaacccggcgaccaatcgatacgaggccgccaagaagctgatcgaggcgggcggaggcaagttgatttcgatgtacagcacgtcggtcgatggtcccggcgtgatggtgatcttcgacgtgccggatccgaccgtcgcgcctgccatcagcggcgtggtggtggcggccggcgccatgcagaacgtgaagctggtccggctgtttaccccggacgagatcaaggtggtgcgtcagcacgcaagcaagctcaaggcagtctactcgccgccgggcagctgacggcgacgaccgaccaaacgcggcgcagatcgatctgatggccgatgtcactctcgcgcggcggcgcttcacggcgccccgcgcggagacgggggccgttgcgcgccgctgatccggggcgcgtcaacggatgggcattagctcaggcggacgtcgcgcgcgcatgctggctcgcatagccccggccggttgtgccgtcgcatgacgtccgcctcctcgctcgccgcgcgtcaccgattcacgacgatgccgtagcgcacgcatcggctgcggtgtatgtacagaaattaccgacgtgcggttggcgcggcgacgtcgggcggaattggggtctgaaggtgcatcactcggttttgatttcaggccgcacggcattggcggcgcgcgcgcaactgcctgcccgcatgatccggctggcctgcagtatcgtgatcggttgtacgctcaccggcttggcgccgcgcgaggccgcggcgcaggtgccattctccctgtttcaaccggcgcgacagatggaggcggcgaagccgctggcccgtgacgtcaccgctccgccgacggtcagccagcggctcgacggcaccgcgttctttgtcgacgatctcgggcacatgctgaccgcgcgtcatgcggtcgcggactgcgcccgcatcgtggtcagcaaggagggccgcgcggtcgcggcgcgcgtggtggcgctggctaccaccgacatcgcgttgatcaaggtcccgcgcacgctgggccttgcggcggtattcccgcgtgcaactgcgtcggtggccaacgatatggtctttgccgaagcctatgatcgcctgaagccgatgcttgcgcatggcggcgcgctcggcaatgcgttcgtcgacagcacccagcacgatcccgcgcatctcgtgctgcgctccaatgtcaccttcggcaccagcggtgcgccggtgctggattcccgtggcctagtggagggtgtggtcagccggcggaccacgatcgatcgtgtgctggcggtcgatgcggcgcacgccaaatcctttctttccgcgcatggcatccgcgtccaggaagacgaccggccgcagatgagcggcaccgcctcgcgggcgcatcgcgccgccagcatctcggcgcgcgtcacatgcctgcaacaatgaccgactagttgctcccggatcgatgcttgcgcgtcgtcctgtcagcctgctgcctgcggtcaacccttgtccagaaccatgctcatcttgcggggcacgcttgtgctctcgttcggcctgctgatcctttccccagcgccgagccgtgcccagaacctcgactttcgcaatcccgaacaggcgccgccgtcctgggcgcaatttgccaagctggtcaaataccggttcgaagagtgggtcgcggccgacgagacggtcgccaatcgcttccgcaactgggtcatcgagaattccggcaaagagaacggaccgccgccaacgctcgtggtccgtgcctggctcaacccggacggcaccgtcgagcgcgtcacctttcccgcgttcaatgacgccggcgcgaccgaggacctgcgtaccatcctgaagcgcggcaatgtcggcgaggcaccaccgcccgaaatgctgcagccgctcaacctgcgcttctcgctcaatctgaagaaaccctgagcggcttcgaccacgcgtccatcctctcgtcattccggggcgtgcgaagcacgagcccggaatccatttacccacaatcccttggggctcgatggattccgggttctcgcttcgcgagccccggaaatgacgggaaggggtgaaacaagttgcgccgacgggcaactcagcaaggcctgtcaatcaatgctgatgtgtgtctcaccgactgcgcgacaaattcggtgtcgttccggcctggtgcgcaattgcgcaggggacccataaccaccaatgctacttgttgtgcgatgttggaatcacgagtctcgcctacaatgtcagtcacggagtatgggtcccggccttcgccggaacgacgcatggggtgaacaccatggccaaacagcaacgcggaccttcgcgccgcactttcgttcgcgctgccatcgcggtacttcccgccgcgctcctgctgcgaaccgcttccgcctccgacaggatgacaaaactgcaggccgaatatcaggacacgccgaacggcatctactcctgtggctcgtgcacgctgttcgtcgcgcccgacggctgtaaggtggtcgagggtgcgatcagcaaggacggctggtgcaaggcctttgccgcagtggattgaaccaccctccctctccaggggaggataagaaggcgagactacaactcccgcgcattcgagaatgcgaacgacgacacccgccgcgtggtctcatccaggatcagggtgcgcgtgatcggcggttcggcgcgctggctgcaattctcgcgttcgcagagccggcagttgacgccgatcggggtgccctcgatcttttccagatccatgccggtcgcatagacgagctttgccgcatgacggatttcgcagccgagcccgatcgcaaagcgcggctgcggctgcggatacggcgccaccggccgtcgcaccgtctgcgcgatcgagaagtagcgcgtgccgtcgggcagttcgatcacctggctgagcaggcggtccggcatgtcgaaggtcgagtgcacgttccacagcgggcaggtgccgccgaatttggagaacgggaaggtgcccgaggaaaaccgcttcgacacgttgccggcattgtcgacgcgcagcaggaagaacggcacgccgcgcgcgttcggccgttgcagcgtggtgaggcggtggcagacctgttcgaagccggcgttgaagcgctgcgccagtacgtggacatcgtagctcagggcttcggctgcggaatgaaatgcctgatagggcatcatcgcggcggcagcgaaatagttggcgagcgtgatgcgatagagcctgcgcgcggtgtcgtcgagcgcgccggcgcggctgacgatcgcatcgatcgcagcgccacattcgacgaagccgatctgcagcgcgagctggaaattgcggccggaactgtcgaccagttcggagatcaggagttgccggcggtggcgatcgaagcggcgcagcgtctcgcgcatcacatcgaccggcatcacgcggcagacgatcgaatgcttttcgcgcaggcgcgcagcgagggccgtgaacaggccttcggtcggcacgttgagctcgtcgcgcagattctccgccgtggtctcgagctccggaaaatagttgcggttggcctcgatcaggtcgcgcacccgctcgatcgggttggcgtcgaactgcgagccctcgcggtcggccatctgcgccgccaccagcgtctcgccgcggcgtgcctcggtataggcggcgtagagccgttgcaaggcgtgggtcacgcccgggcagagctcggcgaggtcgcgcagctcctgcttcggcaggtcgatctggcggaacaacggatcggagaagatctcgttgagttccgcgaagaagcggtcctcgtcagcggtggcgaggtcgcgcagatcgagatcataggtctcggcgagacgaagcaggatctgcgccgtcaccggccgctggttgcgctcgatcaggttgatgtaggagggcgagatgccgagaccctcggcgatctgggtctgcgacagccctaattgctggcggatccgccggaaccgaggcccgacgaacagcttctttccggactcgccgggcatggcagtcttcctgacctaattttgtgacagattttacaaatcaacatttattacaagttcatatgttacatgacatcaccaatagaaaacaaggcatctatacgaacttcgccttttcgcgtttatctcctgacacgcgcttcgcgatgctctgtcaagaatgtcggtacgacgggcaggtcgcggggatcagacttcaggcggctgggcaaggcagcaggattttttagaggagactgacgatgagcaaaggcagcaatttctgggtgatcggcggcgagttcgggtcgatgaacttccacaagctcgtcgaaggctccgcccaggtccgtggtccgttcaagacccgcaaggaagccgaggagtgctggaaggaagtctcggaagagagccgccacaaggccggcgttcgcttctcgatcgtcgaggagccgtcgcgggtttcggcttaagcgccagaattatcagagctaagaaaacgtccaaggacggcggccccatccggtttatccgggtggggtcgaccgcttttgggacaccgcctgggttttttcgatctggggataagtgacggcctaagtgcttgggaaccaacgtcctttgcggacgtcatggttgctgataggttaacggtaagcaaacccgtcacgacgagaccgcaaggcatgtccgatccgcagaacaccggcagcgaggcgcgcgaaatgcggccgacgttgcgagaagcgctgcggcgggcgcggatcgaggcggccgatcgcaccggcgtcgtcgtcgagttgcgcgatgccgaggtggcgcggctggagatcctcaacgacgcgctcgatccgctgttcgcgcaggtgcccgagaaggtcgatctgttcgaccgcggcatcagccagggcgagacgccgcggctgtggatcgacgtcgtcgcccatgtgctgatgggccgcgacaagcgcatctaccgcttcgtgcaggacacgcggttcggccgcattgtgctcgccgaatcgcacgacgtggcggtgatcgtcgatgccgtcaccgattatgtagcgcggcgcatgatcgagcgcgagcacgcgatggtggcaacgccgctaccggttgccgaatcgccggcaccgccacctgtatcggtggtggcgccgaagcgccgcggcgggatcggcatgttcgtgctcggcttcatcctgggcgcgctggcattgttcggtctcgcgctgcttgcgagcgtgcagaatctctaaagcatgatccggaatggtgtgaaacggtcttccctcgcgacaaacgcggaacgcgtttgcgcggagatcatgcgcaattgacgcaaggggcgggggcatcgtggtcataacacccgcctcggtattcttcggcatcctggcggcggccgcggtggtcggcagcgccgtgctgttcggcaaatggcagacgctgcggcgcgccgaatatatccgcaccttcaaatggccggcggggctattggcccggctcgagaagcatcaccccggattcacccgcaaggacagcgcgctggtctcgcgcggcctgcggcagttcttcctcgcctatctgatgagcggcaggcgctacgtctcgatgccatcgcaggccgccgacgacctctggcacgaattcatcctctacacccgcgaatacgacgcgttctgccgccgcgctttcggcggcttcctgcatcacaggccggccgtcgtgctggtgaaggagcagcgccgcagcaatgaggggctgcggcgggtctggtggtactgctgcaaatacgagaacatcgatccggtcaggccgacacggctgcctttgctgttcgcgctcgatgccaagctcaacatcgcgaacggcttcatctatcacaccgactgcgaggcgctgcgccgcagcggcattgccggcagcagtccctattgcggcggcgattttgccgactcctcgatcgacggatcgtcagcgggttttggcgatgccggcagcgacggaagccatggcggcgacgggggcagccatggcggcggtgacggaggtggcggcgacgggggtggtggcggcgacagcgggggcggctgtggtggcggttgcggcggcggcggaggagactaaagcgcgatgatatttggttgaatcgtcatcgcgctttagctctttgtttgagcatgatcttttcggaaaaccgcttcgcacttttccggaccatgctttaggagagccgcacctgcttgagctcgcggatgccgtcgtgatcgccgaggccgcgcacgatctgctcgcagcgccaggcattgccgtcacgttcgatcgagaacagattgtaggccgccgccggatagtgcttgcgcgccagcgccgatgccgacggcacgccgatcgccgggatcttccgctcggggccgtcgaaccacatcgtggaatggatgtggtcgtggccgtgcagcaccagctcgacgccgtgccgcttgagcagcgcgagcaactgatgcgaatcggtcagccgcttggcgcgcccgtcggagtgcagcgggtgatgcaccaaaaggacgcggaaggcatcctcccgcgacagctgcccgaggatcgtatccagcgcgttgagctgggcatggccgagccagccggtcgccatcagcggcggtgtcggaaccgcagaggagacgccgatcagcgccaccggcccgcgccggcgcacgaacggaaagtggctcgccgcgccatctgcgtcgccgcgcagatagtcgccgaagtgactgacgaagcgatgccgggtggcacgcacataggcgtcgtgattgccggggaccaccgtcacatctgcgggatcgccgacgccctccagccattgccgcgccggattgaactcggcatccagcgccaggttgacgaggtcgcccgtgacggcgacatggtccggctgctgcgcctgcatgtccgataccagcgcgtcgagcacgtcgcggcggtgatatttgtgacggttgcgcgtccagttcaaatagccgaaggcgcgcttgccggcgagatcgcgcagccgcgccgccggcagcggcggcagatgcggatccgacagatgtgcgaggcggaacgccgccatcacgcgattccctccggattgtcggtgaaaactggccggtagccggtcatgtcgtgctatcccgaacgtcctgccctgtattggcaagagctgtgcaggcgcgcaaggatcaaagcacggatcaaacaccatgatgtcgagggttcagtgacgatccttgaggatttacgcaagcgcttcgagccgcagatcaggtgggtgttccatttctactggcggttggcccgcagcatgacgctcggggtccgcgcggtggtgctcgacgccgacaacagggtgttcctggtcaagcacagctacgtccatggctggtatctgcccggcggcggagtcgaggtcggcgaaagttttatcgagtcgctgcggcgcgaattggaggaggagggccggatcgagcttacgagcgagccggttctgcacggcatcttccacaacagccacgtctcgccgcgcgatcatgtcgcggtctacgtcgtcaggaactaccggcaggaccggctgccggagccgaatcgcgagatcgtggcctgcggcttcttcgatccggccgcgctgccggaggagaccactcccggcacgcggctgcggatatcagaggtgctcgagggcaggccgccgccggcgacatggcggtgatggaccgcgcccccgccagatgctatcccgcgccccacaatgaccgaactctctctgaccatcctgcccgagaccccgaaagacgcccaggcgatcgagcgcctgcacgagcgcaccttcgggcccggccgcttcgcgctcagcgcctaccggctgcgcgagcatgtcgatcatctgctcgatgtctccttcaccgcgcggatcggcaccttgctggtcggctcggtgcgccagcttcccgtctgcatcggcgagacgccggcgctgatgctcgggccgttgacggtcgagccgccgttccgcagccgcggcgtcggccacgcgctgctcgagcgcgcgatcaatgacgcccgcgccaaggggcaccggctgatcgtgctggtcggtgacgagccgtattatgcgcgggtcggcttcaagccggtggcgaagggacggatgacgatgcccggcccggtcgactacagtcgcctgcttgtcttggaactggtcgacggcgcgttcgagggcgtgtccgggccgatccagccggactggagcaaggcgatctgacataagcgcgagccatcgcgggaacggttgcgccctccgacaatctgacgcacagttgaggcaagcgccgggacaagaccggcgcatgccatatcaacagggagagtgcgcgccatgatcaaggtcagtgtgatgtatccgaacaatccaggcgcacgctttgatcacgactattatcgcgacaagcacatgcccctggtgaaggcgcggctgggcgacgcctgcaaatactacaccgtcgacaagggcctcgccggcggcgccccggggactcccgcaacctatgtcggcatgtgccacatcttctgcgactcggttgaagccttcggggccgccatgggcaagcacgcccaggagatcatgggtgacatcccgaactatactgatctgcagccggtgattcagatcagcgaagtcgtcgtcgggcattgaacggcgcggatgttagattgtgatccccctgccgcaagcggcagagggatccgttgtgtcagaacttcagattggcgaacgcccgcacgccgaggcccggcatcagcacctcatccttggtgtaggacactgagttgcggatgttctggttgagcagattgttgccgaccagaccaagcgtcatctcgcgcgcgccgatccatgactgattgagcttggtgttgtaggtgatctccgcgttcagcagattgtagcccgcggtcggggtctcgccgatcactgcgatgtcgttctgcgcgaacgcgtgcaccagattgacgcgcgtgaaccagttgctgtcgcgccagtagacgccgccgccgagccgcaccggcggaatccgcggcacgttgctgccgtcggtgaaggtggcgcgcaccacgtcgaactggttctcgatgccccagatgccgccattgaacgcgccgatatcgagctggctctggaattcggcgccgcggaaggttgcatcgcgctgcgaatacaccgcctgacgtccttcgttaccgggatcgccattgccgcaggaatcgaaatcgccgccgcacatcaccccggtcagacggcgatagatgaaattgctgaagcgcgtgtagtaggcggtggcctcgaaccggaacggcccggtcgccttgcgcaagccgatctcgaccgatttcgcggtctcgatcgtcaggttcggattgccgatatcgaaggtcgcggtcgcatcatgtgcgccgcgcgagaacagctccgcgggcttcggcgcgcgctcgacatattgcgccgtgatgctgccgacgaggtcgccgggcaggttctggatcaacccgacgctgccgctgaccggcgtgtaggacggattgcgcgacaccgagctctgcggcgcgccgtcgggcaggaagtccgccgggaaatccggcgtcgatccgtgcagctcgacatgctcgatgcggcctgcgatttgcgccttggtctggtccgtgaacttgaactcgttgaagacgtaacccgcgacgcggttgttgttgttcgggctccacaggccgttgaacagcgcgcccggatcgtccgggctcggcgcggtcaactcctgatgcccgccctgcaggccgaacgcggtcgtcacggtggcgaagcgcgcatcgaacggcatcatctgcacctcgacgcgggcctcctgctccttgctggtgaaggtctggcgcacgccgtcgctggacaggttggttgggtcggcaaggccgagctcgttgtggcgatagtcggtcgcgccgacccagaaccgcacggcgtcgatcgccgcagcatcgggccgatactcacccttgaccgcgatcttggtctggtgcgcatcgatccgggtcttgtggtcggagccgtcaatgccggggatgtgatagagcgagtcgttctgggtgatcgacgcgccgatatagccgccctggaagaaatacgacgcgccgaccgaagcgccgtccgactgcgtcgcggagttcggctggcggccgttcacagggcgggtttggtcgaacagatatggatagctcggaatgccgtagtcgcttgtggtgcggccatagacgtcggcatgcacggcgacattgttgccgccggcgtccagcagcatgccgccttcgacgccgcgattgaccgaactgaccgacgtgcgggtctcgacattgaggcaacccgggccgccggcgtcggccagcggcgccttcaccggcagcccatagctctggaacggtgccgccgcgcaggtcggcatcgcgtcgggaatgcggttattggacgcgctcaccacgccgccgatcgcggtcgagccgtagcgcagggcggcaggcccgcgcaccacttcgacctgattggtcgagaacggatcgattggcacgaaatgatcttcgccgagatcggagacgccgccgccgccgagaccattctcgacgatgccgacgcgattgacatcgaggccgcggatgatgggacggctcgatgcgccgggcgcgaagctcgagccggtgatgccgggtttggaaaacaggagatcgccaagcgtggcgccgccggagcgtcgcagttcctcgctcggcaccacggtgacggtcgcgaactggtcggtgaccacgggcaacacaccctgctgcggcgccggcgccgtgggtaccggttgcgcggccgcaacgcgttcgctgttgcggctcggtgcagcccggacagcgcgggtcggcgtgcgcgtcggcacagtccgatgccgctggatcgggcttggcgccgttacggtaacgtcagggagttgcgtcggtgtgtcgtcggccagcgcgccgacatgcattgctccaagcaatagccagctcgcgcctccgatgtggagggctcgtttcttctgaaatgtcattgtcctgatccaggtcccgtcgaactgacggatcgatcccgatttgccctgcgggaagccgcaactgtgacgcggccgtccgctcagggcgtgcagcaatcagtcgatgtcaggacagaggaggtgcgcgggagcggaaggccgcgggcgccgacttcagatggaggaattcggcattggtggtgcggaacagtagctcgacggcttccggcagcaacagcaccggcggggccgtgaacagcatgctgcccgcgagcgagacgacggcgcagatcgcgcaattgtcggctggatgccggtcgcggtcctgttcgctgggcggctgcgtcccggtgacctggaccgcgaggtccggcgtagccgaggtcccgatataggcgagatcggctagcgtgagaccgttttggatcgcgggtgcggcttgcgcggtcgcgatcggatggaagtgcccgaacgacagcacaaactggacggcgagcgcgaacagcgccagccgcgagccagtcttgatgtgtctccggaaccagtccatgccgattgagccccacccgtcaggacagcgctcattccccggctgcctgatgttatattataacatcggagggcgaccgcgatgtcaacggtggttcagacccaccatgtcgatccgttgctggtgtgtgattgcagcaacgcagcgtgttgggacgctaagcgccgggtctcagcgtccttcgcgcagccaggttgccgcgaacgcgccgagcagcagcagcaggccgaccaggccggcgaacatcggcagcacgccgacgcccttgaccacgctggcgtcgcgcatcttgacgccgagccagccgtcgccgcggaagatcgaggatgcgcgcaccggcacgatgcgcggcatgtcgaggctcgatccgtcgacgatgcgccgtgcgtcgccgccggtcgcctgcgccagcggcttcagcatgtcggtggtcgaggtgacttccgagaattccttcgggttggtcgggccgacattgatcagcgccttcagcgtgccgtcggtggcctgccacaggccgagctcgctcgcgggcaaggtcgtgcgccactcgccgggatcgccggccgtcaaggtcaattcgcgcgtggcgccgcccggcgacgtcacggtgaccggcgctacggtgtcggccatggtctgccgcaccaccatcaggtccttgccctgcacctgcatccgcagcgcctcttcgtcgaggtcgggctgcttcatcagccagtgcgacacccgccgcagcagatcgagatgcgggccgccgccttcatagccgcgcgcccacagccagatctggtcggacagcagcaatgcgacgcggccttcgccgaaccgcgacagcagcagcagcggcttgccgtcggcgccggtcatgaccggcgggttgatcgcgttgcgggtgtcgacggtgcggaagaaccggctccaatgcggcggctcggcgttcgagccttccagcccgcgcgtcaccgggtggcgtttcccggcgtcgctcaaatgcgcatagaacggcttctcggtcacgccgaccggttcggccggcagcaccgaatccagtggcgtgcgccagatgctggtggtcgaggcgtaatcgggaccggccgacaccagcaccgcgccgccggagcggacatagcgcgcgatgttgtcgaaataggcgatcggcagtacgccctgacgggcgtagcgatcgaagatgatcagctggaattcgttgatcttctgctggaacagctcacgggtcggaaacgcgatcagcgacagctcgttgatcggcgtgccgtcctgcttctccggcggacgcaggatggtgaagtgcacgagatcgacgcttgggtcggacttcaacaggttgcgccaggtgcgctcacccgcatggggctcaccggaaaccagcagcacgcgcagcttgtcgcgcacgccgtcgatcgcgaccacggcgcggttgttgaccggggtcagctcgttctcgagcggcgaggcctcgatctcgacgatgttggggccggcgtgcttgatgtcgatgtcgacgctcgaggtctggcctgaggtcagcgtgcgctcgttgatcacctcgccgtcgcggcggatcgtgaccttggcccgttcgccggtgacgccctggtcgtcgagccggaacgtgatggtctgggtctggccgacgatgccgaagcgcggtgcggccgtgatcgcgatgcggcggtcgcgctcgtccttgcggccggtgatgagggcgtgcaccggcgcctggaagccgagggcctgggcgttggccggaatatcgtgcacccggccgtcggtgatcatgaacgcgccggcgacgcgctcgaccggaacgtccgacagcgccgacgtcagcgtgccgaacaatttggtaccgtcggtttcaccgtcggcctggccggcctcgacgacgcggacctcgaggcccttgatctgcttcaggctgtcgatcagcgcctgccgcgccttgtcggtctcctggttgcgcgtgccgaaattctggctcgggctcttgtcgatcaccacggccgcgaccgaggagagcggctcacggtcctcgcgggtgaaggacgggttggccagcgccagcaggatcagcgccagcgcggcgacacgcaccgcggcgccgcgggcgcgcgacaacagcagcagtgccgcgatgacgacgatcgcgccgagcgcgatccacagcacgagcgagggaaccagcggtgtgaacgcgataccgtagttcatattattgtcccagccgctcgatcagggcgggtgcatgcacctggtcggccttgtagttacccgtcagcgtgtacatcacgatgttgacgccggcgcggaaggcgaattcgcgctggcgcggctcgcccggcgtcaacggcagcatcggctggccgtcgggacggatcgcccaggcgccggcgagatcgttggaggtgatgatgatcggtgagacgccgtcgccgccgcgcgccggccgctgcgcggcttcttcgtcgtcttcgcgcggcagcgcctcgacccaggtctgtccggtgttgaagcggccggggaagtcgcgcagcagatagaacgtcttggtcagcacgtgctcgcgcggcaccggctcgagctcgggcacgtcgagggtcgacagcaattcgcgcagcgtctgcatgcctggcgtctgcgactcgccgttgtcgcccggcggcgcctcgacggcatcgcgggtgtcgaagatcacagtgccgccctgcttcatgtaggcgtcgatcttgttgatggcatcctgcggcggcttcggcgcgcccggcacgatcggccagtagatcagcgggaagaacgccagctcgtcgcgcgcgggatcgatgccgacgggatcgccggcttccagcgcggtgcgctggccgaggaacagcgtcagtccggacatcccggccttgacgatggaatcgacgtcggcgttgccggtcacgacataggcgagccgcgtctgcgaaacggccttgatcgcaaagtcgtcgctgctgctgttctgcgcgcgcgtctgcgatggcaccatcatcgtcgcaaggacgaaggcgagcgcaagcaccgccggcgcggcgcgcctccggatcagtgcggcgaggccgccgccgagcatcgccaccacgatggcatcgagcaggaacagtgccagcgcggtcgacagcatgatgccgcgcaggtctcgcggctcggcgttggtatacgtcgcatgcttggcgcgcaggccggaggtgtcgagcggcgcgatgcggtcggcagaggccagcgtgttgaccgcgatcgggctctcgacggtgccgtagaagccgggcggatggtccgcggtgccgcggtcgcgatagtccgccgacatcggcttggcggtcgagggtggcgggccgaaggcgccgaaaccatcgagcgtgcgcagcggcgcaaccgtttcggcattgggatcgctggcaacgcccggtccgggcttcgaggtgtagccggacatatcgatcagccggcgcagcatctcgacgaaggtgccggacatcggcaggtccgaccagcgcatatcggcgccgacatggaacaggctgaccacgcccttgccgcgatgctcgccggtgacgagcggcgtgccgtcctccagcgaggcccagctcttggttgcgagcacggcgtcgggctcggccagcacctggcggttgacggtgatatccttcggcacaatgagacccgcgaacggaccatcggcggcgaacgaggccatgtgttgcggcttctcccaggtcaggctgccgccgagcgtgcgtccgccgcggcgcagcttgacgggaacgaggtcgtcatcggcctgcgcgagccggggcccggcgaaacgcaccagcacgccgccttgctcgatccaggcgttgagccggtcgcggatttccggcgacagcgtgccgacatcggccatcacgatcatcggcagccgctgatcgaggaactgcccgatcacctgctgcggcgcgccgcgatcgccgagcctgacgtcggcgaatggcgacagcgcgcgggagagatagaaggtcgacgccagcagcggctgcgcggtgtcgctgctcgcgcccgacacgacgccgatggcgcggcggcgccagcgccggtcgagcagctgcacggcgccggccgagtgctcgccggcgatttcgagccgcgcgatgtcgttgcgcaactcgaccggaagatcgaaggcggcttcggtctcgcgctcctgcgggccgaatgcgtagcgggcctcgccgatcggcgaacccttggcgtcgaccgcgcgcaccgtccccgcagcaatgccgctctcggtgcgcagcaccttcaccgtcatcttggcggcggcgttctcggctgcgaccagtgcctgcgcagattgtgcgccgccggcgtagatcgtcagactgcggttctcgatcaccttgccgagaccttcggtgaactcgctgccgcggccggtgtcgacgccgtcggacagccaggcgatgtcgcagtcgccggtggatttgaggaaacgttccagcgtcgccagggtttcaacgcgatcgatcgagtagggcttcggcgcaagctggcgcaacgcgacgcgtgcggcgccggccggcatcagcgtgatgtcgcgcgcaggctcggacagcggcaccagcgcaacgccgcggcggtcgctgtcggcattggtgatgagctcgtcggcagccttgatccgcgcatcccagctcgaggccgcgctccagccgtcgtcgagcaggatcaccagcggctgcttgccggcggcaacgccggtctgcggattccatatcggcccggcggcggcgaggatgaccagtgccgccgcggcgagccgcagcaaggtcagccaccacggcgtgcgcgacggcgtctcttccttcggcgcgatgtcgaacaatagccgcgtgggcgggaattcgacgcggcgcggccgcggcggcatcacgcgcagcagccaccacagcaccggcaggctgaccagccccagcagcagcagcggttcggcgaaggagagggggaggcctgcgatcatgcgctgcgtcccgccttgacggttgagcggccgccgcccttgctcaccatcatgccggcgtgcaggaacagcagcagctcggccgcggagcggctggtggtgtgggtcgagaacagccagtcgagccggccggtctcggcacggatctgctcgcgatgcagcgcgacgcgcgcgacatagtcgctcgcccagctctcggcccggcccgcggtgatgacactgccggcctcgggctcgacgaattcgacacggccggaataggggaaggtctcttcggcgggatcgacgacctggatcagcgtgccgtgcgcgccggaggaggaaagcccggcaagcatcgtcgtgatctcagctatcggcgaccagaaatccgacagcacgacgacttcggccagcgacgacggcacgaaggacggcggcaggctcgcgcgcgtcgtctcgtcgtgcaagatcgcttccgccatcttgtcgatcacgttgaggcttgcggtcggggtcatcaggccgggaatgccgacgcgctctccgccggccacgagcaactcggccagtgcgaaggcgacgatcagtccgcgctccagcttgctgtcgcgcgcatcgcgtgaggcaaacgccatcgagggcgaccggtcagcccagatccacacagtgtgcgcggcctcccattcctgctcgcgcacatagagatggtcgtcgcgtgccgagcggcgccaatcgacgcgctgcgacggctcgccggagacgaagcggcggtattgccagaaattctcgcccgagccggcgcggcggcggccgtgcaggccatggatgacgttggccgcaacacggcgggcctcaagcaccaggcgcggcagcgacgcggcgagcgatcggctttcgccatctgcacgtcggaccgccaggatctcctcgttctggtgcctgttgtcagccgccatcaaccgatccgcgtcttcaattgcttgatcacgtccggaatggtgcggccctcggcgcgcgccgagaaggtcagcgccatgcggtgcttgagcacgggctcggcgagatcgagcacgtcgtcgatcgacggcgcgagcctgccgtcgagcagcgcgcgggcgcgaaccgccagcatcaacgcctggctggcgcggggaccgggtccccacgcgatcagcttgccggcctcgccgccctcggtgccggggcgcgcggcgcgcaccagcgtcaggatcgcttcgacgacggaatcgccgaccggcaggcgccgcaccagtcgttgtgccgtgagcagcgtctccgcatccatcgacggcttggcatgcgcctcttcggcgccggtggtttcgaacaggatgcgccgctcggcgtcgcgatcgggatagtcgacgtcgatttccatcaggaagcggtcgagctgcgcttcgggcagcggataggtgccttcctgctcgagcgggttctgcgtcgcgagtacgtggaacggcttcggcagatcatgccgcgcgccggcaatggtgatgtgctgctcctgcatggcttgcagcagcgccgactgggtgcgcgggctagcgcggttgatctcgtcggccatcaagagctgcgcgaacaccgggccggagatgaagcggaacgaacgcttgccggtggagctctcgtcgagcacctcggcgccgaggatgtccgacggcatcaggtcgggcgtgaactggatgcgcttggcgtcgagcccgagcgtgacgccgagcgtctcgaccagcttggtcttggcgaggccgggcacgccgatcaggagcgcgtggccgccggacaagatcgtcaccagcgtgttctcgatcacctggtcctggccgaaaatgaccgtggataccgcttccttggcggccttgatctggcctgcgacctgctcggccgaacggacgatcacgtcctccagtttctcgacgctatctgcaccagccatccgatccgctccttctcggcgatgcgcgcattgccgcgccggcatctgtcgtcatctcttggtcgtcatcgcttggcccgcatgctaaacctatgcgaaggccatgtattcgttgaattaaactatccccaccttatcggcatttcagggtatgaacggcatcacgatgtggcgagaatgacatcccgaccacatctcaggatacgtgcaccaaatgtgccagattgagggtaggaaactttaaggcaaacaatggcgaagcaagggcagggcgattccggcagtgaaactacgggcatcggaggcaagggcctcgaaggcctcaccactgctgccaaccgagctgcgacatcggggccggccggacgcaagggcctgccgccggttcatctgtggaatccgccgttctgcggcgatctcgacatgcgaatcgcgcctgacggcacctggttctacatgggaacgccgatcgggcgtcccgcgctggtgcggctgttctccacgattctgaaacgcgaggacggcaagcactttctcgtgacgccggtggagaaggtcggcatccgcgtcgacgacgcaccgttcctcgcggtggaaatgcagaccgagcaagacgcgcgcggccggttgctcaggttccggaccaatgtcgatgactgggtcgattgcgagaaaggccacggcctcagattcgaagctgccgaggatggcggattgacgccctatctgcacgtccgcgccgacctgtgggcgaaggtcacccgcgcgctctactacgatctggttgacatgggcgaggagcggatggtcgatggtcaggagatgttcggcatcgagtccggcggcgagtttttcgcgatggccgatgccagtcaggtgaggggcgcactttgaacgagccgttgctgaaggtgaagccggcgacgatcagctcgacggaattcttcgcgcgggcccgcaagcggctcagtttcgaggtgccgccgggcctggtcgatccgcatatcattccgcgcaccggagattccggcaccgaccggatgctcgagatcgtcgcccaggagcagccggtgcggccggccgcggtgctgattccggtggtcgatcatcccgagccgaccgtgctcctgacgcagcgttcgccgaatctgtcgagccacgccggccagatctcgtttcccggcggcaagatcgacgccaccgatgcctcgccgctcgacgccgcgctgcgcgaagcctgcgaagaagtcggcttgaggcgggaattcatcgaccctgtcggctatctcgacctctatggcaccgcattcggcttccgcatcctgccgacggtcgccaaggtgaagccgggatttacgcttgagatcaacgaggccgaagtcgtcgacgcattcgaggtgccgctcgctttcctgatgaaccccgagaatcatcagatccacaccaaggaattccgcggcatggaccgctcctattatgcgatgccgttcgccgagcgttacatctggggcgcgaccgcgggcattctgcgcgtgctatatgagcggatctatctgtcatgatccgcacggtgttgaccgagatcggaatctttctggtcccgttcgcggtctatgccatcttcctgatcgcgacgcggtccggcgtgacgctgccggcgtcctggccgctccacatgatcgcgaagctgactctggtggcattggtgatggtaatcgtgagtttcgtggcgctggccgaattgaccggcgcgccaccgaactcgacttatgttcccgctcacatcgagaatggcaggctggtgcccggagttgagcgatgagcgaagtgcgcttgttgtccgacgcgccatggctcgcttcggggcctgcggcgcgcgtgctcggcctgctcaatgccgacggcgaagaggcgcgggtgatcggcggcgcggtgcgcaacgcgctgatgcggattccgcttgccgacatcgacatcgccaccaccgcgctaccggacgaggtcgttcgccgcgccaagcgggcgggcatcaagagcgtgccgaccggcatcgagcacggcacggttacactggttatcgacggccacccattcgaagtgacgacgctgcgcgaggacaccgagaccttcggccgcaaggccaaggtggcgttcgggcgcgactgggtgcgcgacgccgagcggcgcgacttcaccatcaacggcctgtcggtcgataccgctggcgtcgtgcatgaccacgtcggcggccttgccgatatcgcggcgcggcgggtgcgcttcatcggccatcccgcgcagcggattgccgaggattatttgcgcatcctgcgcttcttccgcttccacgccgcctatggtgtgggcgaggtcgatcgcgccggctatctcgcctgcatcggcgggcgcgccggtttgaccggtctgtcggccgagcgcatccgcatggaggtgctcaagctcgtggtcgcgaacggcgccgccggcgcggtggtcgcgatgggcgatggcggattgctgcagccgctgttcggtggtgtcgcctataccggcccgttcgcggcaatgatcgagatcgagaagttgatggagctcgcgccgagcgccgtgcgccggctcgccgcgctgaccgttgccgtgaccgaggacgcgcgacgcatcgcaagccggttgcggctctccaacgccgaggccaaggcgctggattcgatgggccatcgctggtggcgcctgcccggcatggacgaggcgcatgccaagcgcaggctctacaggctggacgaggggccctatcgtgaccggctgctgctcgcctgggcgcgaaccggtgtgggccgcgatgtcgaccactggcgcgcgctcgccacgttgccgcaacgctggcgcgcgcctcactttccgttgagggcgtcggatttcatcgcgcgcggtattgccgaggggccggcgctcgggcatgtcctgacgctggccgaggatgcctggcttgcggcggactttccgctcgatccgcaggtgctgtccggcatcgccgaccagaccgtctcccgtttcacccgcgatcaccgcctctgaattttcgtaccgccgagttcatcggcggcacggtaacgaacgtcgcatggagacgatgccgcacgggcgaggcggcatcgcgccgacagatctcacgccgccttgcgcttcttcttgcggtcgccgtcgtcatcctcgtcttcgtcgtcctcttcttcctcgtcgttgtcttcgtcctcgtcgtcttcttcctcgtcatcttcaggatcgagttcggtcgattcgagtgcgacgagcggcagagtttcgcgaaacaggtcgccgtccgtgcccatccaaagacactcgaccttgtcctcgtcgacttccacgaccgtgatcggatggccgccggatttcagcatgacgacatcgcctggtttcagttccatgatcttccctccgcgcatgatgacgcggacggcacgctagcggccggtgatgacagtcaaatcacggccggcgccggcttcgatggaattgacgtggaaaacggctatttgtgtctggccggaaccagctcggtcagcgagcggacgatgcggtcgggcttgatggtcgatcccggcggcagcccgacaccgtgcacatccatccagaccgcgtagatgccgagccgctgcggcgccacgacttcccactccagattgtcgccgatcatccaggtatcagacgcggtgacgccgagcgcgtccatcgcgtgcagataggcgcgctcctccggcttgccgaagccgtgctcgccctcgatctggatgtgatcgaagcgatggccgagcgcgaaacgctcgaccttggcgcgctgcatgtcggctgcgccgttggtgaccagcgcgagcttgatgccgagcgccttgaacgcatcgatcgcctcatgcgcgccggggaagacgaacatctcctcttcgcgataggcggtgaagcgatcggcgatgcggtcggcgagatcgtccggcagcgtgcggtggccggctgcggcgagctgggcgaagccgcccttcacggtcagccggcgcgcctcgccgagcttgatccgccagatcggctcggcggtcgaccagaattgccgtgcagaggccaacaaggcggttgcgaccatgtccgggggcaggggcgccagctccgccgcgaattcagcggtgatcgcattccaggcgatctcgggacgtccataggccgacaggatggtgtcgtccatgtcgatcagcatcgcgcgcggcagcttggttacggccatttcacctccggcggcagcgaagacaggatcgaatcgacattgccgccggtcttcaggccgaagatggtgccgcgatcgtagagcaggttgaactcgacatagcgcccccgacgaaccagctgctcgtcgcggtcctccgcggtccagccggccgcgaaattgcgccgcaccaactcgggatagatcttcaggaagctgcgcccgacatcctgggtgaaggcgagatcggccttccagtcgccgctgtcatgccagtcgtagaagatgccgccgacgccgcgggcttccttgcggtgcggcagatagaaatagtcgtcgcaccatttcttatacttgtcgtagtcagcgacgccgttcggtccggtgcatgccgctttcatcgcggcatggaaggcgaccgtgtcgggatcttcctgggtgcgccgccggttgagcaccggcgtcagatccgcgccgccgccgaaccaggccttggtggtgaccacgaaacgggtgttcatgtgcacggcgggcacgttcggattgcgcaagtgcgcgatcagcgaaatgcccgacgcccagaacctcggatcatcggcggcgccgggaatctgggcgcgaaattcgggagcgaactcgccatgcacggtcgaacagtgcacgccgaccttctcgaagagccgccctttcatgatcgacatcacgccgccgccgccgggcttgccggtatggtcggtgcgatcccagggggtgcgcacgaaccggccggcgtcgccgggatagagcgctgcgggggcatcgtcctcgagctgctcgaacgccgtgcagatctcgttgcgcagcgcctcgaaccagccgcgcgcacgcgccttgcggtcttcgatgatggcggggtctgtgggcagcatgactaaccttgcgggccgaagtaagtgcagctttcgttgcagctgtcgcggtggacgctgacgcgggtcagcttgcccgcgtgctgcaaccgctcccagatgaagcgcgagaggttctccagcgtgggtacgccgatcgcctcgatcttgttgaggaacttgtggtcgagcgtcttctgcacctcggccatggcgcgttcgagcaggccgagatcgatcaccattccggttttcgggtccggcgtgccgcgtacggtgacttcggcacgaaacgagtggccgtggatctcctcgctggcggcaccaaaggtcgttccggacagcgcatgcgcagcctcgaaccgaaacgctttcgtcaattcccacatctctctcaacaatccagttctgtcttgtctctagtttggttgcgttttcttgatgcgaaccggttcccacttcgcttgaaaacgctccggttcatctgatcccgagcgtcttgtgcgtctgcacgctgaggcgccattgcgggtgcttcaggcagtaggcgatcgcccgctcggtattctcgatcacgtcgggtccgtccatcggctgcagcgagaagcgctcgaacgaaagccccgcaaagtcctccggcgcgttctccggctgcggatagaccagcttgagttcgtgcccactgcgcaccacgagctcggctgcggccttggggctgacgcagatccagtcgagcccgtcgggcggcgcgatggtgccgttggtctcgatcgcgatcgcaaagccgtggccgtgcagggcctcgatcagggcgctgtcgacctgtagcagcggctcgccgccggtcagcaccacgtagcggtctgcctcgcccccggtccattgcgcggcgatggtgccggcgagctcggcggcgtcggcatagcggccgccgagcgtgccgtcggtgccgacgaaatcggtgtcgcagaaccggcagacggcgccggcgcggtcctgctcgcggccgctccagaggttgcagccggcaaagcggcagaacacggaggcccggcccgcatgggcgccttcgccctgcagggtaagaaagatctccttgaccgcgtagctcaccaaaaatcccttaagttgccgaaccggcagatagcgaacgggtctgccggagcgcctcgccgacggccatggccgccgtgacggccacattgagtgagcgcatggacggcctgatcggaatcaccagccgggcatccgcggcggccaccaccgcgtcggtcacccccgccgtctcgcgcccgaacagcaggacatcggaggccgcatagtcgaaatcaaggtaggatttcgccgccctggtcgtgaacagcaccagccggcatcctgcctcggcccgccattcctcgaatttcgaccatgagtcgtgacgcttcaaccgcacatggtcgagatagtccatacccgcccggcggaaattccggtccgaggtgtcgaatcccgccggttcgatgatatgggctgccacgtccaggcaggcgcaaaggcgcagaatcgtccctgtattctggggaatgtcgggctggaacagcgcgatctgcatggtgcggacgacctgtgaaatccggatgaaattgtctcaataaaacatcgctcggcgcggatttcgtgcattgcacgtgtgcgagccgatagcgggcttgcgctcgtccggcaagggtgccaatagaacgattctggactgctgttccgccatttggggtggggaatggcagttttctgccgccgcgggggccgcgggcgccggcagcctttcttgaggcgcttcccagcgtctccggggcggttccaccggctgcagaaaagaaagggctaggaatcgtgacgacagcgtcttcggcggaccatccgacacgccgtgattttctctttgttgcaaccggagctgccgccgcggtcggcgcagccgccaccgtctggccgctggttgcccagatgaacccggacgccgcgacgatcgcggccggcgcgccgatccaggtcgacctggcgccgatcgccgagggccaggacatcaaggtgttctggcgcggcaagccgatctacatcagccatcgcaccaagaagcagatcgaggaggctcagaaggtgccgctctcgagcctgcccgatccgcagcccgactcggcccgcgtcaaggccggccacgaccagtggctggtggtgatcggcatctgcacccatctcggctgtatcccgatcgcccatgagggcaattacgacggtttcttctgcccctgccacggctcccagtacgactcctccggtcgtatccgccaggggccggcgcccgccaatctggcggtgccgccctacgccttcctttccgacaccaaaatccagatcggctaagtcccggaccctccgggacttcggcttccccttggacccatcgcgtcgtttttcttcttcaggatcgcatcaatgagcggaccatctgatttccaaccgagcaaccccgccttgaagtggatcgaacggcgccttccgatcttcggcctgatccactcttcattcgtggcctatccgacgccgcgcaacctgaactactggtggaccttcggcgccatcctttcgctgatgctgggtctgcagatcctgaccggcgtgatcctggcgatgcactacacgccgcacgccgatctcgccttcaagtcggtcgagctgatcgtccgcgacgtcaattacggctggctgctgcgcaacatgcatgcctgcggcgcgtcgatgttcttcttcgccgtctacatccacatgttccgcggcctttattacgggtcgtacaaggagccgcgcgaggtgctgtggatcctcggcgtcatcatctacctcttgatgatggccaccggcttcatgggctacgtgctgccgtggggccagatgagcttctggggcgccaccgtcatcaccaacctgttctcggccgtgccgtatttcggcgagagcatcgtgacgctgctgtggggcggttattcggtcggtaacccgacgctgaaccgcttcttctcgctgcactatctgctaccgttcgtgatcgccggcgtggtcgtgctgcacgtctgggcactgcacgtcgcgggtcagaacaacccggccggcgtcgaggccaagaccgagaaggacaccgttccgttcacgccctatgcgacgatcaaggacgcgttcggcgtgtcgtgcttcctgatcttcttcgcctggttcatcttctacatgccgaactatctcggcgacgccgacaactacatcccggcgaaccccggcgtgaccccggcgcacatcgtgcctgaatggtactacctgccgttctacgcgatcctgcgctcgatcccgaacaagctcgccggcgtcgtggcgatgttctcggcgatcatcatcctgtgcttcctgccctggctcgacagcgcacggacccggtcgtcgaagtatcgtccgctggccaagcagtttttctggatcttcgtggtggtctgcatcctgctcggctatctcggctcgcaaccgccggaaggcatctatgtgatcgccggccgcatcctgacggtgtgctacttcgcctacttcctgatcgtgctgccgctgctcgcccgcatcgagacgccgcgcccggtgccgaactcgatcgccgacgacgtgctggcgaagagcaagggcagggccgcgaccgcagcctcggtgatgctcgcgatggtggtggccggcggcctgttcgtaggcggcacccagaacgccaaggccgaggagggcggcaatgcgccgccggcgcagagctggtcgttctccggcccgttcggcaagtatgaccgcggctcgctgcagcgtggcctgaaggtctacaaggaagtctgctcggcctgccacggcctgtcctatgtcgcgttccgcaacttggcggatgccggcggccccggctattcggtggcgcaggcggctgcgttcgcgtcggaatacaagatcaaggatggtccgaacgaccagggcgagatgttcgagcgtccgggccgtccggcggactacttcccgtcgccgttcccgaacgagcaggccgcgcgcgcagccaatggcggcgcggcaccgcccgatctctcgctgatcaccaaggcgcggtcctacaagcgcggcttcccgcaattcgtgatcgacttcttcagccagtaccaggagcagggcccggactacgtcgacgccatcctgcagggcttcgaggacaaggccccggctggcgtcacgatccccgagggctcgtactacaacaagtacttccccggccacgccatcaagatgccgaagccgctgtccgacggtcaggtgaccttcgacgacggctcgccggcgacggtcaagcagtacgcgcatgacgtcaccaccttcctgatgtgggccgccgagccgcacatggaagagcgcaagcggatcggcatgcaggtgttcttcttcctggtgatcttcgccatccttatgtacttcaccaagcgcaaggtttgggccgacgcgcactgacctcggcgatcgcgaatttgaaaaagccccttttcgggggcttttttgtttgtgttcgcaatgacggcaaatcgatttgcgtccgtcaccgagtacggacaagatgccggccaatcagccggcaaacatctgcggaggaactcatgggtaccagcatcaccttcaagcgtccggacggcaaggaagcgtcgggctatcttgccaatgccgcacgcggcaacgcgcccggagtggtcgtgatccaggaatggtggggcctccaggaccagatcaagggcatgtgcgaccgcttcgcgcgggcaggtttcgatgcgctggcgcccgatctctacaagggcaaggtggtgccgtatcacgacaccgaagccgccggcaaagagatgaactcgctcgacttcatggacgccaccacccaaacggtgcgcggtgccgcgcagtacctcgccaagaacggcgccaaggtcggcctcaccggcttctgcctcggcggtgcggtgaccatcatcggcgccaccaagatcccggaattgacggccggcgtggtgttctacggcattccgccggagcaggcggccaagccggcggatgttcggattccgctgcagggccattttgccaccaaggacgactggtgcacgccggcgctggtcgatggcttcgagaaggcgatgaaggccgccggcaaatcgctggagctgtaccgctatgacgccgaccacggtttcggcaacgagcagcgcctgtcggtgcacgaccggcagtgcgcggagttggcctgggaccgggcgacggagttcttcaggaagcatctggggtaaaggcgcgcgattatccgcaatctcgctgtcgtcccggcgaaggccgggacccatacgccgcggcagtcgggaccaaagcaaactggtcgacggctttgccaaacaactacgccctgtggttatgggtcccggccttcgccgggacgacgtggggagtttgctatgcgtccttcaccccatcccaccacgggcacgttcccgacatcagcttgaaattgccttccatcacctgcaccggtgcgcgcttgccctcggcggcggcgcgcatccgcatctcgcgcgcgaccgcgcggtcctccggcgacagccagacccgttcgtggccccacaggctcgggccgtcatgcatctcgaacggcgtccagttcgcaggatcgatctcgcggccgccccagccgcactcgaccatgaaggctgacggtgacctggcgtagaacgacgtcatcaaatcgttggtgtgtcggccgagcgtgacgttgacccggtcctcctgctgcgcgatgtcgtaggcttggccgacatcgtcgagcgagaacagctccaccatcagatgatgcatgccgttgctgccggtctcgatcagcgccagcgagtggtggcgggcattgacgtggaagaagtaggcgcggaacggcttttcgatgtagtcgctgaggccgaagccgagcacgtcgacatagaagctcatgacagggacgagattctcgaccgtcagcaccgcgtggccgaggccgagcgcgccggtgcggaagccggagatcgagcggcccggcctgaacggcgcgtcgtcgatctcggcgccgtgaaacgcctcgagccggttgccggcggggtcgctgaacgagatcaggccccgcacccgccggctatcggcgagcgcctgcggctctgatgttacggcgacgccggcgcgctccagccgcgccgccagcgcatcgagatccgtggcatccgccacctcccagccgaagaacctcgtgccttcgccctgcgcgcggtcgatcacgatgcgttgcttgcggtcgtccatccggaacgcgagcagcgcgttgccgcgctcgatcgcctgcagcccgaccaggccggtgccgaattgccgccagtcgtccagcgcatccgagccgaagccggcatatccgagacccaaaatcgccatccgcgcctccgccatctgtctttttttgggcggccgatcagccgccatttcggcaaatcctacgcggattcctggctcttcaaaccccgaatatgccgcccaaacggcgtccaggattggggcaggggtgtgaggccatcccttgacacggcccgcgccgggtggtgtgtagcggccatgagcaccgttgccagtccatcccgtcgttggtggcccaccttctcataggtggccggtgcgttttcattttctcaaaaacgtcgaaggtcgccatcgcagtgcgacggtctccttcgtttgtcctgtgtggcgctctcttcccaagtttcgtaagaggatcacatgaacaggacagtcttctccctgccggccaagagcgaatacctgaccaatggcggccttgcggtcgcccgcgtggtcgagcagttcaccggcggcgccaatcgcctcgatgatctgatcgcgctgctcgaccgccgccgcggcgtggtgctgtcctcgggcaccacggtgccgggccgctacgagagcttcgacctcggctttgccgatccgccgctggtgctggaaacctcgggcaccgatttctcgttgcaggcgctgaacccgcgcggcgaggtgctgatcgcctttctcggcgacgtgctgcgcgagccctgcgtcgtgatctcggagcgcagcgcgacaaggcttgcaggccatatcatccgcggcgaagcgccggtcgaggaagaccagcgcacccgccgcgccagcgtgatgtcgctggtgcgcgacatggtggcggcgttcacctccaatgccgatccgctgctcggcctgttcggcgccttcgcctacgacctcgtgttccagatcgaggacctcgtgcagaagcgcgcccgcgaggccgaccagcgcgatatcgtgctgtacgtgccggaccggctcttggcctatgaccgcgccaccggtcgcggcgtggcgctgaattacgagtttgcgtggaagggcaaatccaccgccggccagtcgcacgagaccgcgccgagcctctatgccaagaccgaccggcagggctttgccgatcacgccgcgggcgaatatcaggcgaccgtcgaagtggcgcgcgcggcgttcgcccgcggcgacctgtttgaggcggtgccggggcagctgttcgccgagccctgcgagcgctcgccggcggaagtgttccagcggctctgccgcatcaatccgtcgccctacggcgcgctgatgaatctcggcgacggcgaattcctggtctccgcctcgcccgagatgttcgtgcgctccgacggccgccgggtcgagacctgcccgatctcgggcaccatcgcgcgtggctcggattcgatcggcgatgccgagcagatccgcaagctgctgaactcggagaaggacgagttcgagctcaacatgtgcaccgacgtcgaccgcaacgacaaggcgcgcgtctgcgtgcccggcaccatcaaggtgctggcgcggcgccagatcgagacctactcaaagctgttccacaccgtcgaccacgtcgagggcatgctgcggccgggcttcgattcgctcgatgcgttcctgacccatgcctgggcggtcaccgtcacgggtgcaccgaagctgtgggcgatgcagttcgtcgaggaccatgagcggtcgccgcggcgctggtacgccggcgcgatcggctgcgtcaatttcgacggcagcatcaacaccggcctcaccatccgcaccatccgtatgaaggatggcctcgccgaggtgcgcgtcggcgccacctgcctgttcgactccgatcccgccgcagaggaccgcgagtgccaggtcaaggccgcggcgctgttccaggccctgcgcggcgatccgccgaagccgctgtccgatttcgcacccgatgccaccggctccggcaagaacgtgctcttgatcgatcatgacgacagtttcgtccacatgctggcggattacttccgccaggtcggcgccaacgtcaccgtggtccggcacatccatgcccaggacatgctcaagaagaagggctgggatcttctggtgctgtcgcccgggccgggccgtccggaggattttggcatcgcgaagaccatcgataccgcgctggaaaagaagctgccgatcttcggcgtctgcctcggcgtgcaggcgatcggcgaatatttcggcggtgagctcggccagctcgcccagcccgcgcatggccgtccctcgcgcgtgcaggtgcgcggcggccggctgatgcataatctgccgaacgagatcgtgatcggccgctaccactcgctctatgtcgagcgtgacagcgtgcccgaggtgctggcggtgaccgcgaccaccgaagacggcgtcgcgatggtgatcgagcacaagaccctgccggtcggcggcgtgcaattccatccggaatcgctgatgtcgctcggcaacgaggtcggcctgcgcattgtcgagaatgcattccggctgaatccgccggccaattgaggattgcgaaaccaatgaccttcgaccacgacatcaaggcgaccgttcgcaccatcccggactacccgaagaagggcatcctgtttcgcgacatcacgacgttgctggcggatgcccgcgccttccgccgcgcggtcgatgagctggtgcatccctgggccggggccaaggtcgacaaggtcgcgggcatcgaggcgcgcggcttcatcctcggcggcgcggtggcgcatcagctctccgccggcttcgtgccgatccgcaagaagggcaagctgccgcacaccacggtgcggatcgcctactcgctggaatacggcatcgacgagatggagatgcacgccgacgcggtgcagcccggcgagcgcgtgatcctggtcgacgatctgatcgcgaccggcggcaccgcggagggcgcggtgaagctgctgcgccagatcggcgccaatgtggtcgccgcctgcttcatcgtcgacctgcccgatctcggcggcgcggcgaagctgcgcgcgatggacgtgccggtgcgcacgctgatggcgttcgaggggcactaaccctccacgtcgtcccggcgaaggccggaacgacaatcatccccgctgcagcagcatgctcaactcgagatcgcggaacgtggtgtaattccgccggatccactgatgcagctcggtcgatgaatccttctcctggcgcagatagccggtgaaggagaaggtcagccggtcgatataggtcttcaggaacaccggcagcgcgcggaagcgcagcacccggctgctggtcatgaccggcggcaactcgccgcgcaccacgaattcattgtcgatgacgatcagcgcgttcggcgggatcaggccttgcagcatctggtagccgcgcaccgaagcgcggtcggtatcggcgacgtacaggatgacgggcgcgacgcggcggcgcagcgcctccttcatcagcccgatctggtcgcacattttgaagaattcgtcgaaggcgtggtagccgaggtcgaccaccttggcgatgccgtcattgacgatgacgcggtccatcagctgcatcttgccgtaggtgtcgatcacgtcggcggtttccgtgatccgcggcaggtagtcgagcagcgacggctccttcaggttgatgtcgtagcagagcacgtcgccgttcttgagcagcaggaattccgcaagcagccgtgcgatcagcgtcttgccgacctgcgggcggggcgagcagatgatgtagacgggcgtggatgacatcgcccgctatatcaggccaaattttcgtctaatccagccccgtcgtcgccccgcgcgccacttttttcgctgctccctggcacgatttttcgccgcccaggccgcggctatttttcgcccttggctgacttggcgccgaccaggtcggtcagcttgatccggtcgtactcgctccacacattggcgagccagtgccggacatagccgcgcagcacgaacgaataattcgcggcgtcgtcgttgatgcccttgttggcgacgaatttcaggaacggaaccgaggacacctcgacctgctcataggccatttcgttgagcttggggatcgtgaggtcggtcgcgtccttgatgcggtggaagtaggaattgtaggtcgcctggtcccactggaagaactgggtgtcgttgatgaagttcttcaccaggaaatatttcgcgccgcccatgaagccggcggtctcggcgatctcgtccagcgaggcgatcgaggggccgaggatgtggaacacggcgaaggtgatctgaccggagcgcgccgcatcgaggaagccgatgtcgcgcagcgaggccagcgcgggcgacaacaggccagcgcggacgtcgatcacggtgaccgcggggcccgagttcagcgtatcgaagatcttcatctggtccgcggtcgtcgtcatgtcgacgatctcggtgatgtcgggatggaagcgcttcagcgtgccgcgcggcgactcggtgtcgaacgcccgggtctgcacattgttggcactgaaatagtccaggagcgtccgcgagacggtggtcttgccgaccccgcccttgtcagcgcccaccacgatcacaaccggctttgccatggaaatcccttgaaagcgcgctcccgaccgcgatggcgatcggcaagtccccacacctgctttgggcgcgaacatggcagaaacaagggagaattcaattccttaaggcgcccacgagcggtttggtggggaattccttaatggactgagtaggctagggcatgatccggaaaactgcgcagcggttgtccgggaagctcatgcccaaatcaaggagctcgcgcgatcagcgatgccgtccccaaggaccttggagagggccttggagtgggtccagcggccccagcggtccctgccttgggccggtgcccggcagcggcggcggattgttcggctgcgcgggcggcgtgtcgccccacgggccatgggtgaccggcggaggttgatcgcctggcagcggcggctggtcctgcggcgccgtcgcgtccgtctcatccggcagcgccagcgggccggggtcatgaccgccggcatatttcaccagggcatcgacccgggatttcaccgacgggtgggtggcgaacaggtcggcgaagccctcgcgcggattgtcgacgcagagttccattaccgccgaggtggctcccggcagctcgccgcgattctcgatcttgcgcagcgccgaaatcatcgcatcgggattcttggtcagctcgaccgatccggcatcggcgagaaattcgcgcgaccgcgacagtgcgagcttgaccacctgcgacagcagccaggccagcatgatcaatgcgaccgcgatgatgatgacgacgatcgcgccgccgcccgaacccttgctgtcgcgatccgaggaggaggacgatgatcgcgaggatgacgaggacgaccagccgcctccgccgccgctccacgacagatttgtgaacaggcggaagaacagttcgccgaagaagccgaccacgccggcgatgatcaccgcgatcaccatcagttgcacgtcgccgttcttgatgtgggtgagctcgtggccgagcacggcctcgatctcctggtcgttcagcgctctcagaagacccgtggtgaccgtgacggcgtattggcgcgggttgaggccggtcgcgaacgcattcagcgccgggctgtccatcaccttcagcttcggcatctggatgccgcgcgagatgcagaggttttccagcagattgtagagccgcggctgctgctgccgcgtcacgctttcgccgccggtgacggcgtcgatcatcttctggtggaagaaataggcgattacgatccaggccgctgccgcgatcgtcgcccacgggaaggccgagaccagatcccgcgaggcccgcgtcaaataatattcggccgtgcggctgctatcgatcatcacttccgcgaccagcgcgccggcatagaccagcacgtagatcagcaggaacaggccggcgagcagcagcatcgaacgaaacttgttcgatgcgatatgcgtgtagagaccataggcggccatgacggagcagcctctcgccggagcgcgttgcgcctcagaacttcacgctcggtgccgcctcgacttccgtacggctggcgccgaggtcgaagaaatccttgcgggtgaagccgaacatgccggcgaacaacgcggccggcatctgctggatgccggtgttgtattcctggaccgcgttgttgaagaagcggcggctggcggcgatcttgttctcgaggtcggacagctccgaggcgagctgctggaaattggcgttggccttgaggtccggataggcctccgacagcgcgatcaggcggccgagcgcgccggagagttggttctccgccgccgagacctgggccggcccctgtgccgagatcgccgaattgcgcgccttgatgacgtcgtcgagcgtgccgcgctcatgggaggcatagcccttcacggtctcgaccagattcgggatcaggtcgtggcgctgcttgagttgcacgtcgatgtcggcaaaggcctggctgacccgctggccgagcgcgacgagccggttgtaggcgccgaacgcaaacagcacgagaaggacgatgacgccgataacgatccagctggtcgacatgacagggcaactcctgatggacgagacggcggcaccgtagcccaagatcggggcgcagggcagcccgccgcgaaaaggtgggcaaagggttggtcggtgatggtgtccaattagttcaaaggcgtcgtcccggcgaaggccgggacccatacgccgcggcccgtggaaagggcacaagcggcgtcggctttgcttcacgaccgagatcggtggttatgggtcccggccttcgccgggacgacgcaggctgttggtctcgaccgcatcgccccagcgccagcgccgggcgcgcgcgtagtcggccttggcgcgtcgggggaccctggcgacggcgacgccctccgccgtgcacagcttggccgcaatctcgaccttgccgacatccggttgcgcgagcacgcgcgatggtcggttctcaacccgcgcgcggctcagcgcgacataggcgaagcgctcgtcctcgaacggtgcgtcggcgcccttgacctgcttgtgcgcgcgcgagcgctgcagccgctgcgagaaatggcaccagtcgggcgcgaccagcggacagtcgccgtcatgcgggcagggggcaatcacatgcgcgccggcggcgatcaatcgcgcgcgcagcgcgatgatccgcgcgtagcccgcgggggtgccgggttcgacgaccagcagggtatccttcgtttgctcccacatgacatcggtgagcgcgttgcgttcggcatcaccgagctcgttgatgatgtagctcgcgatcacgagatcggcggcctcggcatgcgctgcataaacgcgggcctggccgagctcgtaggtgatgcggcgcaggcggtcactccggcgcgtgaggtcgagcgccagcgtgcgcagggcctcattggcatcgagcagagtgaactcgtgcaacgacgggaaggcttccgcagccgcccagctcgccgtccccggcccggctccgacatcgagcaggctggtgggcgcgaaatccggccggatctccgtcagtgcattaaggctcgccaccacggcggcataggtcgcgggcatccgcgccacggcgtaggccagcgcatcggtctcggtcctgatcgttccggagccgccgccttcgcgataggtctgcgagataatggctgcacggccggcggcgtcgctgcgcgacaggccttcgagccgggcgttgagggccgcgcggagttcagcaggtaggtccggtgaggtcatgtgccgtcatttctacgtcattccggggcggcgcagccgaacccggaatctcgagattccgggttcggtgctgcgcaccgccccggaatgacgacatcgtatcctacgccacgttctggtcgaggatgtcgaccgcgccctgcaggtcgaccgagaccagctgcgagacgccgcgttcggccatggtgacgccgaacagccggttcatccgcgccatggtgatcggattgtgcgtgatgatgatgaagcgcgtgtcggtcgaaccggtcatttcgtgcagcaggctgcagaaccgttcgacgttgtggtcgtcgagcggcgcgtcgacttcgtccagcacgcagatcggcgacgggttggtgaggaacaccgcgaagatcagcgagagcgcggtcagcgcctgctcgccgcccgacagcagcgacagcgtctgcggcttcttgccaggtggcttggcgatgatctcgaggccggcttccagaggatcgtcgctttcgatcaggtgcagcgccgcttcgccgccgccgaacagctcggtgaacagccgcttgaagtggttgttgacggtctcgaacgaggtcagcagacgctcgcgcgcttcgcggttgaggctctggatgccctggcgcagccgcttgatcgcctcgaccaggtcgtcgcgctcggtggtcagcgcggtgtgctgggtctcgacttccttcagctcttcctcggcgcgcaggttgacggcgccgagccgctcgcggtcgcgccgcagcttctcgagttcttcctcgacctgcgtgaccggcggcagctccgcgccgggctcgatctcggccatgccgaccaccgcgctgggctcgacctcgagcatgtcgtggatctcgcgctcgatgtcggcgaggcggcggcgggtgccttccatgcgctcttcggcgcgggcggtggcttcgcgggacgacgacagcgcttcgagcgtggccttggcgacgcgatcggtttccgccatcgcggcttcggcggttgcgagcgcgtcggcggcgatgcggcgatcgccctcggcgtgctcgatctcggtgatcagcgcgctgcgcttctcggcgaacacttcgggcgcattggcaagttcttcacgctcggccgacacttcggcgatgcgggcctcgacggtctcaacctgcgaggcggcgctggtcttgcgggtctgccactcattgcgctcggcgacgatcgcctgcacgcggcggtcggcgagttcggcttcgcgggcgagcgcctgcgcctcggcgcggacctgcgccgcggcccggcgctggttgtcgatctccgcgcgaaccgcggcgagctgggcttcggtctcgacacccggcggcaattcggcaagcgcggcagcggcgctctcatgggcggcttcggcctcggcgcggtcggcggcgacacggctgtgcgcctcggtcagcgccgatttgcgcgcggcgtggcggttgatctcgcgctcggtcgcggcatggcgctcgcgcgcggcatcggtctcgcggcgggcggcacgcacggcttcgcgcgaggcaccctcggcggcggacgccgagcgcagctcttcttcggcggtctccagcgcctcgcgcttggcggcggcatcgatacgggcctgttccagctcgtgctcaatgtcgaccaggcgggcgcgttcggcgaggcggcgcgcagcgccggtcggcgcatgcgcgtcggcgacaaagccgtcccagcgccagacgtcgccttcgagcgacaccagccgctggccggtcttcagctgcgataccagcgccgcgccgcgttccttggcaacgacaccgatctgggcgagacggcgcgccagctccggcggtgcctggacgtgatcggccagccgctcgacaccatcgggcagagaaggatcgcccgcggcctcgccgacattggtccagcgcatcggcgcggaggaatccacgggggcgtcgaggtcgtcgccgagcacggcgccgatcgccttctcatagcccttggcgaccgtgatgccgtcgatgatcggcggccacaggttcttggtttcgctggtgacgagcttggagatggtgcgggcttcggtctcgagccgctgcacgcgcttctccgcctcggcgagcggattgcgggaggcttccagcgtctgccgtgcggcggcgtggtgggcctcgctggattgcacggcggcctcggattcggcgagcgcctgctgcgccatctccatggcggcggcgagcgcgtcgatgtcgccgagattaccggtctcctgcgcgagcttggcttcctcggcctggacgttggcgatctcctgatcgagccgcgccagccggtcgcgatgcgtgcgcacgccggcttcgagctggttgcgcttggcagtgagatcggcgagctgcgtggtcagctcggagaactggcgctcggtcgcggccaggatctcctcggcctcggccacgcgctcgtcgacgccggagcgcttctcgacccgcgacttgatctcttccttcagctcggcgtcttcggtgtcgagccgctgcagcgcgatgtcggcatccgaggtctgctgctgctcgcgcgcgatgtcctgggcgaactgggtgaggcggcggtcgagctcgccgacgcgctccttggcgcgctgctcctcgcggtcgagcatctcgcgcgcattggtcaggcgctgcaggccggcggcggcgcgcgcctcggcatcgcgcagcgccggcagttcggtggcgcggatcgcctggatgcgcgcggcttccgcctgatgctgggtgcgctccgccatctcgcgcacggcgagatcatgggtccgcgcggcgtcgttgacgtcggcattggccccgatccagcgcaggtggaacagcatggcttcggacttgcgcaccttggccgcgacctcgcggtagcggatcgcctggcgcgcctgcttcttcaggccttccatctggccggtgagctggccgatcacgtcctcgacgcgggtgaggttggtttcggccgccttcagccgcagttccgcctcgtgacggcgggcgtgcaggccggcgacgccggcggcgtcttccagcacgcggcgccgctgctccggcttggcctggatgatctcgccgatcttgccctggtggacgagggccggcgaacgcgcgccggtggcggcgtcggcgaacaggatctgcacgtcgcgggcgcgcacgtcgcggccgttgatgcggtagaccgagccggcttcgcgctcgatgcggcgggagatttcaagcaactggctgtcgttgacggcggccggtgccgagcgatcggaattgtcgatcgtcatcacgacttcggcgtggttgcgcgccggacggttgccggaaccggcgaagatcaccgcatccatgtcggcggcgcgcagcgacttgtgcgacgtctcgcccatcgcccagcgcagcgcttcgacgagattggatttgccgcagccattcggtccgacgacgccggtcaggcccggctcgatcatgaaatcggtgggttcaacgaacgacttgaaaccgtgcaggcggaggcgcgtgagcttcatgtacacaaatctcgtttggccgggcgcgaatctccctgccgtgacaataccatggatggcaatgtcggtgtctggggtgaatagctgcgtgcagctctcatgagcggcgacaatggcgatgcctgcgcgtcagggcaaccgcttgacccagcttttcccaagggatttgcgagggatttgcaggggttttatgaactctgcatgccctcggagattcgcatcgggcgaatcaggttttcaacaacgaaataatgcgatcgccgcatgtggggatcgcaagtcatccacaattatcgtgcccgactcaaatcgggcacgatggtgtcaggctcgatagggcgcaatcagctcttcagcagcggatcgatatgcttgctgaattcctcgaacgaggtctcgcccttcagcatctcgccgttgatgaagaaggtcggcgtcgagttcaccttcagcacgtcgttggcgtatttctggtcggcggcgatcttgtcgagcagcttctgatccttcaggcagtcctcgacctgctgctggctgagaccagcctgcttgccgatccgcgtcagcgtctcggtggtgttcttcaccacccagtcgttctgctggcggaacaagaggtcgatcacggcgaagaatttcggcgcgtcgtctttggcgatgcagcgcgccagcatcgagcccgcggcggccttgatgtcgagcgggaattcgcggaacacgtaacgcaccttgccggagtcgacgtaggtcgacttgatcttcgggaacacggtctcgttgaaattggcgcagtgcgggcaggtcatcgaggcgtattcgacgatcgtcaccttggcgtcctgcgggccgaggcccatgtccggcagcgactgcggcttggcgacttcggcggcggtctgcgcgaatgcatcggtgatcaggcgcagcggcgacaggccggcgagggcggcaaggccggtcagcgagagagcggtggtgaaggcgcggcgcgtgatgatcaaggtcagctcccggattggcgcattcacgccacaatgaagggggtcccaaaaaagaagccttcgctagcttgaaacggccattgtggcaatgccggggactcgcggcaaagccatcgaaaagcgtcaatttcgcttgatcgaggcgcccaaccgggccagcgccgcgcgcaggtcgtcgtcctcgacggcggcaagatcggccgcctcccgagccacggatttagcgtcgggcgggcgcggccgcgccgggcggctgcggcgcgacagcggggcctgccggatcgtcaggcggccgaccgcgtgccagccgaagaagcggttcacccgttccagaatgacatcggaggaatgctggatctccagcgccatcggtccctcgacccgcagcaccagcgttgccggctcctgcggctgcccctccaccggccgcggccactgcatcttcatcggctcgcaaaaggtggcgatccgctcgcccgcgatctcggtccagcgcagcaccagttcgcgcgcggcaaagccctgctttgcgtacgcatcggtgaagacgtcgctgagcaggatcgacaggggctttgcgctgatcgggccgggtttggacatgggacgggttatagcacgatgcccggccgccatcaggccgccgcacgtggacggatggccttgagatcccggtcgatctcgcggcgccgttgcatcaggtcatagtccatctgcagcccaaggaaaaacccctccgataggccaaaatagcgtgccagccgcaggtcggtatcggcggtgatgtcgcgcttgcccagcacaatctcattgatgcggcgcggggccacatgaacggcgcgcgccagcccattctgactgaggcccatcggcttgaggaactcctcaagcaggatttcgccgggatgggggttgtggagcaatccgcccttagtcgtggtagtcgacgatttcgacatgtgccggtcctccctcatcccatacaaagcagatacgccattgatcgttgatccgaatcgagtgctgacccagccggtccgccctcagtgcttcgaggcggttaccgggtggcacgcgcaggtcgctcaaagcgcgggcttgattcagaaggcggagtttcctgagcgcaacgttctggatatctggcggcaaatctcttgctgcgccggcccgaccagatcaatgctgtctcgggatcggcgaaaccctggatcattgcgcactataacgcgtcgcgtcatagtgcgcaatgattagccggtggccgggcctgaacccagaggaagaagcgtgtccccgtcacgagcgaccaagcaaagaccgcaacaggatgcgcctgaccgcccggcacggctgctcgcctggtatgaccggcatcgccgaaccctgccgtggcgcgcgaaggccggggagcggtctgatccgtaccgggtgtggctgtccgagatcatgctgcagcagaccacggtgcgggcggtcggaccttacttcgagaaattcgtggcgcgctggcctgacgtcaccgcactcggccgcgccgcgctcgacgacgtcctgaggatgtgggccgggctcggctattattcgcgggcgcgcaacctgcacgcctgcgcggtcgcggtgatgggcgatcatggcggggcatttccggacaccgaggagggcctgcgtgcgctgcccgggatcgggccctacactgccgcggcgatcgccgcgatcgcgttcgaccggcgcaccatgccggtcgacggcaatatcgagcgcgtggtcacccggctctacgccatcgaggaggcgctgccgcaggccaagccgctgatcaaggagatggccacgacgttgctcgggccgtcgcgcgccggcgacagtgcgcaggcgctgatggatctgggcgccaccatctgcacgccgaagaagccggcttgcgcattgtgtccgctgaatgacgattgcgcaggccgcatccgcggtgatcaggaaacattcccgcgcaaggcgccgaagaaaagcggcgcgctgcgccgcggcgccgccttcgtggtgacgcgtggcggcgagctgctggtgcgctcgcgcccggaaaagggtctgctcggcggcatgaccgaggtgccgggctcgcaatggctcgccgggcaggaggatgccgccgcgctggcgcaggcgccggaactcaagggcgtcacccgctggcatcgcaaggctggaatcgtcagccatgtgttcacgcacttcccgctcgagctcgtcgtctacaccgccagcgttacgtcgcggacccgcgcgccggagggcatgcgctgggtgccggtggcgacgctcgacggcgaggcatttccgaacgtgatgcgtaaggtcatcgcgcacgggctcgacctctagaagatgacggcctgctgacaccatgctggcagcagcgcccggctatcacctccgtcacaacggaggtcgccatgatcgcaactgcgctcgataaaattccgatgccgccggtcgcaaaactgctcggctggcgcctggccgacgcacgtccgcaggacggctggatcaggatgaccttcgacggcaagcaggatttctgcaatccggccggctttatccagggcggcatgctcagcgcgatgctcgacgacaccatggggccggcggtgttcgtgatgaccgagggcaggctcttcaccacgacgatcacgatgaccgtgaatttcctggcgccggcgaagcccgggttggtcaccggcgaggcgacggtgactcagctcggcaagaccatcgccttcgtcgaaggccggctgacctcggccgacggcgcattgctcgcgacggcgagcagcagcatccgcctggtggaggcggtgcgggcgctgcggtgacgccgcgtgcgcaacaagcagtccgtcgcccctgaagcggttcatccgtcattgcgaggagcgatagcgacgaagcaatccatgcctccgcgaatgccgcgcgatagattgcttcgcttcgctcgcaatgacggggatccggccttgttagcccaaatcagcccggtcgctgaacgattggcggcttggcgttcagcccctcgacctggaagccggcgacgcgcttgtagttggcggcgatgtcttccagttcctgctgcgacagcacgtcggtgaccaccttgaagccgtcaggcgcgcgctcctcgaccagctgcatcacctgctcgggaccgttgcggcggttcagcatcacgaggtctgatgtcgcgggccgccgctcggcctcataagcggcaagcgcggcctgcgtcgggccatgcgccaggatctcgcgggtcagcgtgcgtgcatccagaatcgcctgcgaggcgccgttggagccgatcgggtacatcggatgcgcggcgtcgcccatcagcgtgacgcggccgaaggtccattgcgggatcgggtcgcgatcgaccagcggatattcataggcgtgcggacagttgcggatcaggccgggcacgtcgagccagtcgaaattccagttctcgaaccacggcaggaactcgtcgagttttgctttgcggttgtagtcctcgcggcgccactgataggtcggcggcatgtgccgctcggcgacccagttgatatcgaacttgccgtcggcgccggcctccttcgagatcggatagcagacgaatttcagggtctcgtgcccggccatgatcatggtgcggccggtgaggaaggagttcgcccgggtgatgccgcgccacaggatgcggccgttccagatcggcggcccttcctgcggatagagcttctcgcgcaccgccgaatggatgccgtcggcggcgatcagcaccgcgccgtcatggctgcccgccggcttgccggtggcgcggtcgatgaagtcggcgcggacgccgtctgccgtttcggtccagccggtgaggtgatggctggtcaggatgttggcggctcccagtcgctcggtcgcggcatcgagcagcagctgctgcaggcggccgcgatggatcgagaattgcggccatttatagccggcctcgagcccgcgcggctcgctccagatcggcttgccgtgcttggagaaataggcgagctcgcttgtgcgcacggcggtcgtatcgagcacgtcgtgcaggccgagctcgatcaattcgcgcaccgcatgcggcaacacgttgatgccgactccgagcggccttagctcgggcacgctctcgaacacgcggcagggcaccccgatctgatgcaggctgagcgccagcgtcagcccgccaattccgccacctgcaatgagcaccgtcatgaaaagccctctcgattggccatggtcatcgcacggcggccccgccgcgggcaaggtccgcggccccccacggggtggacggcaagggacgtcgtcgctaacctcggccgcattccataaaaagccaagggccgggttcgcaacgagccgacaaggcccgtagaggacatcgacatgctcaagctctataccgctcccggcacctgcgcgctcgccacccacatcgcgctggccgaagccggcgcgccctatacggtcgagcggctcgacttcaagaacaaccagcagaacagcccggaatatctcaagatcaaccccaagggccgcgttccgacgctggtgaccgagcacggcgtgctgaccgagacgccggcgatgctggcctacgtcgcgcagacctatccgcaggcgaagctcgcgccgctcgacgacgccttcgcattcgccaggctgcagtcgttcaactcctatctctgctcgacggtgcatgtctgccacgcccacaagatgcgcggcgcgcgctgggcgacccaggagagctcgtttgccgacatgaagtcgatggtcccgaagaccatgggcgcctgcttcaacctgatcgagcgcgacatgctcaaggggccgtgggtgatgggcgagggctacacggtgggcgatgcgtacctttacgcgctcacgctctggctcgacggcgacggcgtcgacatcgcgaccttgcccaaggtgaaggcgcaccgtgcggcgatggagggccgtccggcggtgcagaaggtgctggcggagcagagggcgtagggcagagcggccaatacctcggtgtcgtcccggcgaaggccgggacccataaccccaaatctgaattgtggtgcgacgctggggccgcagtcgttcatcccgtttaactgctgtgattatgggtcccggcctttgccgggacgatatcggggatggatcatgggcctcacaccttccccatctccagctcccgtccggtctccagcatcagcttgcgcagccagatcgagcccggatccatctgcgcccgcgtcggatagaacatgtgctgctcgtcgatcccgggatcgagcggcggcgtcaccgtcatcagcgacagctgcttcgacagcgccgcaatcagccggcgcggcacgaaggcgacgaggtcggtgcgcgcggtgacgtgcagcgcttcgatatagcccggcaccaccagcgcgatccgccgctcgatgcccttggtgcgcagccaggtgtcgatcagatcctcgttgtggccgcggatgatcacggcgacatgccgcgccgccaggaacgcctcgcgcttcctgagcttcgcgccggccgggtggccgcgccgcaccgcgagtgcatcgaggtcggtgtagagccgctggcggtgaaatcccttgaaggaattgccgatcgagatcacgagatcgatggtgcgggcgaagtcgggcgtgaagatcgtcgagctccgccacggcaccacgtcgatggtgacgttcggcgccagccgcgtcaccttctccatcagcggcggcatcaacagctcgaccgcgagatcgggcatcatcaggcggaaatgccgctcgctgcgcgcggcgtcgaactcgtcggagacgaacagcgtacgcacctggtcgagcgcctgcgccagcggcgagcgcagcgcctgcgcccgcggcgtcagctccatccgcgcgccgttgcgcaccagcaagggatcgccgatcaggtcgcgcagccgttgcagcgcgtggctcgtcgccggctgcgacagattgagccgcatcgcggcgcggctgacgctggcgtcgcgcagcaaggcgtcgagcgcgaccagcaggttgaggtcaagcgaattcaaattcatcaggtgaatatatatcataccacctatcgattggaagaatgcgcgtcggcgccgcaggatcggcaggcaaggcgttctcacgcgaaccagtgagcggttcgcacaaggagatgcctgagaccaaggcaaccaatcacaggagacgcgccatgagcgcagccgacaacaagaaactggtgcaggagatgttcgtgatcgcgggcagtcccgatcccgcggtacgcgagaaatcgctgttcatggcgacgctcgccgacgacgcgatctggaccgtgaccgggcagtattcctggtcgcgcaccttcaccggcaagcaatcgatcatggccgatctgcacggccatgtccgctccaggctggtcgagcgcggccgcaccgtcgcgcatcgcatcatcgccgacggcgacatcgttgtagtcgaggccaagggcaacaacctcaccaaggaaggtcagcgctacgacaacgattattgtctggtgttccgcttcgacggcggcaggatcaaggaggtgagggaatattgcgactcggttttgaccgagagggccctcggtccgtttccggccgccgagattcgcgcggcgggttgaacggctgatcgccgcatgcgcggcggtgctggtccggttcagacaatggcgtgaggaccgccgcgcgtggcggcaactcgccatcatgagcgaacgtgaaatgcaggatatcggcgtctgccgcgccgacatttctcacggccggtgcgacaggggaaggctgtattggccgccgtaacttgcaaaaatgcagggtgggcaacgcgtcagcgcgcccaccccgcgtagcgttcaaaggcggctcacgccaccttgttcttgagatggccgaacatgatgtcgcgggccgcgtcgtccatctccgccttgaaggtgtgcttgtccttcagcgcgatcgcgcgcgccgccgccggccgcgccgagatctcgtcgaccagccgcttcacgttcggatattttgcgtagccttcctcgccgaggacgaacggcgccatccgcgcccaaccccagaacgccatgtcgacgatggtgtagctgtcgccgaccatgtagcgctgtttcgccaggtgatcgtcgaggatcttgtagtggcggtgcgcctcgtactgatagcggttgttggcgtagtcgaggtccttcggcgcgaaatgcttgaaatgcacggcctggccggaatacgggccgaggccggtcgcgatgaacatcagccaggacagcgtcgcggcgcggttcgccggcgtgttggcgggcaggaacttgccgtgctcctcggcgaggtagagcaggatggcgttggagtcgaacacgaagatgccgtcgtcgtcgatcgccggcaccttgccgttcggattgaccttcaggaaatcaggcgcgaactgctcgcccttgcgggtgtcgaccgggatcgcctcgaacggcaggccggactcttcgaggaacagcgcgaccttgttcgggttcggcgcgccattgaaatagaatttgatcatgaagggactcccttggttcttgtgaccggcgagatcggggcgcggcgggggatggccgcagggccactcatgcgcaaaattcgccgcaacgcgcaagcgacgagtttgtgaatcaggggcgcgtgccgcgcgggtcagccggcgttcaagacggcgtcagctttctccgatcgtcattccccgatgcgcaattgcgcatctgagggcgccgcaacacggcgagcccggaatccattgcgccacggcgtatgtgactcgatggattccgggttctcgcttcgcgagccccggaatgacgaaggaatgaggatgagcggaccgtgtctcgcagccgcgggatgggaggacgaaaggcctgctcagcccaccgccatcccggagcggatctcggcgcgcagctcgtcgatcagccgcagcccggtcttggtctcgacgtgccagaaggtccagccgttgcaggcgcccgagccttgcgcgacggcaccgatgcggtggatcgagccgaccttgtcgccgagcatgatggcgccgtcggcgcgcaccagggcgccatggcgcttcttggcgtcgaccagctttgcgccgggcacgatcatgccgcgctcgatcagttcggagaacgcgacgcgcggcgcctcgcgggcggtcatgaacggtgccagagttgcttccggcagcggttcgatcgcggcgatacgggcttcggccgcggcggcataggtccggtcgcgctcgaagccgatatagttgcggccgaggcgcttggcgacggcgccggtggtgccggtgccgttgaacggatcgatcacgagatcgccgggcttcgacgacgacagcagcacgcgggcgagcagctgctcgggcttctgggtcggatgaaccttcttgccgtcgtcgcccttcaggcgctcctcgccggtgcacagcgggatcagccagtcggagcgcgcctgcacgtcctcgttggaagctttcagcgcttcgtagttgaaggtgtagcccttggccttctcgtcgcgcgcggcccagatcatggtctcgtgcgcgttggtgaagcggcggccgcggaagttcggcatcggattggacttgcgccacacgatgtcgttcaggagccagaagccgaggtcctgcatgatggcgccgacgcggaagatattgtgataggagccgatcacccacagcgtcgccgacggcttcatcacgcggcggcaggccagcagccaggcgcgggtaaaatcgtcataggcggcgaacgacgagaacttgtcccagtcgtcgttgacggcatcgacatgcgactcatcggggcgcttgagatcgcccttgagctgcagattgtagggaggatccgcaaagaccaggtcgaccgagccggcctgaagcttcgacaactcggccacgcaatcgccaatgacgatgtggctcgacggggcactctcaaatttagtgcggggcgcccttgcagacgccccgcgacgcgacactaccatgactcaagaactctgactcaggcgacgctgtcggcgacgcgggactaaacaaccgactggcgtcacattgaccgggcaaagtaaaaatcgacttaattggaaatgttcatgcaaaagattgcagcagtttttgaacgacgtggcgcattgtcgtgtgcgttgtgctgcaacatcagcgcgttccgcgaaaatttttgcggatcatcaaaccggcacgattcagccagtaaattcgccgccgtttgcagagttcgcggtacaaacgatgcgcgtgcaacgggctaggcaatttttgccgggcaggatattgattaacagaatggaaattttaggttggtgtgtcccgcaatggggcgccgactggaatgaagggaaaccgccatgcgctatgatgatttccgccgcagcgacgacatcgaagaccgtcgcgacgacagcggaggcggcggtggtggcggcttcgggattccgatgggcggcggtggcgggctcggcatcggcacggtcatcgtgctcggcctgctcggctatgccttcggcatcgatccgcgcatcctgatcggcggcgccgagattctcaccggcggcggccaggcgccgacctatcagaccgaccggcagtcctccggcggccaggccaagcgcggcgcgccgaccgacgagatgggaagcatgatcgccggcatcctcggcgagatcgacgatcgctggagcgagatcttccaggcctcgggccagagctacaccggtccgaagatcgtgctgttccgcaacgccaccaatggcggccgctgcggcatggcgcagtcggcgatggggccgttctactgcccgccggacaagaccatcttcctcgacaccggcttcttccgcgaggtcgagacgcgcttccgcggctgttcgggcaacgcctgcaagttcaccgcagcctatatcatcgcgcacgaggccggccatcacatccagaacctgctcggtatcatcccgcgcgtgaaccggctgcagcagcaggccggcagcaaggccgaggccaacgcgctgcaggtcaaggtcgagttgcaggccgactgtctctccggcgtctgggtcaatcgcgaggagaagaagcggccgggcttcctcgaggccggcgacatcgacgccgcgctgaccaccgcgaatgcgatcggcgacgacacgctgcagcggcaggcgacgggcagggtggtgccggattccttcacccacggctccgccgcgcagcgcaagcaatggttcatgaccggctaccagcagggcaccgtgcaggcctgcaacacgttcggcggcgggtagaaagccggttcaacgggggcaaggccgcgagtcaggtcacctctcccgcttgcgggggaggtcgcatcgcatcgttagatgcgatgcgggtgggggctccttccactatatgactcgcggtgacacccccaccccgacctcgagagcgagcttcgctcgcctcggacgcccacaagcgggagagggagcgagagagcaggccatgtcttcaatcgacgaaaccaagcaattcatcccgctcaacatcgcggtgctgacgatttccgacacccgcacgctggcggatgacaagtcgggcaccacgctcgccgatcgcctcaccgcggccggccacaagctcgcggcccgcgaaatcgtcaccgacgatgtcgaggcgatccgcgcggtgatccggcgctggatcgcggaccccggcgtcgatgccgtcatcaccaccggcggcaccggcttcaccggccgtgacgtgacgccggaggcggtcgagccgctgttcgagaagcggatggacggcttttcgatcgccttccacatgctgagccatgccaagatcggcgcctcgacgatccagagccgcgccaccgccggcgtcgccggcgcgaccttcatcttctgcctgcccggttcgcccggcgcctgccgcgacggctgggacggaatcctggctgcgcagctcgattaccgcacgaagccctgcaatttcgtcgagatcatgccgcggctcgacgagcatctacgccgcccgaaggcgaaggggtcgagtgtgtaacctcgatcgtcattccggggcatcgcgcagcgatgagcccggaatccatcgccccacataacctgcggcctagtggattccgggctcgcgcttcgcgcgccccggaatgacgaagaaatcaaccgccgccgatgagtctcaacagcgcctgccacaatccccgcacaccgttgcgccaggcctcggcccacagcgcgtgcgccatgtgggtatagaatgtgatcagctcagccgtgacgcgccgcccggtttcacaactcgagctcccaggtctcgccgatcaggtcggcgccgaagctgtgatgcttctcttccttgacgcgctggaagccggcgcgggcgtagatggcgcgcgcggcgagcaggacgctctgggtccacagcgtcatcttcttgtagcccttctcgcgcgcggcgcggatgcactgctcgaccagagcgcggccgacgccgagcccgcgcgccttctcctcgaccagcaacagccgcagcttggcgaccccgtcgccgccgttgaccaggaagatcgagccgaccggttcgccattggcttccgcgatccagcaatgctcgcgtgcgggatcaaagttcctgatgaattgcgcgcagatctcggcgaccagcgcctcgtagctgatgtcccagccatattcctcggcataggcccttgcctggctcgaaatcacccagccgatgtcgccgggcctgtggctgcgcagcagaaaagcggcgggtttctccgcaggctgctccagcgttcgctcgatcgtcgccatcgcgcgcaccacggcgccgcgctgactgtcgtcgagcgagacgagcaggtttccgacttcctcgctcgaccgacgctcgagctcggcctgggcggtgcggcctttggcggtcagcgatagttcgttgatccggccgtcgtgctttgcgggcttgcgcgtcacgatctggcgccgctgcagcgcctgcagggtgcggctcacgaagccgggatcaaggccaagatcgcgcgtgaggtcggtggcagtgcaggcggggcgatgccggatctcgtagaggatgcgggcttcctgcagggtgaacgggctgtgcacgagcttgggctcgatgaggccgagcttgcgcgtgtaaaagcggttgaagccgcggatcgcggcgatctcgccggcgatatcattatttgatttcatcaaatgattatttgacggaatcaaacaaattgcaagccccaccaaacccgttctgctttgcatggggttgttttcgcgattctgtgttcaggcctgcgaactggccccgtcccggtctcaggccaccatgatccggctgcgcagcatggtgcgggaggagcggccgagccggcgcagcagccgcgcctcggagcggcgggcgtccggccggtaaccgccgatccgctcgtaatgttcgcgcgcgatcagaaggccctgttcggccgatggcccggtgatcatccgggcgacgaatttgaggccgtcgcgcaggccggggtcggagtagggcgcgcgggcatagcggaagatgccggcgcggtccttgccgctcgccgccaccatctggatgaactgggtggtctcctcgatccagcccgcatcgagcaccgcgcccggatgcaggaacatcaaccagggcgaacgcgcctggcgtgcgccggccgcgagcgccgcggcgcgggtgccctcgaagcgcaggaagcggcagccggcgacgtcggcaacgcgctccatgatgtcggtattggtgcggtcgaccagcagcacttcgcggatcacgccggcggccgcgcccggcaccagcgccgccaaggttgcgaccgcggtgcgctcgatcccgtcggttggaatgatcacgctcagcatgatttgaggcttcgctggctgaaatggttccggaaactccggtcgtgttatcaccttgtcatattcaaagcagcctgtgcggctgcagaattttgtagcaaggttctgtggaatttctccgctctcgttcttgatttgttctcgcgctgtgctagcttcagaacatgagccgagcatcctctcatgccctcaagcacccgccggtaacggcgccctccgataacccggcgggtgcacccaccccttttcccgagcttgcggtcgcgatcgagcgcgagcggcggcgcggccgcggcgcgcagtccaacgccagcggccgttatgaggccgaggcgcggacggccttcgacgatggctggcagagcctcgaagacctgccgccgttcaccaccagcgtcgcgctcgacacctcgcgcaaggtgatcacccgcaacgattcccccgatatcggcttcgatcgctcgatcaatccctaccgcggctgcgagcatggctgcgtctactgcttcgcgcggccgacccacgcctatctcggcctgtcgccggggttggatttcgagtcgaaactgttcgccaagccggatgcgccggcgctgctcgagaaggagttggcggcggcggattatgaagcgcggatgatcgcgatcggcaccaataccgatccttatcagccgatcgagcgcgagcggaagatcatgcgcggcattctcgaagtgctggagcgtgccgggcatccggtcggcatcgtcaccaagtcggcgctggtgacccgcgacatcgatatcctttcgcggatggccaagcgcaacctcgccaaggtcgcgctgtcggtgacgacgctcgacccgaagcttgcccgcaccatggagccgcgcgcctcgaccccgccgaagcggcttgaggcgatcaagcggctcgccgaggccggcatcccgaccacggtgatggtcgcgcccgtgatccccgcgctgaacgattccgagatcgagcgcatcctcgatgcggcagtgcatgccggcgcgaaggaggcgagctacgtgctgctgcggctgccgctggaggttcgcgacctgtttcgcgaatggctgatggcgaactatccggaccgctatcgccacgtcttcacgctgatccgcgacatgcgcggcggccgcgactatgattcgcaatggggtacgcggatgaagggcaccggtccgatggcctggatgatcggccgtcgcttcgagatcgcctgcgaaaagctcggcctcaacaagcggcgcaccaagctgaccacggatcacttcgccaagccgaagcgcaacgggcaacagctcagcctgttctaggcgagatctcgtagcgcggatggagcgcggcgaaatccgggctacgaagatgcaagatggtgacaacgttaaacaagtgagtacagcaatgagtaacgccccgaccgcacgcttcaccgtcctcaccctcggcgtcagcgacatgcgcgccagcatcgccttctacgaatccctcggcttcacgaggaagatgcgggcgaccggcgaggaggtggcgttcttcgagaccggcggcagcgtgctcgggctgttcccgtggcacctgctcgctgacgacgccggactgcccgatcagccgcggccggctgcattccacggcgtctcgatcgcctggaactgcaacgacgatgccgaggtcgatcgcgtgatggcgttcgcactgtcgaaaggtgccaagctgctgaagccggcacagccgaccagctatggcggttattgcggctatttcggcgatcccgatggtcacgcctgggaagtggtgcgcgcgccgggttttgaggtgctcgatagcgggcgggtgtcgattcctgactagcgcgggctggctggactgaataacggggaagggcgcccggttcccggttgcgccgcgggctgcgcttgatcacgatccccgcatgattcgggacaagtccagaaacacgtcgaaaaagccgccggccaagccgaccgcgccagccaagccggagaagcgcatcgtcgtgcggccgagcttccggcgcgagcgcgcgctgatcaagcgcggcgtctggccggtcgccggctgcgacgaggccgggcgcggcccgctggcaggtcccgtggtcgctgccgccgtggtgctcgacccggcgcgggtccccaagggcctcgacgattccaagcggctcagcgccgagcgccgcgaggaattgttcgaggagatctgcgccaccgcttcgttctcggtcgcggtggcctcgccggcgcgaatcgatcgcgacaacatcctgcgcgcctcgctgtgggcactggcgcgcgcggtccatgcgctgccggagatgccaaggcacgtcttcgtcgacggccgcgacaagctcgccacgctctgcgactgcgacgccgtgatcggcggcgacggcatcgtggcctcgatcgccgcggcttcgatcatcgccaaggtgacgcgcgaccgcctgatgtgtcagctggcgctggattgtcccggctacggcttcgaacagcacaagggctatggcgtgcccgagcacctcgaggcgctggaccggctcggcccgagcacccatcaccgcagcttcttcgcccccgtcgtcgccgcgcggctgaagcattttccgcgtcccgccgagcccgacctgttcacggtggacacggaaagcgaagccgcagcggcgtccgaagcggcgtagcgcgacggcgcccgcacaagcaacggcgccaacccacacaacggtgtcatcgcccggctcgacctggcgatccagtattccagagacagtgattttcaatcgagaagccgcggcgtactggatgccccgccttcgcggggcatgacggctgcgtttggatatgcagggggcactcatcggccccggttgcctccgccgccgccgccgtctatcaaaaaccctcgggatcagatggcgccgctgaacgaggtggctggggcaattcaggcgtttcatgcggtttacctccctggttgtcgaactgatccgcgcccggccgcgtcttgtggtctgggtcgtggtgctggtgcaggccgcgatctggctgctgctgccgctgatcttctacggcagcccgcccggcaatctcgccaccgtgctggccttcggccgcgaatatcaggtcggcaccgatatggggccgccgctggcattctggctcgccgacatcgcgttccgcgccgccggcaatcacgtgttcggcgtctatctgctggcgcaggtctgcgagatcgcgacgttcatcgcgttctaccagctggcgcgcgccatcgtcggcggcccgcagggcgtgctggcggtgttgctgtcgatgactgcagtggtgttctcctcccccagcgtcgagttcggtccgctgatcctggcgcgtccgctatgggcgctgctgctgctccattcctggcaattgatcgggcagaaccggcgtagcgcctggttcgcctggtcgatcgattgcggcctgctgctgctgacggcgccggccgcgatcggcatgatcctgctcgtggtcggctttgcgctcgcgaccgagcgcggccggcgcacgctgcgggcggtcgatccgctctacgcgctgctggtcatcatcgtgctggcgctgccctatctggtctggctggtccgcgccgacgtgctggcgctgccggcactgcctgcgcttgccgatctcaaggcgcgcgcgctgcgctggggcgtcgtgctcggcgggctgatcgtggcgaccgccgcgatcgtggtgctggcgatcctcaattcgcgctggtttgcccgcgacggcgaggacgcgccgatcatctaccgtccgccggtcagtccgctggcgcagcagttcgtctactttttcgcgttcgcgcccgcgatcgtgagcagcttcatctccgggctgttcgatctggacagcgccttcggcggcgccggcgtggcgctgttgatgtcggggctggcggtcgtggttgccactggcgatctgatccatctccgccggcagcggctgctgcgctcggtgtgggcctttgccgttgcggcgcctgcggctgtggcgctggctgcggcgctgttcctgccctggaccagcaccaaggaggtgccgacctcgctgccggcggccgcgatgggccgcttcttcgacgacagctatgagcgccgcaccaaccagcgcctgcgcgcagtcgcgggcgaccccgagatcgccagcctgatcgcgatgaacggccgccgcccgcatctgttgctcgacgccacgccgcagcggacgccctggctgtcggtcgcgaaattcaacgagaccggcggcgtcgtggtctggcgcgcgcaggacaccgccggcacgccgccgcccgacctcgcccagcgcttccccggtctcgtgccggaagtgccgcgctcgttcgaccgcctggtcaacgggcggcagccggtgctgcggatcggctgggcgatcgtgcggccgaagggatagggatctgcagatccgtaaggtgggtggagcgaagcgaaacccatcgaaccggactgcggcacaaaggatgggtttcgctgcgctctacccgtcctacgaagcaagcaccttcgcgatggcgcgcagatcctgccacgacagccgcttgtaggacggcgagcgcagcagataggccggatggaaggtggcgacggcgcggatcgtgcgggtgccggtgtcgtaatcgatccatttgccgcgagtccgcatgatgccctcgcgcgtgccgagcagcgcctgcgtcgagggattgccgagcgtcaccagcacgtcgggattcaccagctcgatatggcgctggatgaagggcaggcagacctgcgtctcctgcggcgtcggcgtgcggttgcccggcggccgccacgggatcacgttggcgatataggctttgctgcggtcgagcccgatcgcggcgatcatgcggtcgagcagcttgccggagcggccgacgaacggcagcccctcgatgtcctcgtcgcggcccggcgcctcgccgacgaacatcaccttcgcctgcggattgccatcggcgaacaccagccgggtcgcggtgtgcttcagcgcgcagccgtcgaatgtctccatcagcgtgcgcaacgcttccagcgtcggtgcagtccgcgcggcctcgcgcgcggaggcgatcgcggcctccggcgcgacggtgatttcgctgcgcggaacggcgggcatcggcggagggcgcagcggattgagcgccaccggccgcggcgcggcgggggccggaactgcttctggctcttccagccggttgatcggctcctcgccaagcgcgcagtcgaccccggcctcgaggtaaaaggccagcaattgctgcagtgtaggggtgggctcgggcggcagggccatcatgggggcaatctagagcatcaaagggaaaaggggaggctcgatttcggaaaagattgttctttgcggtatccggaccgtgcaaaccgatggaagcgcaattccatggttgtccttccgcaaaaaatcggaaacaacgacttttgaaaagcttagaagcgttctcaatgggctgagacagagatcatgagtgctgaagaccttcctccccgcgagtctatggaattcgacgtcgtcatcgtcggcgccggcccgtcgggcctgtcggccgcgatccggctgaagcagctcaatccggagctctcggtcgtcgtggtggagaagggctccgaggtcggcgcgcacattctctcgggtgcggtgatcgatccagccggcctcgacaagctggtgcccgattggcgcgaggatgccgactgtccgctgaagacccaggtcacaagcgatcgtttctattgggcgacgtcgcagggctggttccgcatcccgaacttcatcatgccgccgctgatgcacaatcatcacaactacatcggctcgctcggcaatgtctgccgctggctggcgccgaaggcggaagcgcttggcgtcgagatctatccgggctttgccgccgccgaggtgctctatgacgacaagggtgcggtgcgcggcatcgcgaccggcgacatgggcatcgccaaggacggcacccacaaggattcctatacccgcggcatggagctcgtcggcaagtacacgctgttcgccgagggcgcgcgcggctcgctgtccaagcagttgatcgcgaagttcaagctcgacgccaactcggagccgccgaagttcggcatcggcctgaaggaagtttggcagatcgatccggcaaagcacaagaagggccgcgtgcagcatacgctcggatggccgttgaacgacaagaccggcggcggctcgttcctctatcactacgacgacaaccgcgtcgcggtcggcttcgtcgtgcacctgaactacactgatccctatctgtcgccgtttgacgaattccagcggatgaagacgcatcccgacatccgcgagctgttcgagggcggcaagcggctcgcctatggcgcgcgcgccatcaccgagggcggctatcagtcggtgccgcggctgaccttcccgggcggcgcgctgatcgggtgcgcggcgggcttcgtcaacgtcccacgcatcaagggcgtccacaatgcgatgggctccggcatgctcgccgccgagcacgttgcggccgcgctcggcgccggacgcgccaatgacgaagtcgtcgaatacgagaacgcctggcgttcgtcggcgatcggcaaggacttgttcaaggtccgcaacgccaagccgctgctgtcgaagttcggcaatttgctcggcatggcgctgtccggcttcgacatgtggtgcaacacgctcggcttctcgctgttcggcacccagtcgcacgccaagccggaccgcaagaccctggatgcggccaagcagcatcagccgatcgcctatccgaagccggacggcaagatctcgttcgacaagctgtcctcggtgttcctgtccaacaccaaccatgaggaggaccagccggttcatctcaaggtcgccgacatgaacctgcagaagacgtcggagcacgacgtgttcgccggtccctccaaccgctattgcccggccggcgtctatgaatgggttgaggaatcggcggggccgcgcttccagatcaacgcccagaactgcgtccattgcaaaacctgcgacgtgaaggatcccaacggcaacatcacttgggttcctccggagggcggcggcggtccgaactacgaggcgatgtgaggccaatgcggccgaccacatttgcgtgaggccatggcgcagctggccgcaacctccgctcggcgtctgccgggcggaagcggcccgattgcgccgtcggatacgtcgggacacttggaacagcggggagcggcgctgggatccggcgctttttgcttccgcatgcgaatatgccgggcccggtcacgataccgccatagtgggagcgtcttgcggtgtgccggctggatcggcgggtctaacggcctaatctgccaattgattcgtcatgggttgccttggggcgatccttgcggatagacgccaaaagcggcattgtcgctcgccgtgatgccgctgcttgggttcgcattttgagactgatcgcaagatcttggccggtaaatccatcttggctgtacatccctggagcaaggcgaccgtgatgctgtccacccgtttcaaccgcttgacgattgcccttctcgctgccgcggcgcttgccgtgcctgcgcaactgtcggcgcaaacgcccgaccatccgaccgacaacgccgcgcaattcccctccaagaacgacctgaaatcgctgaccacggccggcagctatctcgccgcccgccacgccagtgtcgagcgcgatgcggcctccgccgcggcattctaccgttcggcgctgcgcaccgatccgaagaactccgagttgctcgaccgcgccttcatctcctcgctcgccgacggcgacatcgaggaggcggtcaagctcgccgaccgcatcctgacccaggacaagtccaaccgcgtcgcccgcctcgtcgtcggtgtgcgcgacctcaagctgaagaaatacgccgccgcgcaatccaacatcaaccagtcggtgcgcggcccgatcaccgatctggtggccacgctgctgtcggcctgggcggcctatggcgccggcgacagcaagggcgcagtcgcctcgatcgacaagctgaccggtcccgaatggtatccgatcttcaaggacctgcatgccggcatgatctatgagctcgccggcaaggagaaggatgccggcgcccgcttcgagaaggtctacaagctcgacgattcgatgctgcgcacggtcgacgaatatgcgcgctggacctcgcgcaacaaggatgctgccgccgcgactgcgatgtacgaggcgttcgacaagaagctgccgcgtcatccgctggtgctggaaggcatcaaggagaccaaggccggcaagaagctgccgccgctggtcgattcaccgcaggccggcgctgccgaagcgctgtacggcatcggcgcgacgctgacccgccgcggcggcgaggacctcgcgctggtctatctgcagctcgcgctctatctgcagccgaaccatccgctggcgctgctgtcgctcgccgatctctatgaatcggtgaagaagccgcagatggcgatcaaggtctatgagcggatgccggcgtcctcgccgctgaagcgcaacgcccagatccagctcgccaccaatctcgacgccgcagaccgcagcgacgaggcgatcaagatcctcaaggaagtcaccgcggatcagcccaaggacatcgaggcgatcctggcgctcggcaatatcgagcgcggccgcaagaagttcgccgactgcgccaccacctattcgcaggcgatcgatgcgctgccggccggcagcggcgacaagaacgcctgggtcacctactactaccgcggcatctgcgaggagcgctccaagcagtggaacaaggccgaggccgacatgcgcaaggcgctcgagctgcagcccgagcagccgcatgtgctgaactatctcggctattcctggatcgaccagggcatcaacctcgacgaaggcatgaagatgatcaagcgtgccgtcgatcagcgccctgacgacggctacatcgtcgactccctcggctgggcctattaccggatcggcaattacgacgaggcggtgaagaacctcgagcgcgcgatcgacctcaagccggaagatccgaccatcaacgaccatctcggcgacgcctattggcgtgtcggccgcacgctggaagccaagttccagtgggcgcatgcccgcgacctcaagcccgagccggaagagctgccgaagatccaggccaagatcgacaacggcctgccggacgacacctcgaacgccgccgccgccgacaagaagaaggacgacgacggcaagggcggctgagccaaaaagagacttcacctctcccgcttgcgggggaggtcgcatcgcattcaagatgcgatgcgggtgggggctcgctccactcaaagatttcctctgcggtgacacccccaccccggccctcctccgcaagcgggagagggggaagaggcggaatttccatccaaacaaagggataggatcgtgcggcgatttacgctaatcgctcacaatcgttgttttttaggggtttatcgccgtgccggcgctgattgaagaagggcgtgccaaggtcaacctgacgctgaaggtgatcggacggcgcgtcgacgggtttcacgacctcgagagtgtcgtcgcgtttgccgattgcgccgatcgtctcacgctcgagccgggccccgagctgtcgctgacgatggccggaccgctggccgacgcctgcggcgatacctccgacaatctggtgctcaaggccgcgcggctgctcggcgagcgtgtcgtcgacctcgaggtcggccacttcactctggagaaggtgctgccggtcgcggccggcatcggcggcggctcggcggatgccgcggccgcgctgcggctgttggcgcggctcaacgagctctcgctcgacgaccgcaggatcatggaggtcgcgctgcagaccggcgccgacgtgccggtgtgcgtcgcctcgcgcgcctgcgacatgaccggcgtcggcgaaggactgctgccgctcgacctgccgaagatgccggccgtgctggtcaatccgcgcgtgccggttgcgaccaaggatgtcttcaacgcgctcggcctgcgccatggcgagctcctgatcggcgccaccgatatcgtgatgcaggcgccgtcctggccggaggccggccgcgcggtcgatgactggatcgcggcgctcggacgcggcaccaacgatctcgaagcccccgccgcgcggatcgagcccgtcatcagcgacgttttgtccgcgctgcgcgcgaccgcggacgttcgcttggtgcgcatgtcgggctccggcgcgacctgctttgcggtgttcgcctccgatgccgccgccgaggccgccggcgaacagctccgcgccgcgcatcccggctggtgggtgcacgcgggctcgctgagctgaaccctctcctcttcgtcattccggggctcgccgaaggcgagagcctggaatccattcgtccacgcgtgatgtggcccaatggattccgggctcgtgtggagcctgtcatcgtgcgcgcgttcgcgcgacccgttggcacgccccggaatgaccatgtcgcgacagacgtgtggcagtgagtgctcaacatactcgatgtcgtcccggcgaagccggtacccataaccatctatgctcattgtttgtgcgacgccgtggccgcagccttctttaacaactcaaccctgtggttatggatcccggccttcgccgggatgacacctgtggatgtggcgacatcgcgtcttcgccgggacgacatcctctctgccgcaccatcccaccgcaacgccgggcagcgttgcacccccggttgcttggcaagccaaaccccgtttgccataacaggatgaaacaacaacgttgcgcgtgcgggaccgttcgaacgaccgccggcagccaaagagccgggaggatgccatggccaatatccgagttctcgccaccgatctcgagtttcccgaaggtcccgtcgtgatgcctgacggctccgtcgtgctggtcgaaatccgcggccagcggctgacccgggtctatcccgacgggcgcaaggagatcgtcgccaaggtgccgggcggcccgaacggcgcggcgctcggtcccgacggcaagatctacatctgcaacaatggcggattctcctggatcccgaccaagaacatgatcatgcccggaccgcagccggcggattatctcggcggctcgatccagcgcgtcgatctgcaatccggcaaggtcgaaactgtcgtcaccaaatgcggcgagcacgagctgcgcgggccgaacgacctggtgttcgacagacagggcggcctgtggttctccgatctcggcaagcgccgcgcccgcgacatggatgtcggcgcgttctattatctgaagcccggcatgaacgagatcgtcgaggccgtgcacggcatcctgccggccaacggcatcggcctgtcaccggacgagaagaccgtctacatcgccgagacgccgaccgcgcggctatgggcttatgaggtctccgagcccggcaccatcaagccgcgcgacgtgatctatcgcggcgagcgcggcaagccgatcgcaggcctcggcggctaccagatgttcgactcgctcgcggtcgaagcatcgggcaatgtctgcgttgcgacgctgatctcgggctgcatctcggtgatcgcgcccgatggcaccgtggtcgagcaggtgccgaccggcgaccgcgtcaccaccaacatcgccttcggcggccccgatctgaagaccgcgtacatcacgctgtcgggcaagggtgaactgatcgcgatggactggtcgcggccgggattgccgctgaacttcttgaataaatgatcgcacctaccgtcattgcgaagagccaacgggtccgcgcgaaagcgcaacccgatgacaggctccgcgacgacttgtccgccgaagccttggcgaaggcggaagcaatccatctctccgcatatgtggatcgatggattgcttcgcttcgctcgcaatgacggttagagtgcagcccgtttcaacgtagaggatacaaaatgccctggcttgaaccgaccacccttcgcggcgcacatgcgcggctcgaaccgctgtcccacgatcatcgcgacggtctggtcgaagcggtgaaggatggtggtctctcgaacctctggtacaccgccattccgcaaccggagaatatggccaaggagatcgaccgcaggctcggcttgcagaaggccggatcgatgctgccgttcacggtgttcgacgtcgaaggccggatttcgggcatgacgacctacatgaacgttgatacgccgaaccgccgcgtcgagatcggctcgacctggtacgccaagcgtgtgcagcgcagcgcggtcaacacgcagtgcaaactgttgctgctgcaacatgccttcgagaagctcgattgcatcgcagtcgagttccgcacgcatttcttcaatcaccagagccggcgcggcatcgagcgtctgggcgccaagcaggacggcattttgcgcagccaccagatcgcgcccaacggcacgttgcgcgacaccgtggtttacagcatcatcgccagcgaatggccgacggtgaaggcgcatctcaattatcaactccacgaaaaggtgcgttgaccctgacgtcatcgccaagaaacgagacgatggaaacgttcgattatgtgatcatcggcgcaggctccgcggggagcgtgctgaccaatcggttgagtgaagacgcgggcacgcgggtgtgcgtgctcgaggcggggccgagcgactggcatccctacatccatctgccggccggcttcatcaagaccttccacatgaagagcgtgaactgggcctaccagcaggagcctggtccctacaccggagggcgcagcatctatgcgccgcgcggcaagacgctgggcggctcgtcctcgatcaacggccacatctacaaccgcggccagcggcaggatttcgacacctgggcgcagctcggcaatcgcggctggggttatcccgacgtgctgccgtacttccggcgcatggagcgaaggatcggcgagggcgacgacacctatcgcggccgcgacggcaatctcaccgtgaccacgatggactggcaggatccgctctgcgaggccttcatggccggagcggtctcgctcggcattccgcgcaatcctgattacaacggccagatccaggagggcgtgtcgtactgccagcgcaccatcctgaacggccgccgggtcagcgctgcgaccgcgttcctgcatccggcgcgccgccgtccgaatgtcgatgtgcgcacgcatgcccatgtcaccggcatcatcttcgagggcaagcgcgcggtcggcgtgcgctacaaccgcggcggcaagcacggcgatcccctggagatccgcgccaccaaggaggtcatcctctccggcggcgcctacaactcgccgcagctgttgcagctgtcgggcgtcggctcgcccgctttgttgcagtcgcacggcatcgaggtgcgccatgcgctgccgggtgtcggcgagggcctgcaggatcactacgcgccgcgctcggtggcgcgggtcaagaacatccggaccatcaacgagctgcgccgcggcttcagcctctggggcgaggcgatcaaatgggcgacgacgcggcgcgggctgctgtcgctgtcgccgaccatggtctactgcttctggcattccggcgagaccaccgagagctccgatctgcagctcaccttcacgccggcgagctacaaggaaggcgtgcagggccagctcgaggacgagcccggcatgacggttgcctcatggcagcagcggccggagagccgcggctatgtccggatccgctcggccgatccgttcgcgccgccgatcatccagaccaactatcttgccgaggagatcgaccgccgcgtcgtcgtcgccggcatgaagctggcacgccggctgctcgcctccgagccgctcaagccgtatttcgcctatgaggactttcccggtccgaaggtcacgagcgacgaggagctgcttgcggccgcgacccagcgcggcaccaccaccttccaccccggctgcacctgccggatgggaccggccgacgcgccgtgggcggtggtcgacgaccagcttcgggtccacggcatggagggcctgcgcgtgatcgacgcctcgatcatgccgcggatgatctcggccaacctcaacgcctcgactttgatgatcgcggacaaggcctccgacatgatccgcggcaaggcgcccgaggcggcggccaagctgccggagtatgcgtgaggcaagagccgggcgcggcgatgatcgttcagcgtcgtcccggcgaaggccgggacccataaccaccgatgcgcattgttgagcgcctgtgaaatgactagtcccgtcgacaatatccgccgcggagtatgggtcccggccttcgccgggacgacagtgtggggagccgttaggtcacgggaaagaagccagctcagccgtagacgaacgccttgtcctcgaggtcgatcgccgggaattcgtccttctcggcccagtagtcctggttgtgctgccactccggcttgtcgccgcgcttcggcaacaggtgcatgccgcgcatcatgtagccggggttgaagttctccggatcgatccacggcagcagcggcatgttgtggtcttcggggcgcagcgccggcgtcaccttgttcgcgccggtcgccttcatgtgcttgagcatacggcagacgaagtcggcgacgaggtcgacccgcagggtccagctggcgcggaaatagccgaacacccagacgaggttcggcacgccggtgaacatcatgccgcgataggtcacggtgtccttgaagtcgagcggcttgccgtcgatctcgaagtcgatgccgccgttggcggagaggtggaagccggtcgcggtgatgatgatgtcggcctcgagctccttgccggacttgagcaggatgcccttctcggtgaagcggtcgatctcgtcggtgacgaccgaggccttgccgcccttgatggcctggaacaggtcggcatccggaacgaaggcgatgcgctgccgccacggccggtagctcggcgtgaaatgtgtggcgatatcgtagtccttgccgagaacggcctcgaccgcggccagcagatccttcttggcgccctcggggtcggcgaaggtccgcttggtgaacgcgtcctgctcgaacaggatcttgcgcctgacgatctcgtggatccaatgctcgtcgacctgcagcctgcgcagctcctcggcgatctcgatcgcattgcggccggtgcggaaataggtcggcgaccgctgcagcatggtgacgtggccggcgtcattggccatcgccgggatcagcgtcgcggcggtggcgccggagccgatcacgaccacgcgcttgcccttgtagtcgaggttgtcgggccaggtctgtggatgcacgaccgtgcccttgaacttggccatgtcggtccactcgggcgtgtagccggcgtcgtggcggtagtagccctggcacatccagaagaagttggtggtgaagcgcagccgctcgccggtgtcgatgcgggttgcatcgatggtccacagattggtctcgttcgaccacttcgccgcggtgatggtgtggcgatagcggatgtggcgggcgaggtcgttttcctcgatcacttcgcccatgtatttcaggatctcttcagcacttgcgatcggcgcgctggtccacggcttgaagcgatagccgaaggtgtgcaggtcgctgtcggagcggatgccgggatagcgatgggtcgaccaggtgccgccgaaggtcttctgggtctccagcaccacgaagctggtgccgggggattgtgtggtgaggtgataggcggcgccgacgccggagatgccggcgcctgcgatcaggacgtcgaaatgctctgtggtgacgggctcggcggcgcggatctgggtctgaacgttcatcttccctggtcttcttgttggttggtttgttcgttgggcactggaagcaaaacgccggagccatcgccccggcgtctgccgattttgagactagacttcgcggcggctgaggaaggccagccgctcgaacaggtgcacgtcctgctcgttcttcagcagcgcgccgtgcagcggcgggatcagcttgcgcggatcgcgctccctgagcatctcgggcgtgatgtcctcgttgagcagcagcttgagccagtcgagcagctcggaggtcgacggcttcttcttcaggcccggcacctcgcggacctcgaagaagatccgcagcgcctcttccaccaggcgcttcttgatgccggggaagtgcacgtcgacgatctggctcatcgtgtcggcgtcggggaacttgatgtagtggaagaagcagcggcgcaggaaggcgtccggcagttccttctcgttgttcgacgtgatcatcacgatcgggcgcagcttcgccttgatggtctcgccggtctcgtagacgtggaactccatgcggtcgagttcgagcaggaggtcgttggggaattcgatgtccgccttgtcgatctcgtcgatcaagagcaccgggcgcttctcgtgggtgaaggcctcccacagcttgccgcgcttgatgtagttcttgatgtcggacacgcgggcgtcgccgagctggctgtcgcgcagccgcgacaccgcgtcgtattcgtagaggccctgctgcgccttggtggtcgacttgatgtgccaggtgagcagcggcgcgtcgatcgccttggcgacttcctcggccagcacggtcttgccggtgccgggctcgcccttcaccagcagcgggcgctcgagcacgatggcggcattgacggccaccttgaggtcatcggtggcgacgtagtccttggtacccgtgaatttcatcgatctgtttgccttgcttcgttcgtcggccgttcgggcctcaacatgaaacgaccgctgtcacagcggccgttcgggtgcaattttgtcggtcacgtgcgtctgatgaacgacacgatcaccagcacgatgaccgcgccgatggtcgcgttgatgacgtcgcggatagcgctgccgccgaggctgatgcccaaacgcggcaacagccagctcgccaccagcgcaccgatgatgccgacgacgatgttgccgatcagcccaaaacccgcgccgcgcacgatctgtccggcgagccagccggcgatcgcgccgatcacgagtgctgcaataatacccattcaaaccgcctcacgccgttctgcgtcaatgctccgtcacatacaattctagttgaaaaacccggccggtctagcgtggattccgcagcgcagcggtcccgggaacgctatcggtatggaatgtcgggcgtcatctttccgctccgcggaatgaccggccgcgttgcgcggcgcgcccggccgagtgcgactgtgcccggcgagcggacgtccaacccgggaggcaggtgaaagtggatggctgatcccgggatggagcacggcggggggcccttgacggcaccggcagggcgggcgatctaagtagccatgttcctgcagttcttcacatcactgcgcgacgcccaggtccccgtgacgctacgggaatatctgaccttgatggaagcgctcgacgccgacctcgccgaacagacggtcgagaacttctattatttgtcgcgcgccgccctggtgaaggacgagcgcaacctcgacaagttcgaccgcgtgttcggcaccgtgttcaagggattggagagcctgctcgacgccatgggcaaggcagagatccccgaggagtggctgaagaagctcgccgagaaatatctcaccgaggaagagaagaagcagatcgaggccatgggctgggacaagctcatggagaccttgaagaagcggctcgaggaacagaagggccgccaccagggcggcagcaagtggatcggcaccgccggcacctcgccgttcggcgcccatggctacaatcccgagggcgtacgcatcgggcaggagaagaaccgcaacaaccgcgccgtgaaggtgtgggacaagcgcgagttcaaggatctcgacggcaatgtcgagctcggcatccgcaacatcaaggtcgcgctgcggcggctgcgcaagttcgcgcgcaccggcgcgcccgacgagctcgacctcgacactacgatcaaggagaccgccaaccacggctatctcgacgtgcacatgcgcccggagcggcgcaacgcggtcaaggtgctggtgttcttcgatatcggcggctcgatggattcgcatatcgagcaggtcgaggaattgttctcggccgccaagagcgaattcaagcacatggaatatttctacttccacaactgcctctatgaaggcgtctggaagcagaacaagcggcgcttcaccgatcgcacgccgacctgggacgtgctgcacaagtacccgcacgactacaaggtggtgttcgtcggcgacgcctcgatgtcgccctacgagatcatggtgcccggcggctcggtcgagcatgtcaatgaagaggccggctcggtctggctcgatcgcatcatccgcacctatccgcacgcggtgtggctcaatccggtggcgcagaagcactgggactattcggaatcgaccaccatcatccgccgcctgttctccgagcgcatgtatccgatcacgatcgaggggctggagaacgcgatgcgggagctggtgcggtaaacgctagaggcgtcgcgcgccgccaggcacgccaacaacacccagggagagtcccatgccccagaacatccaccgcggcatcaaggtgatgatcgacgacgccaatgccgagatcgagaccatcagcgcggccgacgcgatcaccttgatcggcaagaacgacgtcgtgatggtcgatatccgcgacccccgcgagatcgagcgcgacggcaagatccccggcgcgttctcctgcacccgcggcatgctggaattctggatcgatccgaacagcccctacgccaagccgatcttccaggaagacaagaagttcatcttccactgcgccggcggcatgcgctcggcgctcgctgccaagaccgccaaggatatgggcctgaagccggtcgcccatatgggcggcggcttcgccgcctggcgcgaggccggcggtccgatcgaggcgtgggagccgaagaagaagggctgaacagcctcaggccgcaaggacatcagatcatgaccgttgccgacgatccgctcgtttcgaccgaatggctggccgcgcatctcggcgatgccaacgtcaagctccttgatgcgaccttcaagctgcccggcgtgctgccgctgccgaaggatgattatcttacagcccatctgcccggcgccgtgttcttcgacgtcgacgcggtgtcggatcattccaatccgctgccgcacatgttcccgagcgccgagcagttcggccgcgatgtcggcgggctcggcgtcagcaatgccgacaccgtcgtgatctacgacgccggcggctgggtcgcagcaccccgcgcctggtggatgttcctgtcctacggtcatcgcaacgtgcgcatcctcaacggcggcctcaagaagtggcgcgccgagggcagggcggtcgagagcggcgaggtgaagccgaagcctgcgacgttccacgcaagctacgatccgaagcgggtgcgcagcatcgagcagatgatcgccaatgtcgaaagccgcaaggagcaggtgatcgatgcccgcgccgccgagcgcttcgagggccgcgcggcagagccgcggccgggtatccgcgccggccacatcccgggcgcccgcaacgtgccctatagccaattgttcgatgccgcgaccggcgagatgaggccgctcgacgacctgcgcagatcgttcacgggtgccggcgtgaagctcgatgcgccgatcgtgaccagctgcggctcaggcgtttcggccggcgtgctgacgctcgcgctttaccggatcggcgtcaccgacactgcgctctatgacggctcgtggtcggaatggggccaagcaagcggcccgccgatcgcgaccgggccggcctgataaatgactcctaaagcatgatccggaaaagtgcgaagcggttttccgaaaagatcatgcttaaacaagaatctgaagcgcgatgacgattcaacctgatctcatcgcgctttagcgccgggtgagcggcaccagggtcggattgccgaacgggtcgagttgctgctgaacaacctgttgaaccggccgcacgcggacgatccgccgcctttccttgcgacgagccggcttgctggtcgcattgcgctccggcttcttcgcctcagtggctttcggcgctgccggttgttcgacgacaacttcgggtccacccaacgttgcgatcctggtggcggctgcgatggccccgggtgacggcagcggtgccggctccggcgcagccatcgcgggtgctgcggccgcgggctcgccggttgcggcgggcggatcggcaatcgcggtgaccttgggttcgacagcgaccggtgccagttcggctgcggcaggcgccggctgcgatgccggcgacggatccggggtcggaggctgcggaacgatctcggtcgattgcgccggcgcgagcgtctccacggcctgaggttcggccttggaggaggcaggcggcggcgcatcatctaccttcaccgcggcgagcttctccggctcggccgcaggctgggcctcggcaggcgccggtgcggatgcggccggttcggccggagcgggaacatccgtcgtcttgtccgtggccggcggatcgacccgcaccatggcaagcaccggcggggtctcgggctgctgcgcgaattgcggttcgggcggggccctgcgggccggaatgctggcgaattcctcatgcgccgcgcgaaacagcgcggcggccccgagcccgaacaccaggagcgatgtcgccagcacgatggcggcgaacaggaaacgaaggccagggagcatgggcgcgggttcccccttgtccgggagggtctttgatgtcgagggaacgcggtgaccacacagaaagccggcgtcgcggacgcgaatcaggccgattcgaagatatcgcaacccccggagactgtttgttacaaaatgcgcgtgattgatgactttgggcacgtggacaaacaatcccgacccatgagacatctttgccgcagcgttgacggcaaaatcacaaatgcccgaaatggcctggatttcgcggatttgtcttgaatgcgccgctatcttcctgcattgggccgttaacagtccggtgtggcttggggactattatagagcaatgatgatcaaccgcattctgacgatttgcgctgccacggctctcggcctggcgggaacctcgctcgcgcgtgcgcagcaggggtacccggctccccaaggcccgtcctattcggtcgcgccgcagccctactcgcagggcaacatgccggatttcgacgccatcaacgacgatgacgatgcgccgcgcaattcggccgcgctgccgccgcccggcccggtgatgtccccggacgacccgcgctacggccgtccgatgaatgcgcccgtctattccgatcgcggtgcgccgaccggtcccgtgatgtcgccggacgatccgcgctacggccgtccgatgaacgctccggtctattccgaccgtggtgcgccgactggcccggtgatgtcgcccgatgatccgcgttacggccgtccgatggggccgccgccggtgatctatggcgatcgtgggggcccgcaacaggctaaccgcgacaatggtgttcccgccgccggcgtgtcctatggcgacgaccgcggcggcatgcgtccgcccgagggcgtgaccggagccgtgccgcagcagcaagcgccggtcgatgccaacggcaagccgttgcagatcgcagcgctgccggtagacgagcagccggaagacggaccggcgcaactgccgccgaacctgcgtcgccaggaagtggcgttcgcgaccaaggagccggcaggcacgatcgtcgtcgatacgccgaacacctatctctattacgtcctcggcaatggccgggcgatccgctacggcgtccgcgtcggccgcgatggcttcacctggaccggcgtgcagaagatcacccgcaaggccgagtggccggattggcatccgccgacggaaatgatcgagcgtcagccctatctgccgcgcttcatggccggcggacccggcaacccgctcggcgcccgcgcgatgtatctcggctcgaccgtgtaccgcattcacggcaccaaccagccgtcgaccatcggcaagttcgtctcgtccggctgcatcggcatgctgaacgaggacgtctcagacctgtttgaacgcgccaaggtcggcacccgcgtggttgtgctgcccggcggcgcagccccgggaacgacgacggcttccgccgcgccgccgcccaacccgatcgcccccgcgccgacccaggcccaggccgcgccgctgcccggcacgcagccgacctcggtgcagccactgcccgcaccggtcacggtccgctaggccgacaggcaaaactcatcatgaaagaggcgcgcgaacagcgcgccttttttgttgccggcaggtccggtctcaggccagccgccgcggcggctcgccgcctttggtgaaggtgtcgatgcaggcgaccatctgctgataatgcgcctgcaggctctcgcgcgtcgcgtagccgagatgcggcgtgatcaccacgttgtcgagcttgcggagcgggtggtctgtcggcagcggctcggtcgagaacacgtcgatgccggcgccggcgatcttcttttcgcgcagcgccgcgagcagcgcgtcctcgtcgacgatcggcccgcgcgcggtgttgacgagataggccgacggtttcatccgggcgagatcagcggcgccgaccagtccgcgcgagcgcgggctgagcacgacatggatggtgatgatgtccgatgtcgcgaacaattcgtccttgccggcgtagccgacgccggcttccttgcacgtctccggcgtgaggttggggctccaggcaatcacgttcatgccgaacaccttggccatgccggcgaccttgctgccgagcttgccgaggccgatgacgccgagcgtcttgccctcgatctcggtgccggcaaaggtctgccaggcctcgccggcatgcatgcgcgcgttctcgcggccgataccgcgcgtcaattccaggatcaggcccatggtcaaaggcgcggtgggatcgcggctgtattgagtgccgcacagcacaaccttgcgttccttggcggcgtccatgtcgattgcggcgttgcgcatgcccgacgtgatgaggagcttcagcttgggcagcgcgtcgagcaggctcttcgggaacgccgtgcgctcgcgcatcgcgcagatgatgtcgaattccccgagcttggccgctgcttccgcctcgctcgcgaacggcttgtcgaacacggtgacctcgacgcgatcgctgattgcgggccagtccgccaccgaacgcgcgatgtcgaaatagtcgtcgaggattgcacagcggagccgcgtcatcgggaggtccattcagggtgagggcgacggcaaaaaatcaccgtcgggatctcctgatggtcgcgcgcaatcggggggcgcgcaagcggctgcggtttcaaaaagcggcgatagtcacgcggctcacggcttgcgcgttttcgcggtccggatatcggcgagcatcgatcggaccgccggcgacagcgccatctgcttggcgcggcaggccgggccggggccgcgcatatagtgcagttccgggcggtagggattgaaagccttggcgacgaaggcccgccagaaggcgcggaattcggcgaacggcgtcgcctcggccttgatcgccgggcgcgaaagaggtgcggatatgatggtagccatgacgcggcctcaactgtctggtcgcggttctgccgcgaaaagtcgccgttttcggcgttgcagacgagttttggcctgatttattaaaagatggtttcaattgtcgtgattccgcgcgcacatggccgcgaacccgtagtcacccgtgccgagcggacgaaacgtggtgaacggatggaaaacgcacgccccgcggttgcgctttcgggggccggccgttacatcggcggcagcaaaatttccacaaatcggatcaattccagggacagcggatggctcgccagttcatctatttcatgcagggtctgaccaaggcgtatccgacccgcaaggtgctcgataacatccatctgagcttctaccccgacgccaagatcggcgtgctcggcgtcaacggctcgggcaagtcgaccctgctcaagatcatggcgggtctcgacaaggaatataacggcgaggcctgggtcgccgagggcgcccgcgtcggctatcttgagcaggagccgcagctcgatgcctcgctctcggttcgtgaaaacgtcatgcagggcgtcgccaagcagaaggcgatcctcgaccgctacaatgagttggccgtcaactactcggacgagaccgccgacgagatgaccaagttgcaggacgagatcgaggcgcagggcctgtgggatctcgacagcaaggtcgaccaggcgatggacgcgctgcgctgcccgcccgacgatgccgatgtcaccaagctctcgggcggtgaacgccgtcgcgtcgcgctgtgccgcctgctgctcgaccagccggaactgctgctgctggacgaaccgaccaaccatctcgacgccgagtcggtgtcatggctggaaggccatctgcgcaactatcccggcgcgatcctgatcgtgacccacgaccgctacttcctcgacaacgtcacgagctggatcctcgagctcgaccgcggccgcggtattccctacgagggcaactactcgtcctggctggtgcagaagcagaagcggctcgagcaggaaggccgcgaggacgccgcgcaccagaagacgctggcccgtgagcaggaatgggtggcgtcgtcgccgaaagcccgtcaggccaagtcgaaggcgcgctaccagcgctatgaggagctgctcaagcaggcgagcgagaagcagacccagaccgcgcagatcatcatcccggtcgccgagcggctcggcgccaacgtcgtcgacttcgaaggcctcagcaaaggctttggcgatcggctgctgatcgacgacctcagcttcaagctgccgcctggcggcatcgtcggcgtgatcggcgccaacggcgccggcaagaccacgctgttcaagatgatcaccaagcaggagacgcccgacaagggcaccatcacggtcggcgagaccgtgcatctcggctatgtcgaccagtcgcgcgacgcgctcgacggcaagaagacggtgtgggaggagatctccggcggcaacgagctgatcctgctcggcaagaaggaagtcaactcgcgcggctactgctcgtcgttcaacttcaagggcgccgaccagcagaagaaggtcggcgcgctgtcgggcggtgagcgcaaccgcgtgcatcttgccaagatgctgaagtccggcgccaacgtgctgctgctcgacgaaccgaccaacgacctcgacgtcgacacgctgcgcgcgctcgaagaggcgctggaggatttcgccggctgcgccgtcatcatcagccacgatcgctggttcctcgaccgcatcgcgacccacatcctggccttcgaaggcgacagccacgtcgaatggttcgagggcaacttccaggactacgaaaaggacaagatgcgccggctcggccaggacagcatcattccgcaccgcgtgaagtacaagaagctgacgcggtgatctgaacgaggggggcggacgcggccaaccttggtgcgtccgaccgctgcttcatttgcaggatcgtgacggcatcgcggcgcaatctgcggccagttgtcgcttttcaagcgcgcgggattgcgtagatagagcgctcccgcaaatcgaatcctgcgagcactccaacatgtccgctatttccgaggcgcgcgcccccgccaagggccggtcgctgcgtcccgttcccatgctgatcttcggatcgcgctggctgcaattgccgctctatgtcggcctgatcatcgcccagggcgtctatgtcgtgctgttcctgaaggagctgtggcacctgttcgcccacgccttcgatttcagcgagcagcagatcatgctcgccgtcctcggcctgatcgacgtcgtgatgatctcgaacctcttggtgatggtgatcgtcggcggctacgagaccttcgtctcgcgcctcaatctgcaagggcatcccgacgagccggaatggctcagccacgtcaatgccagcgtgctgaagatcaagctggcgatggcgatcatcggcatctcctcgatccatctgctgcgcaccttcatcgaggccggcgcgctgtcgtcgggcaagggcacctacaccgagaccggcgtgatgtggcagaccatcatccactgcgtcttcatcttgtcggccatcggcatcgctctcgtcgacaagttgtcgaacgattcgatcgagggcgccaagcagcaggcggggcattagcgcgtggtgaaatgagatgaggttgaactggattggcagcggaggttcgcctctcccattgggagaggtcggcgcgtagcgccgggtgagggtttacggtctctcgttagagttgcggcccctcacccgatttgcttcgcaaatcgacctctccccactgggagaggtgaagcgagtgcgcagccaacgcgattcaatccaaatacatcatctacacgggatgttagcgttgcgtcatcgcgccgcgcgcgagccgaacaatgccggggcggatctgccgagccattcggggatctgcgccgcgccgcgcggaaatccgcgggccatggccaggatgaacgcggtctgccagacgccgaacagcaccagccagcccgccaggggcggcagcctgacgattgcaccgtagatggttccagccgcgacagcggcgatccaggtcaccacgacgctgtcgatccgcctgaacgcagggttggccagcagcacgccgagaatggtgattgctccaccgacagcgccgccgatgccgccgatcaggtaacccatcaacggattgttatcgagcgtctcggtgatccgcgccgggctcgcggcgtcgccgtccaccggcacggtcttggtgtattggccgagcgcctgaagcgtgatggcgctggcatcgtaggccgcgatccatgccacggtcgtgattgcgaccaccagcgccagctgaaatcggtccttcgcgccaaacacgacattgcaggtcgcgatcgccgcgccgaagatcacaccgggcaggatcgtgattccgccggcgtcggaggcgacgaacgaatattgcaggacgttgagcgcataggtcgtgaccaggctgcacgcgatggcggacgccaacgccagcacgaggaaggcgaggttcggccggtcgcgcgactgcgcgttcttggcttccagcatgcgatccaccgcggcccgcgtctcggcggcggcgctgccctggggttcgaggatcgtgaccgccttgagataggtcgggacctggtcgagcggggtcggcgccatcatcaccggcagcacgcgattgctcgggttcggccatttggtcttggcgaaggcgagctcgctcaaggtgtagcgccccctggtcaccgattccgggctgatcaggaacaccataaaatcgctgctttcgatggctttttcgacccgcgcatcgaagctgtcgcccggtgggagatcgtcatgcgaaaagaaaacgtcgtggtcgcaattgcgcagggactgagcgatgttgccagcctgcaattccaattcggagggaaatgacaaaaatatgcgcattgcaaaacttaccacccagaattgaattctgacaattgccgaatccacgtcgcaatgccggtttttgcagggtgagatcgatcatgagatggccagccaccattgtcgcatgcgcggtgctgctttgcgcgccgctgcaacggccggcatacgccgccgacgccgcgttcacccagttcatcgcctcgctgtggccggaggccaaggcggccggcgtgtcgcgtgaaaccttcgatcgcgagacgcgctcgctcgagcccgactacaagctgcccgatctgatcctgcccggacgtcccaagaccggcgcgccggcgcaggccgagttcgtgcaggtgccggccgactacatcaaggaggcctcgatcgcgcggctggccgccgaggggcagcggctgttgcagaagtatcgctcgtcgctcgacgcgatcgaaaagcggttcggcgtgccggcgccgatcgtgctggcgatctggggccgcgagaccgactacggccgctacgcgctgccctacgacacgctgcgcgtggtggcgacgcaggcctatgtcggccgccgcaaggatcagtaccgcaccgagttcatcctcgcgctgaagatcctcggtgagggcgtggtgacgcgcaaggagctgcgctcgtcctgggcgggagcgaccggctatacccagttcctgccgtcggagtactacaagcacggcgtcgatctcgacggcgacggcaaggtcgacatctggcattcggtgccggacgcgctcgcctccgccgcgcagcagctcgtcaacaagggctggcagcccggcgtgcgctgggcctacgaggtcacggcgccggccaatgccgactgcacgatgggcgtgcccgaagtgacaaaaccgatcagccagtggctgcgggcgggcttcgtgccggtgcgggggctgaggctcagcgccaccgagcaggcgcaatcggcctcgctgctgcagccggaaggcatctacggcccggccttcctgaccacgccgaactacttcgtgatcaaggaatacaatttctccgacctctacgtgctgttcgtcggccatctcgccgaccggatgacgagcccgcagccgttcgcgacgccgtggtcggcgtccaggcagctccgttccgccgatgtcgaggcgatgcagcagcagctgaccaagatcgggctctacaaggacaagctcgacggcaaggccgggatgcagacccgcgcggcgctcggcgcttatcagaagcaggccgggctgaaggtcgactgctggccgagcgaagcggtgctgcgcgcgatgaacgggcagcgctaaagcgggatgaattttggttgaataggcctggcgcggtcttgcttcacctctccccggtggggagaggtcggattgcgcagcaatccgggtgagggctcttgctctctcgatagaccgcaacccctcacccgatttgctgcgcaaatcgacctctcccaagggagaggtgaactttcgatgccgttccagctcaacccaatctcatcaggatttagggcatgatccggaagggtgcgaagcggttttccctcgcgacaaacgcggaaccgcgcgcgcgcggagatcatgcgcaaacaacgggcctcaaggacgaccgccgggattgtttcgcggcccagaaacaaaaacccggccgtgaggccgggttttcgagtgtgatgctgaaaccgtgtcggtcgatcagtcgcaaacctggacgcgacggaagcgccagccgtagccgtcccagaagcgctcacgaacccagcggcagggagcttcttcgacgtaaaccggtgccggtgcgacatagaccggagcaggacgggcgccagcaatcgcgccgccgagcagggcgccgccgatcaggccgccggcaacgccggccgcgatggcgccgccatcaccagccttggcagccggagcaaccgccagcgaaccggcaagcgtggtaacggcaacgagggcagctaaagtcttcttcatgtctttggctctcctggaaggtggtggcgtcgtggtccgacgccgggttttaggtgactcgcacgctgatctcgaactgctgtcttgctaaacagcgcagaacagtcaaccgaaagtaaacgtcggcaggctcatcgcgcagaaaagcggttttttctggccttctacggcagatgtcccggacaaacagtcggttttccgggacatctggtttgaattaatcgagatgaacggcgatcaatcgcaaacgcggacgcggcgaatgcgccaggtgtagccgtcccagaaccgctggcgctgccagaagcaatcgggaccgtaaccgggctcggcgacgtaggccggaccgggcgcgtagtagccatagccgggaccgtaatagccgttctgcgaagcgatcgcgccaccgacgatggcgccaccgatcaatcccgcagcgacgccggcggcgacaccgcgttgtgcctgggcgggggcgggcaccgccacagccgaaaccgccagagtggcggcggcgcaaagcgccagcaatgtcttcttcatgacctcacctttctcacgggggcagggacagcgtgcgttggcgatctgtctcgcctgaagggttccatattccgcttgaatgatcaatgaacgacgctgccgtattcgcgaccaaatgcttgcagcttttggcatatcttgcaacgcacaagcctgtagtgaagcagtgaaccggggggctgtggcgtgcgaagccggatttggccgctagacccgccaggcgcgcttcctattcccgaaagcccggctcggccgatttagattcattccaatatgaatcccgcatcagtttggaattgctacaagaacggctttttccttttgcatccggccgggcccgacaatatccatattgccaagcatcacccgttggacctgcctcctctgatgattgtctgttcctgtaacgtcctcagcgaccacgatgtccgcaatgccgtcaatggtggcgggtccgtgacacgaaatgccaagcaggtgtatggctgcctcggctgtagcgccgaatgcggccgctgcgcgcgcaccatcaaggcgatcatcgacgaggcgctcggtccctgcgccaaggcctgctgctccggctgccctcacagcggccacccgcacgccgccaacgaagacgccgagccggccgagttcgcgctcgcggcctgctgaactggctttaggttccgatccagcctcttccgctttgttgtcgtttcttcctgcgagccggcctgtccggtcggcggcaacgtttcgccccgccaaccaaatccggttatccacgcgccgcttccgcgacgggttgctctccccggcaatctgatttagaagcgttctaaatttacgctggccaacggtagccgcgacaggtggagtggatcaatgcaaggcgacccgaaggtcatcgactatctgaacaaggggctgcgcagcgaactgaccgccatcaatcagtattggctgcattaccggatgctcaacaattggggcctcctggagatgggcaaggtctggcgcaaggagtccatcgaggagatggagcacgccgacaaattcgtcgatcgcatcctctttctggacggcttcccgaacctgcaggtgctcgatccgctgaagatcggccaggacgtcaaggagatcatcgagtgtgacctcgccgccgagatcggcgcccgcacgctctaccaggaggccgcgacttattgccacggcgtcaaggactatgtcagccgcgacctgttcgagcagctgatgaaggacgaggaagaccacatcgacttccttgagacccagctcgacctcatcaagcgcattggccttgagctctacacccaaaagcacgtcggtcatctgaagggcgaggatcactgaccgcttggtcgctgcaaaattcgagaggccgtccttgcgggcggcctctttgcttttgcgatcccgattggcgcggcgacgtcagtagcaccgcgtgatgttgatggtgcggtcgccgccgcgtccgggcaccgtcacggtctcggtgggacagctcgacacataggggcgatccgacggcaccacggccggcggatagcggtgcgcccaatcccatggcacgtcctgggtgtaggtgtagcggacgtcgttcgaggccggcgccgggacttcggcgatcggagcggcggccagcgcgtcgtcgtaatatccgctcgttcccggcaacacgatgccgggcacccgcacatggtggcggaaggccgggtggtgcgcggaaaacgtgccgcgcggcgccgttccggatctcgcatcagtctcggtcgaggatgcaagcagcagtgctgcaacgccgagggacgccagcagcgccccgcctgttcgatatcttcgatacgccatgggcacgcaccaactcgtggttacggagcattgtgcggacgctaggccgcgtcgcgcagcgcccgcaaactcatccttaattattggttaaaaagtaaggttaacagggagtaattgtctcaaattgacgcgatctcgtgcggggctgcgcgcaatggctgcgagtcgcttcagacggcgtctgccggaacgaagcagctgatgatgatgccgccgcggtggtgcacgtaccacaccacggcctcgccgaccggattgccgcgatcgcggatcacggcgcgctccggcaccatcatccattcgccctcgatcggcacccaataggcgccgccccgaacatcatagttcgtgcgatggccgtcggagatgtcgcagcagggcacgccgttcggtgcgatcacgctcttgaaccaggcgcggatatcgggcggcacattgtcgtattggccgttgtcgaacgccagcgcagcgcccgccatgacggcgagccacgcgagcaccgcgccatgcgtcagccttcgcatcgcattcctccgcgaaaaccttgtgcgtgatccgcgcaacgcccgcgcgcgaatccggtgtttgcgcgattaggcacgaaccgcgcgcgggatgcatgctcaaagaatgagcgaagcagcgcagttgtccgtgatgcagtgcgagaggcgttcaggccggcttcttcgtgcgggcgccaacatcgatctcgccggcgcagcctatcacgtgccgcagacggtcacacgccggtcagatcgtagaatgccgcgatcagacgggtgatctcggtggagttcgcaatcaccagcgcaaggtcgtccttctccggcttaccggactgaatccgctccagggcttcgctcgattgcttgacgatcgcagcaatcctgcgcagcaggtcctcgcgggtcacgatcttgctcaggtcggtgctggtgtatttctgcaggttccgcaatctggtctggtcgaaaggctgcttgaatgcacgcgatccagcctgatcgaccaaaatcttgtaggcggaatcatatccctcttttgccgaattgagcgcgcgccggaccgcttccgggttttgttcggcgatgccgccgagtacgccgttgccggcggcacagttcgctcgcgccaggtttgagatcggctgggcgacctgcctgtcctgatcggcctgcctcgccttcgtgatcaaatcgtcgacggtgtcggcgagcgcgatgcggctggcgcccgcgcagcaggcaaccacgatgattgcgagagccgtcatccttcgcaccagcattgtcgcctcctacggtgtcttggtctgatcgcagatcttttcgactgccggcagcttgacgccaccgagcgcaaagccttccttgcgaaacttcgggcaagcctgagttgcgattgcgcgccaggattccagggagatgccgccgtgccggtagagatcgtagatgttggagaatttcgcatcatatagcgcggcataggattgcatcttgtcgggcggcgcgtcgatgacggcgcggaagaagtccgtatagtccgactgcatcttgtaatcattgttggttcgatagaagtcgatcgcattcatgatctgaacgatcgcgatccccgctccggcgactgcaacgacaagcgccagccacggaacgatccggtcctgcggacgcgccaatgccagcctgagggcggcgatctcgcgcgtcaaaccgtcgttctgccgctctgcttccttgagatcagccaaccgcgccacggcgaccggatcgaccagcaccgtgccgtcagcggcggtttcggtggacaagcgcccaccggcaatcatggcgtccagatcagcaatcgaaaatggactgagctgagcagcctggtctttggaaatgccgggcatcgtcgctccgaaatacggctgcgaggcaatgatcgtacaatgctcatgatataaatcgatttagagacaaccacaagacgaataagtgtcgaccgtgcttctcggctacattgctcgctgcggcgtgactcgcagcagctcctgcaattgaccggagtagaatttggcgtcgccggtggtgaggtggccgcgcgtctcgctgctcgccgggatcagatagatcttgccgttcttgatccgcttgaccgcagcctcggtgacgccggtctccggcggattgcgctcgtcgtcggccgcgttgatcgcgagcagtgtcgcctcgatcttctccatgccggcggagggatcgtaatcatgcgaggcttcccattgatagatgtagtcgttggcatcggcggtgaccggcagcgccagctggtcgtcgaccatcttgtcggcttgcggggccgatggcgcctgcgtctggtaggcgagcgtgccgccggcgctggcgaagcgataggcggcgatggcgtatttcatcatccgcggctggctggtgtaattgccgccgttgtagtcggggtcgttgcggatcgtgtccagcatcgtccgccgcaggatccagttgcgcgcggccatcgcagtcggctgcgaggccatcggcaccagcacgtccatcatctgcggatagcgcacgccccagatccagctgtgcatgccgcccatcgaattgccgatcacaagccgcagatgcttgatgccgagcccctcggtgacgagccggtattgcgcgtcgaccatgtcgttgtagtcgtatttcggaaagctcgtgcgcatcgcatccgacggcttcgacgatttgccgtgcccgatgccgtcgggaatgatgatgtagtatttcgccgcgtcgagcggctgccccgggccgaacagctcgccggcaaaggtcggcgtcagcatgctggcggccgagccgccggagccgtgcagcaccagcaccggctgtccggtcggtgcgccgaccgtggtgtagtgcagccgcagttccggcatcacctcgccgctgtggaacttgaagtcctttgcgatccactcgccatcctgaggcgcgggatagtctgcagccatgaccggtaccgctatcgagacgagagcggccacaagcgccgcgcacaaacggatcatgggcttctccctgcacatggcgggtttgtccagccgcctcggtgcaagcctaaagcatgatccggaaaagtgcgaagcggttttccgaaaagatcatgctcaaacaaggagctaaagcccgatgacgattcaacccaatctcgtcgcgctttagcatgatgcaagccactatccgagagttgcgccgcgcgctgcgtggtgccgtgccgaggagatcgcgttcgatccggcgcggcagccgcgtctcgcgtgtccctttgccgacgccgttctggcgcggctggtgcagatgcgcggcgttgcaccgcaccggtctgaactagactagcgcccgtcctcgacctcggtttccgggcggtcgctgccggaggcagtctcggtcagccatttgccgtccgcggtctcgtactggattgcctcggtgcgcccgggaacacgttgctcgttggccgcgcgccgggcggcggcaagcgccgcggcatgggttggaaacggttcggagaacaccccgtcgacagtataggcccagccgccatcgtgctggaccaccttgtagatcacgtggctcatccggaacctcgtttccatcgtggaccatggggctgccagaatagaccacgatgtcgtattttgcagcagccgatcgtccttgaggcgcaagccccgaaatgcgggcgagggagaccgacatgtgccgcaatatcaagacgctgttcaacttcgagccgcccgccaccgaagacgagatccacgcctcggcgttgcaattcgtgcgcaaattgagtggcttcaacaagccgtcgcagtccaatgaagccgccttcaaccttgcggtggccgaagtctccgctgctgcgcgaaaactcctgatctcgttgcagaccacggcgccggcgcgcgatcgcgaggtcgaggcggagaaggcgagggagcgctcgcgcctgcggttcggatgaggccagcgcattccgtgacgcaggtcacggtaagccgtcaggccaccgggcatcattgccgttcaccctggccccccggagcaacgccatgaagcctgccgccctgctcacactctgctcgattgcgttcgccgtgctctggacctgcggcatgctgtggtcgagcggcacgatcgacctcgccaacgtcgtcatcctgtcggcgtgcggggcgttcgcgggtgttgcctggtactacgcgatgcgctgggtgtttcagctgatgcagctcgcccggccctccgatcctccgggcgcccagcggtgagcatcgcgcgcgacaccgacatggctggccgtgccgtcgcgcgatgatcaggaggattacttcttgtccttcttgcggtgcttcttctttttcttgtgatcgccgtcttcgtcgtcatcttcctcgagatcgatgtcatcgacttcaagggcaatcgcttccgctgccgcgcgctcggcggcatcgcgttcggcctgctcggcggcttcacgctccttggtgcgcttgtagtcttcccaggcgtcgaagatcatgtgcagccacggcatcacctgctcgatcgacggcaattggccgggcgggccggcttcaccgcgcggaccggcgggaccctgcgggccctgaggaccggcttcgccgcgcggaccctgcacgcctgccttgccttgcgcccccggcttgccctgagggcctgccttgccttgcacgcccgccttgccctgcggacccggcttgccgcgcggaccttccggtcccgggcgccctggatgtccctgcggtccgggctttcccggctcgccctgacggccctgtggccccggcgctcctcgtgccccctggcgggaagttgtctcgtcagccactgatatgctccgtcgcgatgtgaagccgcttgtaacagaggttggacgacggcttcaattctgcccggcggcaccgatgcaagcgatcaacagtcataattccatgggcattatgacaacggaggacgcattgcgggttttggacggcagctacggcgacgaaccgcaatcgctcgacatcgtcgtgacgcggcaggatgtgcttgacgaagcaggctttcgcagcacgggcgtgctcgagctgtacgagcacttgtttcccgcgaacgagcgcgacagtcctgacgacatcgtgcgatggctgttgtcggatgacgtcggcgagaccaggtgtttcagcgtcgccggccaggagatgtcctatcggctcgactcgcgctgcttcatcctgcgcgccgccgggcgcgcgatcgggctcggcttctttacctacgatcacgcaagcgagctgatcttctgcaaccatgtcggcattgggaaggcgtggcgcggccgtggcctggcgcgcgcgttctatcgcgagatggtcgccatgctcgacgcgttgttcccgcgcaatgtcggggtggtgctcgaagccgagccgttcgaccgcgatcgcctggcagcgatcatcgccgatctcgagcaaacgggcaggcggccgctcgcggcgcatgagcaggatcagatcggccgcttgctgcgcgtgagctggtacgacaggctcgactattccgtgttctgcgacgcgcgcacgatgctgccgctcgcgtgccgctcgccgtgtctcgatccgtcgctgccggcatcggaatgggcaggaggcgaagaaaactactggttgatgcggcaggcgcggagcggtgcgtcctccgccgagaggcgcgcaagtgacctttggcaaaatgccgtcgccgcgatctacgtcgagatcctcgcgaagtccctcgtcgatgacgatccgaatggacggcgcgattattgggactatgcgaccgcgctggtggcccggacgatgcaacagaccgcgacgatcgacgtgcgtctcgcgcgctgcctcggtgacgaggacagcgctctactgtcgcgctggcggcgtcttgcgatcgatctctcgatctaaggcctaatgagactaggtggagctaaatcgacggcggaacttcacctctcccttgggagaggtcggcgcgtagcgccgggtgagggggtacggtctatcgagagcgcaagagccctcacccggattgcactggacgatgcttcgcatcgccaggcgcaatccgacctctccccgacggggagaggtgaaccaaggccgcgccgagccgactcagtcaaaactcatcccgctttggagccgctaggccgcggcgtgctcgctatgcggcacgtcgatgccgtcggcggaatattcgcgaatcttgttccgcaaggttcggaccgagagtcccagcacgcgcgcggcgcgggtgcgattgccgtcgcagcgcgcgagcgtttgcagcaccagttcgcgctcgacttcgtcgacggtcgcgccgatcagcaacgggacgatttcatttggagccagcgacggcagcagcgcttccggcgacggtacggtggacgcgtatgacatgaactcctcccgatcaacgcccgcctcgtcgatgaggcggagacatcgagaaccaactaccccgtagatccacggtgtgccggtttggttaacaagtccttaatgcctcgctaactccatgctttgtaagcaaaatacctagaaatcgccacgattgcggttccatccgtcacagtgtccggtagccgccatcgaccatcacgatcgatccggagacataggccgacaggtccgaggcgaggaagatcgcaggacccacgatgtcctccggcttgccggcgcggcccagcggggtgtggtccatgaacactttcacgaggtcgggattggtggcgcgcaccttctcgttcagcggcgtttcgatgaagccggggccgatcgcattgacgcgcacgccgtccttgccgagctcggcggccagcgccttggtgaagccaagcacgccgtgcttggaggcggtgtaggccggcgaactcggcgtgcgcagatgcacgaacgactggatcgaaccgatattgacgatgcgccccttgttcttgcgcagcggcgcgaggaaggaatgcgtcacgttgaagacgccggtgagattgatcgagatgatgtcctcccaatccttgatcacggcctcctcagtcccgagcatgccgttgcggcgtgcgatgccggcattgttgaccaggatcgagaccggcccgaccttgtcggcgacctgctgtgccatcgcgacgcaggcgttgcgatcggtcacgtcgagcgcgaagctgtccgccttgccgccggcactcctgatctccttggccgcttctgctgccgcatcgccgttcatgtcgagcagtaccacgcgcgcaccctcgcggccgtagcccaacgcgatggcgcgcccgatgcccgagcctgcaccggtgatgacggcgatgtgattgtcgagaagggccatggcgtttccttgttctgatttgagagcgttgccgacaacactattcaaaactgccccaaccgaaacgccaagccgtgtttgtgcgttgctgtcatccatattcggatgacggtacggaccgatcatggacccgcatatcagacactggaaagttgcgatcgagcgcttctgcgcggcgtctgatccggactatcgcgagatcgccaaattgatcgccgagatcgccatgaccgatatcgacgagacgctgcggcatgcggccgcacaggtgctgccgatcctgcgccaggcggcgctgaaaacggccgatcgccgcacgaggtcgatggcgctgcgccgtctcggcatcgtcagcgatgcgctgcacatgctgtcggcgccgcggttcggccggcgcggcttgacgccgaaggcgttgacgcaggaggagcgctaccggcaattgctcggcctgccgttcggccgccatctcgcggtgaccgaaatccagcaggcgttcaagcgcgccgccaagacgatgcatcccgacggcggtggcaatggcgccgcgttcctcgagcttgccgccgcgcgcgacgctttgatcaagcatcactgatgcgtcaagcatcactgatacgtaaagcatcactgacgcgcgatcgcatgacgtccgacagcacaagggcggacgacgcggtgttgccgcgtgtccgccccgcgcgcgatcggcgaatgctcagtacgagcaggtgccgttgttcaggagtccggttttgtagctgaacgcggcgtcgaaggtcggcagctcttcgctgacgacggcgaagttcgcaggccacggcgtggtcgggatgctctggtcccagatctggcagaagccggtgtcttgccagcggatcagatgatacggattggcgctggcggggctggccgctgcaagcacggatacggtggcggccatggcggcacaggcgatcgcaagacgacgcatgggaaatctccggtttgaaaaagtgaatgctccgcggggcaatccgggaactcgggggccgttcgccccggacatgcagtgagtgttgcaacctcgggaacaggttcaacgccgtcattgcgccaaattgtgcctgactacgtgctggctacagtcggcgtacggcgattcgggccggctgcgcgacgcgcgtaaatcgacgtgagcaaatcctgaggagactgcacatgaagttttcattgatccttcgcgccgcgctggtcgcactgctggcgttcaccggcgtcgccttctcgtccgcggcccgtgccgacagcggcttcgtgacgctcacgatctacaaggccggctggttcatcggcggctccggcggcagcggcgtgctgaccttccgcggccgctcctatcggctgtccaccggcggcctcgattacggcctggtgttcggcggctccaagaccgtgctgcgcggccgcgtcagcaacatcaaccgtccgtccgacgtcgccggcgtctatggcgcagcgggtgcggggcttgccgtcggccgcggcgcgcgcgcgatcgtgctgaccaaccagaagggcgcggtgctggagctgaccggccaccaggtcggcctgatggcgaacgccgatctgagcggccttgcgatcacgatgcagtagggttgacggtgtggagcggggccagcgacagctgatcgtcgagcccagcccacatctgcagcttaggtggacgcgatccatttccgtcatccccccgcaatggcatcgccattgcggggggacttgtgaactggcaccgtaacagcggcgaatgcccgggcaggccgagcctcggcagtcgccgatcatttccaaaccgttccatgcattttccggcgtctgtctcgcgtcccgggaacaagtgttcactttgtaacttaagactcgtgcctcacgggacgggtctgatgagtgcaataagttcgcaaaacgaagagatcgaaaagctgccggccaagctgtgccgctgccgcaggcagccggagctggtccggaccatgctcagcgtgcagacgggccggcacgtccgcatgttcgaatgcagatgcggtgaacgcatttgggacgatgagagccgcttcgattgggcggcctctccacgaggcgaacgacagatcggctgatcgccagacggccgcccggcggacgccgggtaccggccgaaaagccacgggccgaaacaaagcggccaatccataggaacgattgcgggtcgggaaaattaggcgagggtggatgcgttcccggcccccaagttggcgcattcactttcagtcccggcgctcctccccggagtgccgggacttattatctgttatttggcaacggcttcgccgacgagcaactcgccgaccgcgcaaaagcgtggcgccgctgagccacgcggtcggcgtattcccttcatgccgcggcgtgcaatgcgcctggatcaccgtccgctgataaaatccaaagcacgtggtccagcctccccgacgcatcgttccaatacaagaaggccgccgggcagggcggccatggtgtccgcattgttgctgtccgtcggccgctccgttgctgagttacggtgacggtgcactgaacgtttcgttcgcgatctggtgcgccgtcaccgcaatagcgatcactccgacagacctcagcttgccggcatcagcaccgaattgacaacgtgaatgacgccgttcgactgattgacgtccgggattgtcacggtcgctgcgccgcctttggcgtcgacgatcatcaccttgccgccggtcttcctgaccgtcagcggctcgccctcgaccgtgatcagggtctgtccgtccatcagctgatcggcgttcagcttgccgggaacgacatggtacgtcagaatcctggtaagcgtcgccttgttctcgggcttcacgagtgtctcgaccgtccccttgggaagtttgcggaacgctgcattggtcggtgcgaacacggtaaaaggtcccggtcccgacagcgtgtcgacaagccctgcagccttgaccgccgcgaccagcgtcgtgtgatccttcgaattcacggcgttggcgacgatcgtcttcgacggatacatcgcagcgcctccgaccatcacggtcttttccttggccgaggcttcaggcaatggacctgcaaatgcgatcagcacggcagtcgcggcagagccaagcacggaaagtttcatgtgagcgtctccattcgtgaggtcgggcattgcccttttgcaatcgatgcgatgtgtacgaggcgcgccacagtcgaatggcggtgtaccatcgcgcgaaaatcaggacgcagatcgcgccttgacttcacgtggaacgctgcctgcatgcttccggatcaccgttcgcagacaaattccgaaacgggtgatccagcctcctcgagccatcgtttaaccagcacggaaccgtcgggaagggcagtcatgatgtctggcatcgtgataggtcgatcatgaggcttggaaggctggtcttgttcgtcgtggcggtgctcggggccggttttgccatcgggtacctgaacaggcccgatgcctggtacgcagccctgaacaaggctgcgttcaatccgcccaactgggtgtttgctccggcttggtcgatcatctacctgttgatcgccatcgcgggctggcgtgtttgggagcggggtttgcgcatcagccggcgaatctggctgacgcaactggctcttaactttgcctggtcgccgatattcttcagcttccaccggcccggcacggcgcttgccgtcatccttgccttgttgtccgcaatcgtcatcttccaggtcacgacgtggaaggcagacaaggtcagtgccatcctcttcgccccttacgcgtgctgggtggcgttcgcctcgctgctgaatgtcgagatggtccgcctgaattagcggatttcacacttccctggcgcaccgaagccactccgtgtaggcctcgccccagctgggcgggcggccatgatagaaatgatggacacggccggtgccgagcgacctgtggttcaacatcgcccttcgatgcgcgccgtccctgatgtaagcccgcatgctgttctcgtccgtccacaccgtgacggtgtggtaatagtcgttcgcgatccttgccgacacggaaacgttgcccggcgcccggcgtgcctgcgccaggcatctgagcgtatgccaccagaacggcaccagcttaatccggctggccggcttgaaccctgtaacggaaacgaaaaccccgatcatcgatcatccgtgaacacgatcgcgatgcggccgacatgcgggcatcggcgaatacagcatgggagacgatgcagatacgccatggatcggcgtttggatcaccaggtcctgcaaagccgccgggatatcacggcatcgatgcaggccagtgccgtattaaggtggcatctcattggcgatctggagctttgtcgagcgaagtgactaccggcttgcgtgaagaaagcccgtcaaaacaagaatctagagccccgctccgattgcatcggaacggacggctccaggggccagcattgcgaccgggtgatttcggaatattggaaatgtatccgtgagttgcccgacgtgtcaagtcgagcgccggcccaccgccggctactgtgcatggggttgttttcgatattttgtctagctgacggcgtgagccggctcggtccacgcagggacggcgcagcgttcacctgaacaaatgcagcgccgcgtactgcagcagcatgatggtcttggcgtcgacgatccggccatcgctgatcatggcgagcgcgccgtcgatcgcaagctccagcacctcgatgtcctcgccctcgtcggcgagcccgccgccgtcgctgatccgcatcgccgcgtcgtattcggcgacgaagaaatgcagcttctcggtgaccgcaccgggcgtcatgaaggcttcgaacaccttgcgcacgtgatcgaggcggtagccgatctcttcctccgcctcggcgcgaatccgcgcttccggcgcggcatcgtcgagcatgccggcggcggcctcgatcaacagatcatcatagccgttggcgaaagcgggatagcggaactggcgcaccagcaccaccgtgcgggtgccgagattgtacggcaacagcaccgcgccgttgccgcggtcgtagacctcgcgtacctgggtctgccattcgccgttgctgcggcggtagtcgaatgtcgcgctcttcagctcgtagcggcgcttcgacagcagctcgacgtccttgacgcggacgcggtcggcgatgctcatgcgtcgaaccccaattcgctcacggcgtcgcttcgcggccgtcgagccatttggccagcattaccgaggtcgattcctcatagccgagcgtctggtagaacgcgctcgccttggcgttctcccgccgcaccagcaattgcagcttcggcacgccggcggcacgcagccagtcctcggctgcggccatcatgacgcggcccaggcccttgccctggcgggtggggtcgaccgcgacgtagtagacccagccgcgatggccgtcatgaccgaccatcgcggtcgcgacgatcgcgccggcgtcgcggccaaccagcacggcagaactcggtccgcgccgtgccagcgcgatgtcggcagcgggatcgttccacggccgcgtcaggccgcaggcctgccacagcgcgacgacgccagcgatgtctgcatcggtgattggtgcaattgcgagggaggcggagggcattttcgtctgcacgttcacagcaccttgcccgggttcatgatgccgagcggatcgagcaacgccttgacctgccgcatcagctcgatcgcgaccttgtccttgacgtcgggcagttcgtcgcgcttgagcacgccgatgccgtgctcggccgagatcgagccgcccatccgcagcacgatctcgaacacgacggcgttgacgtcgtgccagcgcgccaggaagtcggccgcgttggcgccgaccggctggctgacattgtaatggatgttgccgtcgccgagatggccgaacggcaccggccttgcgcccgggatcagcttcaccactgccgcattggcctcttcgatgaacgcgggcacagcggcgaccggcaccgagatatcgtgcttgatcgagccaccctccggcttctgcgccgccgacatctcgtcgcgcagcttccagaacgcctggcgctggctcagattggcagcgatcacggcgtcgtcgacgatgccgtcctccatgccctgggcgaggatcgcctccagcgtgtcgcgcgcgtcgtcgcgcgacgacgacaattccatcagcacgtaccaggggtgcttgctttcaagcggatcgcggatgtcgatgccgtggcggatcgagaagtcgaccgcgatgtcggcgagcagctcgaagctcgtcaggctgccggccgcctgatcgcgcgagatcgacagcagcttgagcgccgccgcgggcgacttcaggccgacataagcggtctcgaccgcgcgcggccgcggaaacagcttcaaggtcgcggcggtgatgatgccgagcgtgccttcggcgccgatgaacaggttgcgcaggtcgtagccggtgttgtccttcttcagcttcgacagcgcgttcagcacgcggccatcggccagcaccacctcgagcccgagcgccatctcgcgcgccacgccataggcgagcgcgccggtgccgccggcattggtcgaaaggttgccgccgatggtgcagctgccctcggcgccgagcgacagcgggaacaggcggtcgacgtcggctgccttctgctgcgcgatctgcaacaccacgccggcctcgcaggtcatggtgttggattcgacgtcgatgtcgcggatcttgtcgaggcgccgcagcgacaccacgacctcgccattgtgcggcgtctggccgccgaccaggccggtgttgccgccttgcggcaccagcgcgatcctgtgctcgctcgcaagcttgcagatcgcggcgacctcagtggtcgagcccgggcgcagcaccagcggcgagcggccgtgaaacaggttgcgctcctccgtggtgtaaggctggatgtcggcggcgtcggtcaccgcatatttctcgccgacgatggcgcggaatttttccagcaattcgggcgggagcggcggcaccgctgattggacgacgttcattcttcttggtctttcactttgatcgggaatctttgtttcagcatgacctcaatcggaaaaccggttcccacttttccgggtcatgcttaccgtccaaccgctgcgcggcgcagccggtcattgatggcctcacccagcccgtcctcgggaatgggcatcacggcgatagcatccgcatttctcttgtcgagcgtgcgaaggtagccgaacaggttggctgcagcctcggcgagatcgccgcgctcggacaggttcatttccaccgaggcgcattcgcgccgcgccaccttggccggcccgaacgacagcaaggcttcgccgacatggacgtcgctggcgttgagccggaccggggttcgtggcgcgtaatgcgaggcgagcatgccgggggcgaccggctggccgtcgctctcggcgtcctgcggcggcgactgcagcggatggccgagcacgcgttcgatctcggcgcgggtcagcccgcccggccgcagcagcaccggatcggagaagcagccgacgatggtggattcgacgccgaccgcgaccgggccgccgtcgacgatcatgtcgatacggccagccaggtcgccgttcacatgctcggcggtggtgggcgagacatggccggaaagattggccgagggggctaccacagcaccgccgaaggccttgatgatgtcgcgcgccaccttgtgggccggaatgcgaatcgcgacggtatccaagccggcggtcgcgagttccgcgaccgggcaggacagcgccttcggcagcaccagggtcaggggaccgggccagaacgcttccgcgaggcgcagggcctgtccgtcgaacagggcgatccggcgggcggcgccgagatcggcgacatgtgcgatcagcggattgaaggccggccggcccttggcctggtagagccgggcgattgcagcggcgttgccggcgtcggcgccgaggccgtaaaccgtttcggtcggaaacgccacgaggccaccctcggccagaaccccggcggcggtggccgtggcggcggcaccggctggcagaacgtgcgttttcaggcttgtatccactgtgattagaatcctcaattcggtgccttgcggtccccgaaacccgacgctataagccggacctcttagtcggagtgtggctcagcccggtagagcactgcgttcgggacgcaggggtcgcaggttcgaatcctgccactccgaccatccttccaagcacttatagtttctgtgttttttgtgcgcaacgagatgcgcatcgatttggagcgcggcagccatgccgggctgtttcgggacgctgtccctgatatcggggggtcctgacaatcggagagcgtgaggggaacggcccttgacgtggtgttgcgtagcacgtcatcaagcaccacacggcctccctttggacctatcagctgatcctgaccggcatcaaagcacgaatagcccttggcgagtagtgctcagcttgcggcgcaaggccgaatttgtcttcttcaggggttgccgacctcaaaggccaacaggacgttgcccggcaacccactccactgggcgtagccggaattaacgtacagcatgccgtccacgacgaccggtccggggccgtccatggcgccgccatggcccggaacgccgttgaccgtggtgtactcgcgcgcggtgtcgaactcccaaagcagctttgcgtcgtcggttgcgtaggcacgcaggaagccgctcacgccgcccgagaacacgacgccgggaatcgcggtgaccgccgcggagagggccggactgcattgggggcggtcgccgtaggcgaccggcgccacctgcatcgcgatcttcccggttgccagatcgagtccgaacaggccgccgccttcgcttgaattgagccgtcgcgaaccgtccatcagaaaccgcacgtcggagttggcgacatagatccggtcctggtcggcggcggagccccattcggtcccgcccagcgggccacccttgccgatccgcgtctgccacaggatcttgccttcatggtcgggatccagcgcgtggaccacgccggatttctggccgatgacgagctcgcgatgtccgtcacgcaaattcaccaggatcggcgattgcccgaagtcatgatcgggaccgcgatcttgcggacagttgctctggtcggtgccgaagcacgcgacgacgaagctgtccttcggcgtggcctgctgatgccagagcattttgccggtcgaaagatcgaatgcgaggatggcgtcgctggtgtcggttgccgggtcggcatagctgttcgacgtcgcgacatagagtgccttgcgctgaacgtcgatcgtgggggcggaccagaccgacgcgccggccgggccgaacagctgggtcccgatcgcattcgtcctggtcggatgcggggcgtcagcaatggtataggtcttccagatctgcgcgccggtctcggccttcagcgccacgacgctgccgcgaaacgtgcagcattggtaggtcgggcgagaccccgtcgcttcctcgatcgatgacacgccgacataaacgacgccggaatagacagtcggcgcaccggtgatccgggcggccagatgatcgtcgaccttgctcttccagatcagcgcgccggtcgttgcgttgacggcgtagacgttggcgcgcacatcgccaaagacgatcgcggactgaccgttgtccagcggcgcgaggctgatggctgtacggaccggcgcctcggtcgggaacacccagcgggtgcatctgcttctggcgtcgagcgcgtggaccttgcggtcgccgccgccgacgaacagcaagccgccgaccacggtcggctgcgcgttggcgttggacgtctcagaaaatccaaaggcccatttcagacgcagtcgggggatctggtcttgcgtcaagccggccatggctgccggctgaaaccggctgttgttgagatcggcgccccagccgttccatcgtggcccgtcgaccgcccggggaaagccggcctcgctctgcgcgcattggcctgcgttcccggccgcggcctgcgaagcggcctttccggtgacgagcgaggcgatggccgtccgctcgtcactggtcagtccctgcgcgaaggatgccatcgcgcccgtggtgatcgcactgaggacctcgtcgaacgaccttgattgcagcgcggcgcggctcggcgcccgaatattggtgtcggtgccgtcgtgacactgcgcgcagcgctgtgcgtagagggcagcaccgccttgctgcgcggtcgcagggaggcatgaccagatcaggacgacggcgatcgcagcactcagtttcatcgtgtttcaccggcgccagtgcttgatgaggtgagagcgatcgaagcgtagcacaggcctggcggttgtcgtcgcgcccggcggaggcggcggcgtcgaaacttgtggcgcagggcctggtcgcagtccgcgggcgaagccaggaatcgcgaccgggccgcccgcaattcaaggcccgccggcgcgatctcccattgacaggtcgtgcgatgtgatagaattataacacaataagttgcaaaaataacaagatgtcatcatcgcatcagcgttttgcgcgggcgacgggaggaaatggaattgtccggttcgatcgcggcagagcctcggccgtcgacgtcgcttttgatggtcggtggcatcaacaagcgctttggcggcgtgcgggcgctgcgcgacgtcaacttcgaggtccgggccggcgaggtgcatgcgctgctgggcgagaacggtgccggaaagtccacgctgatcaagatcctcagcggtgtccatgcggccgacagcggcgccatcgagatcgccggcaatcctgtgacgttcgacagcccggcaagatcgcgcgaggcggggatcgccgtcgtctatcaggacctcagcctcgtcgaatcgctgagcgtcgccgacaacctgctgctcggccgcgagccgcgcgcgcggttcggctttgtccgcaagcgcgaactgatggccagggccgaagcgttcctgggcgagctcggcattcccctggacacgcgcgcgacggtcggttcgctgccgttcgcgtaccgccagatgacggagatcgccaaggcgttgatgggcgaggtgcggctcttgatcctcgatgagccgacatcctcgctgacctcggatgaggtccgcatcttgttcgatgcgatcgggaaggcgacgcgacgcggcgtcggcgtgatttatgtgacgcatcggctcaacgaggtcttcgagatctcgcagcgtgtcaccgtgctccgcgatggcgccaacgccgggaccttcgtcaccgccgataccgacatgaagcggctggtgaatgccatcatcggcaccgatcgattggcgcccgcggcgtcgcgcgccgcgcccgcggcagcgcgcgcgctcgatccgtcgccggtgctgtcgctgtctgatgtctccaacgaccggctgtcggccgtcgacctgtcggtgatgcagggggagatccacggccttgccggattgatcggcagcgggcgcacggagattctggagacgatcttcggacttcgtccggtcgagcgcggcgcattcgagatcgagggccggccatggctgccgaacggcccggccgatgcgatcgagcgcggcgtcgcgctggtgccggaggatcggcacgtgcagggccttgtgctggatcattcgatcgagcgcaacatcacgttgccgcggattccgcatttctcgcgctggggtttcttgcagcagcgcgccgccatcaggcgcgctgaggctgcggtcgcgcggctttcggtgaaggcgcagggcgcctccagcctggtcaggacattgtccggcggcaatcagcagaaggtcgtgttcgggaaatggaatgatccgcggccgcgtgtgctgctgctcgacgaaccgaccgtaggcgtcgacgtcggcgcccgcgaggaaatctatggcgtgatccgcaacgctgcccgcgacgggagcggcgtcctggtcgtctcatcggacctcgtcgaactgatcgagctctgcgaccgcatctcggtgatcgtcgatggacgcgtggcgcgaacgctgaagcgcggagagatcgtcgatgccgaagagctccatcatctcctgcagatctaccaggctaccggacaaggcgaattgcaagagctgcccgcatgaccgaactgaccgcgcccaatgtcgtcgccgagccgagccgatccgatcgacgccgcaagctgctgcagagcctgctgcgcggcgagcgtccttacatgctgtacatcgccttcgtggtgctgctggtggtgttcagcctttcatcgccctggttcctctcggtcgacaatttcctgaacatcggacgccagacaacgctggtctcgatcatcgcggtcggcatgaccttcgtgatcatcgcgcgtcagatcgatctctccgtggcatcgactttggcgctgtcaggcatggccgcggcgctcgccatgagccagatcagcaacagctggatcgtcggcgccgccgcaggtctcggcaccggcgcgctggtcggattgctcaacggcatcctgaccacgcagctctcaatcccgtccttcctcgtcacgctcggctcgttgagcatggcgcggggcctcgcgatgatggtcaccaacaccaagcctgtcatcatcaccaacgaggcctatttcgcgatcttcggcgaagggacgttcttaggcatccccgttccgatcgcctggacgctggcggcgatgatcgtcggcatcctgctgctgcactacaatgtgttcggccgccgcatctatgcggtcggtggcaatccgactgcggcgctctattccggcatcaacaccaaatgggtgacgaccgcggccttcgtgctgaccggcgcgctggccgggcttgccgcgctggtgctgtcggcgcgctcgcatgccgcgcggcccgacgtcgtgcagggcatggagctcgatgtcatcgccgccgtgatcctcggcggttgcagcctgttcggcggccgcggctacatcctgggaacgctgttcggcagtctcatcatcggcacgctcaacaacggcctcgtgctgctcggcgtcagctcgccgatgcagctcgtcatcaagggggcgatcatcgtggcggcggtcgcttttacgaaacgctagtcaggatgcggcgtcggggccgtaaggcccccgcgttgcggcagtaggggcaaggtcgccggcctccggtcaatcggcgaccaaaaagggaggaaacaatgaagccaatcttgcgacaaaccctgccgctgaccgcgctgatcgcggcgacggccatctcgatcgcgccctcggctcgcgccgaagtgccggcaagctgcgtcaagggcgtcgaccttgcgacgcttggaccgaaatcgatcgtcgggcaggggccccacggcgagaaggccgcgtcgcccgaggtgctcgcgctgtcggatgccgacgccgccaaggtcaaggagaagcatttcaaggtcggcatctcgatgcagacggtcaacctcgactgggcgcaactgcagatccagggcatcaccgatacgctgaagaagtacggcgtgacggtgacgggtgtcgcgtccgccgagtatcaggtcgacaagcagatcgccgacatcgagaacaccatccagcagcatcctgacggcatcatctcgatcccggtcgatttcaccgcgaccgcgccgacttacaagaaggtcgccaaggccggcatcaaactggtgttgatggacagcattccgaccggcctcaagcatcccgaggaatatgcctcgatgatttcggcggacaatctgggtaacgggcagatcgcggcgcagatcctggcctcctgcatggcgcagggcgccaccatcggcctcgtcaatttcggcgtcgactatttcagcaccaacgagcgcaccaagggcgttcgcgagtggatgcagaagaaccggcccgacatcaagatgaagcaggtcgacttcaccgatccgccgaaggtgtcgcagatcgcgggcgacttcctcaccggcaatcccgacgtcaagggcgtgtttgcggtctgggaccagccggcgctcgatacgctgagctcgatgcgggcgcagggcatcgacattccggtcacgaccgtcgatctcggcctgcaatcggcgatcgagatcgcgaaaggcggaccactgaaggcgaccggatcgcagcgtccctatgaccagggcgtcgcggaggcgctggcgatgatgaacgcgctgcttggcaaggagacgccggcctgggtcggtgtgcagtcgctgccggtgacgcagtcgaacgtgctggaatcctacaagacggtgttcaagaaggagccgccgtcggaactgaccgacgcgtgcaacaaggcgaagcctgcctgcaactgatctttggccagcgatgcgcggtgtcgcaacggcgcgcatcgtggacaaagctgacccgggcgagccagcccccgcccgggtcagattgcgctggtcacatattcgaccggaaggctgcggaagtgtttgcgcatgtccgatgacgccgcgccgccgacgatgatccgcgagaacgcgccgatatcggaaaagaatgccgacttgagactgccgagcttgctggcgtcgatcaccaggatgctctccatcgcggtttcgatgacggcctgcttgacggcgacctcgtgaaaattcgagcagctcgcaccgcgggtccagtgcacgccgccggcggaaatgaacgccttgttgatgccgagccgccgcagataggacagcccgtcgtccgacgcaaaggactgcgaagagggatgatagagcccgcccatcagcatcacctgcgtgccgggcctgtgcgtcacgatcgacgccacgttcatcgaatagcagatcaccgagagcggcagatcctcgggcaggcagtccgccagcgactgcatcgtggtgccgcaatcgatgaagatcgtatcgccttccttgatcgaggcggccgcggcccggcaggcgagacgcttgtcctgggtgtgctggtcgatctcctgctcgaacgtgtacttgatcccggtcggcgatgccgcgttgacgacgtagccgccgagcaaagcgagggcagcctccgcgccggcaaggtcacgtcgcaccgtcatttcggagaccttgagcagttcggcggcgtccttcaagtgcagcgcaccactcgattcgacggcgcggcgcagcctctgcaggcgctggacgcgtgtctcgcttggtcgtgcgttaggggtttcagccatttttgtcgccgagcttgcttatctgattgacaatgatcttacaatgttgtgagtttagcaacgtcgatttgttacaataataacatccagtttggcggcgcatctgacgtcgggacgatgtcgttcctctccaggtggcaagcccagcggcaaggtcaggggaggatcacatgttgcgatcgacacattcaatttatctggcgatctcgtcgattcgctaggaccgcaggcgcttccatgacgcagagcgtcttcatgcagaatccgaccgcactgaccgcggtgccgccttcgcccgacggcgggcagtcgcattcggccccgcgcaacagcggccgcgcgctcgacatggattgggtcgacgaaatcaggatcaatctgtcggccgcagaacggcgggtcgcgagcctgccgggccgtcggacggtcaagaaggatgcgcaggcggcgtggctgctcaaggcggttacctgcatcgacctgacgacgctcaacggcgacgataccaccgaacgggtgaagcgcctctgcgccaaggccaaggcgcccgtgcgcggcgaccttctcgagcggcttggctttgccgagcgccagctgcacaccggcgcggtctgtgtctaccaccggttcgtcggcgcggctgtcgaagcgctcgctggatccggcatcccggtcgccgcggtctcgaccggatttccggcgggtctggtcccccacgaactgaagctgaaggagatcgaggcgtcggtccgcgacggcgcgcgcgagatcgacgtcgtcatcacgcgcgagcacgtgctgaccggcgactggcgggcgctctatgccgaggtccaggacttccgcgccgtctgcgacaacgcgcatctgaagacgatcctggccacaggcgacctcaagacgctgcgcaatgtcgcgaaggcatcgatggtctgcatgatggccggtgccgatttcatcaagacctcgaccggcaaggaaggcgtcaacgccacgctgccggtgacgctggcgatgctgcggatgatccgcgtctaccaggagcgcaccggcttcaagatcggcttcaagccggccggcggaatctcgaccgcaaaggacgtgctcaactatcagctcctgatgaaagaggaattggggcgcgactggctcgagccggatctgttccgcatcggcgcctccagcctgcttgccgatatcgagcggcagctcgagcatcacgtgaccggccactattcggctttcaaccgccaccccgtgggatgagactccagcgatgagcgtcgcaaactatttcgagaccatggagtacggcccggcgcccgaggcggacggcgaagcgcgcgcctggctggcgcgacatgacgccacgttcgggcatttcatcgccggcaagttcacaacgccgcatgccggcaagcacctcaccacattcgagcccgccaccggcaaggcgctggcgcgcatcgcgcagggcgcggctgccgacgtcgaggcggcggtccgtgccgcgcgcaccgcacagacagcatgggcaaagcttggcggtcacggccgcgcccgtcatctctatgcgctggcgcgcatgttgcagcgtcacggccggctgttcgccgtgctggaggcgatcgacaatggcaaaccgatccgcgagacccgcgacctcgacgtgccgcttgccgcccgccatttctactatcacgccggctgggcgcagttgcaggaacgggaattcgccgatcaggtgccgatcggcgtgatcgggcagatcatcccgtggaatttcccgctgctgatgctggcctggaagatcgcgccggcactggctgccggcaatacggtggtactgaagccggcggagttcacctcactcaccgcgctgctgttcgccgaactctcggccgaggccggcctgccgccgggtgtgttgaacatcgtgaccggcgatggtgcgactggcgcgctgctggtcgaaagtcccgtcgacaagattgccttcaccggctcgaccgaggtcgggcggctgatccgtcagacgacagcaggcaccggcaaatcgctgacgctggagctcggcggcaagtcgccgttcatcgtgttcgacgatgccgatatcgatggcgcggtggaaggcgtggtcgatgcgatctggttcaaccagggccaggtctgctgcgccggctcgcggctgttgctgcaggagggcattgcagagatcttccgcaggcggctgatccgccgcatgtcgacgctgcgcgtcggcatgccgctcgacaagacgatcgacatgggcgcggtggtcgccccggtgcagctcgagcggatcaagtcgatggtcgagaccggggtgaaggaaggcgccgagaaatatcagacgcccggcgcgatgcccgcggagggatgcttctatccgccgacgttgctttggaacgtgcatccatcctcgacggttgcgactgaagagatattcggtcctgtcctggtcgcgatgacgttccgcacgcccgacgaggcggtcatgctcgccaacaacacgcgctacggccttgccgcgagcgtgtggagcgagacgatcggtctcgcgctcgacgtcgcgccgaagctgctggccggcgtggtctgggtcaacgccaccaacctgttcgacgccagcgtcggtttcggcggctaccgggagtccggcttcggccgcgagggcggccgcgaaggcatggtcgaatatctcaagccgaaggcctggagcgggcgcaaggcgcggcccaagccatcgccgctgccgatcgcgtccggcgccagtgccggtttcgacgcgccgccgatcgatcggacggcaaaactgttcgtcggcggcaagcaggttcgcccggatggcaattattcgcgcgcggtgctctcgccgaaaggccggcgcctcggcgaggtaggagagggcaatcgcaaggacatccgcaatgcggtcgccgcggcgcgcgccgccgaggggtgggcgcgggcgacggcgcataatcgcgcccagatcctctattacctcgctgaaaatctctccgcgcgcagcgacgagttcgtccggcgcatcgccgacatgaccggcgtgccgtcggcgaaggcgcgcgccgaagtcgatgcgagcatcgagcggctgttcagctatggcgcatgggccgacaagttcgagggatcgatccacgcgccgccgctgcgcggcgtggcgctcgcgatgcacgagccgatcggcgtggtcggcgttgcctgtccggacgaagcgccgctgctcgccttcatcagcctggtcgcaccgttgattgcgatgggcaaccgggtcgtcgccgtgccgagcgagcggcatccgctcgccgcgaccgacttctaccaggtgctcgagacgtcggatgtgccgggcggcgtggtcaacatcgtcacgggtgatcgcaacgaactggtcaaggtgcttgccgagcatgacgatgtcgacgcgctctgggcgttcgggtcggcgggcgcttcggcggcagcggaacggctgtcgatcggcaacctcaagcggacgctggtcgatcatggcctcgcgctcgactggtacgacaaggccgcgagcgagggcccgatcctgctccgccatgccgtgcaagtgaagaacatctggattccgtacggcgactaaggaagtcaccttgcggtgatatggctggggtccgggccgccagagcccggcgatgccgaagacgagggagggacgcaacatgctcaagggcatcaatccactgctcaatgccgacgtgctctatgccctgcgggcgatggggcacggcgatcgcctggtggtgtgcgacaccaattttccggccgactcgattgcccggcagagcgcgcttggcgaactgctccgcatcgacaatgtgggcgccgccaaggcggtcgaagccgtgctctcggtgatgccgctcgataccttcgtcgacgatgccgcgatccgcatggagattgtcggccagccgcaggaggtgcctcccgtgcagcacgaggtgcaggccgcgatcgatcgcgccgagggacggtcctggccgttggtcggcgtcgagcgccatgcgttctacgagaaggccaagacggcttattgcgtgatcgcgaccggcgagcggcgattctacggctgcttcctgttcagcaagggcgtgatcgcgccggacggggagtgatcacatgagcaagcgtggcgtcgccgtcctcggcgtctttgtcgtcgacctcgcattccgcgccggcaatatgccggcgatcggcgagacgatcgccggctcgggattcgccatggggcccggcggcaagggatccaaccaggctgtcgcggccgcgcgggccggtgctagcgtgagcttcatctcccggatcggcagcgacgccttcggcgagcttgcggtcaagacctgggaggccgagggaatccggccgcgggtggcgaggacagcggacgcgccgaccggtgctgcgttcatctacgtccacgagacgcgcggcgacaacgccatcatcgtggtgccgggtgcggcgggcggcatcagcccggccgatgtcgatgccgtggcggacgccattcgtgacgccagcgtgttcgtgacacaactcgagcaaccggtcgatgcggcattcagggggctcgagatcgcgcgcgccgccggcagcatcacggtgttcaatccggcgcccgcgatcaagttcgacgatagcctgtttgcgctctgcgattacgtcgtgcccaacgagaccgaagcggaagggttgaccggcatcgcggtcagcgatctcgccggtgcccgccgcgccggcgatgccttgctggcgaagggcgcaggcaccgcgttgatcacgctcggcgagcgtggcgcgctgttccatgcgcgggatcgctcgctgcacgtgccgccgtttgcggccggcaaggtggtcgagaccaccggcgcgggcgatgccttcgtcggcggcttcgctgcggcgctcgcggatggcgtcgatccgctcgaggctgcgcggttcggttcggccaccgccggaatttccgtcacgcgcccagggacagcgcccgccatgccgcggcgtgccgagatcgacgcgctgctgaagggatgatcgcgcgatgatgcggaacgatccgatcaagcatgtcttcatctggccggcggtgctcgtcgtgctggcgatctcgatctttccgctgatctattcgctcaccacgagctttctcagctatcgcctgattccgccgatcccgccgcgcgtggtctggctcggtaattatgccacgctgttgcaggagccgcggttctggagcgcgctgttcaccacgacgctgatcgccttcattgcggtcggcctgcaatatgcgatcggattcggcgtcgcgctggcgctgaacgcgcgggtgccgggcgagcggctgtttcgcgtcgccctgctgctgccgatgctgctggcgccggtcgcggtcgcgctggtggcgcgcatgatgttcaacccgaccatgggaccgctcaaccagttcctgtcgaagttcggtctggtcaatctgcccttcctcaccaatggacattgggcactcgcctgcatcatcgctgtcgaagtctggcagtggaccccgttcgtcatcctgatgatgctggccggcctgcaaacgcttcccgaagacgtctatgaggccgccgagctcgagaacgccagcgcctggcagcagttctgggggatcacgtttccgatgatgctgccgatctcggccgcggtcgtcttcatccgcctgatcgagagctacaagatcatggacacggtgttcgtgatgaccggcggcgggccgggcgtcgacaccgagacgctgaccttgttcgcctaccaggaaggcttcaagaagttcaatctcggctacacgtcggcactgagcttcctgttcctgatcgcgatcacgatcatcggcgtcacctatctggcgctgctgcggccgcatctggagaagcgccgatgagcggacagggcttgaccggactgtcgcaatggagccgccggctggtcgcggtcggcgttctcgcctggtgcctgatcacggtgtttccgctctattgggtggtggtgaccgcgttcaagacgccgccgggcgtcgtcggcgggccgacttacattccgttcgtcgacttcacgccgaccttgcagcccttcatcgatctctatcagggaattcgcggcgagttcttccgcaccttcttgaactcgaccatcgtgggcctgtcggcggcggcgatcgccacggcgatcggtgcgatggcggcctatgcgctggtgcggttcgagttcagagtccggttcggcgcgggcctcgtgtttttcctgctcgcgctcggcctctacctgctgttcaacgcaacgctcggattgacccgcccgcaggcactcctgctcgcctttccgatcgcgttgatcgcagccgtcgtcgccaatcgcctgccgctgcccggaccgatcctcggcaatgaagacatcctgttctggttcgtgagccagcgcatgttcccgccgatcgtcacggcgttcgcgctgtatctgctctacagcgagatcggccggctcggcttccagctgatcgacagctatgtcggcctgacgctttgctacgtcgccttctcgctgccgatcgtggtctggctgatgcgcgacttcttcgaggcgatcccgatcgaggtcgaggaagccgcgatggtcgacaacgtgccgagctggcgcatcttcatcggcatcgtggtgccgatgtcgatgaacgggctgctggcgacgttcatgatcacgctggccttcgtctggaacgagtttctgttcgcgctgttcctgaccaattccagatggcagacgctgcccatcctggtggcgggacagaacagccagcgcggcgacgaatggtgggcgatctcggctgcggcgctggtcgcgatcgttcccatgatgatcatggcgggcctgctcagccggatgatgcggtcgggcctgctgctcggggccatcaaataacagaaaactttgtagggaggactaaacgatgttgcgacggacgttcctgatgttgaccacttcgctcgcgatggcctgcgccgcaggccatgcgaatgctgcctgcagtccggattacaccggcgtcaccctgacggtggcgtcgcagaccggaccctatatcgcctccgcgctcaagctcggcgccgacgaatgggccaagaagacctgcggcaaggtcaatgtcgtcgagtttccctggtccgagctctatccgaagatcgcgacgtcgctgacggcgtcggacgcgacgttcgatctcgtcagcttcgcgccggcctggctgccggacttcgtgccttatctgagcgagatgccgaaggagatgcagtccggcaaggactgggacgacatcgaaccggcctatcgcgaacgcctgatggtgtgggaaggcaagatctattcgcaatcgatggacggcgacgtccacacctatacctaccgcatcgatctgttcagcgatcccaaggagaaggatgctttcaaggccaagtacggctacgacctcgcgccgccgaagacctggaagcagtatctcgacatcgcggagttcttccagcggccggacaaggggctgtggggaaccgcggaagccttccgtcgcggcggtcagcagttctggttcttcttcagccacgcggcggcttacacgaacaatccgaactatccgggcgcgatgttcttcgaccccgagacgatggacgcgcagatcaacaatccgggctgggtgaagggcctcgaggaatacatcaaggcatcgaagctcgggccgcccaatgcgctgaacttctcgttcggcgaagtcaacgcggcggtcgccggcggccaggtcgcggaatcgatcggctggggtgacaccggcgtcatcgccgccgacccgaagcagtcgaagatctcgggcaaggtcggctcggcgatgctgcccggttcggacgagatctggaacgccaagaccaagaagtgggacaagttcccgggcgtgcttccagccccgttcatggcgttcggcggctggcagatcgcggtgccgaaggccggcaagaaccagcaggcggcgtgggacttcgtcaagaccctgaccagccccgacgtgtcgggccaggcggcgatcaccggcggcagcggcgtcaatccctatcgcaaatcgcacaccgccaatctgcaactgtggagcaagatcttctcgccggaagaggccaaggaatatctcggcgcacaatcggactccatcaatgccaagaacgtcgcgctcgacatgcgtctgcccggctatttctcctacaccgaggtggtggagatcgagctcggcaaggcgctggccggccagaccacgccgcaggcagcgctcgacgcgatggcgaaggagtggaacaggctgaccgacgagttcggccgggccaagcagctcgccgcctatcgcgcggcgatgggcctgccgccgaaaaactagctttcaaccgagacatcccggatgatgcgcgcgcgtcatccgggattttgacgagccgtcgacgaagggacggaaaaggattccatggcgcacgtcgagatcgaaaacgtcagcaaggcatacgggccctacaagatcatcgaagggctcgacctcaccgtggccgacgaggagtttgtcgtgctggtcggcccgtccggctgcggcaagaccaccacgctgcgcatgatcgcggggctggaggccgtcaccggcggaaccatccgcatcggcaaccgcgacgtgacccagttgcgccccggcttgcgcaattgcgcgatggtgttccagaattacgcgctctatccgcacatgacggtcgccgagaacatcggctacggcatgaaggtgcggggcgagcagcgcgccagcatcgagaaggccgtgggtgacgtggcgcgggtcctcggcctcgagcaatatctgcagcggaggccgaagcagctttccggcggccagcgccagcgcgtggcgatcggacgggccatcgtgcgcagcccggacgtcttcctgttcgatgagccgctgtccaatctcgacgccaagctgcgcatcgagatgcggaccgagatcaaggcgctgcatcgccgcctcgccaagacgatcgtctatgtcacgcacgaccaggtcgaagccatgacgatggccgaccgcgtcgtggtgatgaacaagggccggatcgaacaggcggccgatccgatcacgatctacgagaagccgagcaacctcttcgtcgcgggcttcatgggcgcgcccagcatgaatttcatccagggcgagctcgcggctcgtgacggcgcgctcatgttcaccgagccgtccggcaccgcgttgaaggtgccgaggtcacgtgaggcggcctatgcgggcagcgtcggcaagcccgtggtacttggcgtgcggcccgatcatgtgttgcggcagggtgcgccggcgggctcttccgtccgtttgctggtcaaagacgtcgagccgctcgggccgcacacgctggtgatcggaaccgtgggcgcattcgcgttcacggcgcaaatgccggtcggcgtcgccgccgagccggatcatgtcattgacgtcgcgctcgatctcgagcgaacgcatctgttcgacaaggcatcggggatggccatctcctgattttgctgctgggccggaccaggcgttcgaacgcccctgggagccgcaagggggcctctgacgcgattgttttctatgttatcaagtgatccgtcgaagctgcgctcgtgcaggacctgcccgagccttacgaacccggatcccgatgatgctgtcgcttcccaagaccaagatacgcgtgctgctgctggagggcgtgaatgactccgcggcccggatgttcgaggcgaacggctataccgaactgcaacggctgcccaaggcgctgggacccaaagagctccggcaagcgctgtcaggcatccatatgctggggattcggtcgcggacgcaattgaccgcggaaatcctggaggccgccgaccggctgctggtcgtcggctgcttctcggttggcaccaaccaggtcgacctcgacgccgcgcgaaaactcggaatccccgtcttcaacgcgccatattccaacacccgcagcgtcgccgagctgaccattgccgagatcgtgatgctgttccgccggatctttccgcggtcagtctcggcacatgccggcggctgggacaagtccgccgaaggcagccgcgaggtgcgcggcaagacgctcggcatcgtcggctacggcaatatcggctcgcagctgtcgaacctcgccgaagcgatgggcatgcgcgtgatctattttgatcacaccgacaagctgcgtcacggcaataccgagccggtcgacacgctcgacgaactgctcgcggccagtgacgtggtctcgctgcacgtgccggaaacgccggcgaccgccaatatgatcggcgcggcccagctccggttgatgaagcccgaggcctatctgatcaacaattcgcgcggcaccgtggtcgatctcgatgcgctggcgagcgccctgcgcgagaaccgcctggcgggtgccgcagtcgacgtgtttccggtcgagccggtgtcgaacgaggcgcgcttcgtctcgccgctgcagggcctctccaacgtcatcctgacgccgcatgtcggcggttcgacggaagaagctcaggatcgcatcggcggcgaagtcgcccgcaagctgatcgattattccgatgtcgggtcgaccttcggcgcggtcaattttccgcaggtgcaattgccggcgcggccgaccggcacccgcttcatccatgttcatcgcaacgttcccggcgtcatgcgccaagtcaacgatgcgctctcccggcacggcatcaacatcctggcgcagtatctgcagaccgatccggaagtcggctatgtcgtgctcgagaccgacgtggtcggcggcgagggcgaggcactgctggccgatttgagagccatcgacggcaccatccgcgcgcgggtgctgtacgaccagaaccggccgcaggggtgatcgactgcgtcagtcggcagagaagccgaacgggacgctcgaggtcctgaaatcatcgggaagaatctcgcgtccgatcggcggcgcggatcgcgccgcgcatcgcggacgatggcagacgcggcatgcgacgccgatcggcgtcggctcgtccgcgttcggcccctgtccgtcgcgcgtgtagatcagctggcccgcgtgctcggcggcgcaaccgatcgcgatcgcccgctcgacgcggatggcgccgaatgcgccgccgccggcggtcacggtgcgggcgatcgagaagaaccgctgtccgtccggcagttccagccattgcgtcacgatctggcgtggcgtcttgaagatgccgtggaccgaccacagcggacacgcgccgccgtgcttcgcaaacggaaatcccgcgccgtcgagcagcttggagatgttgcccgccggatcgacgcggatcaggaagaacgggaccttttccaggcccggccgctgcaaggtcgtgacgcgatgcgccgtctgctcgaagctggtgccgaattgacgcgccagtgcctcgaggtcgtagcgacgggcttcgaccgctttcgcgaacacggagtagggcatgatgagcgcggctgccgcgtaggcgccgagcgcgcggcgggccagcaattcggcgctcttgctggtgaacttgccgtcctcgaccgccgcgccgatctcgtcttccagctcgagataggcgagctgcttggccaattgaaagttgagacccgcggtatcgagcgagtcctcgagcagcaattgtctgcgatgcatgtccagtcgcctgaccgaaccgagcatgacgttgggcggcagatagcggacttgaagcttgtgacgctcgcgcagccgctcgataaatccggccggcccggcaggctcgtggacgaggcgctcggctgcgtcgtcgaggttggcgaaattgttgcggcgcgcggcgaggaaccgcctgacctccgcgacgggatcgttggcgtcgaaattttgctgcccaggaaaggatccgccgccagccaggtccggagcgctgcgctccgccagcgccagctgttcctcgcgataggcggtgtagaggcgaaggaacgcttcggtcatgccgggatagctgaccgcgaggtcgctgacctcgagcgcggggatgtcgatgtcggcgaacatcggttccttcaggatcgactgcatccgcgcggtgtgatcggcgccgccgtcgccggcgagatcggccagatcgatcttgtaggtgcgggcgaggcgaagcagcatgtcggccgtcaccggccgctgattgcgttccagcagcgcgacatagggggcggagatttccaggtcggccgccatgtcggcctgggtcaacccgagatcgcgccgcagccggcgcagccgggggcccatgaaaacggaacgggcgcttgaggttgccatcgcctaatccaggtgaagtgtaagattcttacaataatacaacggtttcttgtaagttatgacaagttttccgcgccaagtctagctcccggcgagactgggcttacaaaagagcccagttatttcgtcaccgaagggatcacggacatgaacttccaaccgcgcgggatcagcgaccgggccatccagggaccggcttcctatcagagcgagctcgaggctgctgaagcgctgctcaagaccaaggacacctggaacggcgtcaccgccgaagccgtggcgcgcatgcgcctgcagaaccgcttcaagaccggtctggacgtcgcccgttacacggctgcgctgatgcgcgccgacatggcggcctatgatgccgacagcaccaagtacacccagtcgctcggctgctggcacggcttcatcgcgcagcagaagctgatctcggtcaagaagcacttcggcaacaccgatcgccgctatctctatctctcgggctggatgatcgccgcgctgcgctccgagttcggcccgctgcccgaccagtcgatgcacgagaagacctcggtgccggccctgatcgaagagctctacaccttcctgcgtcaggcggattcccgcgagctcaacgacatcttccgcgcgctcgatgcggcgcgcaaggaaggcgacaaggccaaggaaaaggcgttgatcgagaagatcgacaacttccagacccacgtcgtgcctgtcatcgccgacatcgacgccggcttcggcaatgccgaggcgacctatctgctcgccaagaagatgatcgaggcgggcgcctgcgccctgcagatcgagaaccaggtttcggacgagaagcagtgcggccaccaggacggcaaggtcaccgtgccgcatgaggtgttcatcgccaagattcgcgcctgccgccatgcgttcctcgagctcggcgtcgaagacggcatcatcgtgacccgcaccgactcgctcggcgccggcctgacccagcagatcgcggtcagccacaagccgggcgacatcggcgaccagtacaacagcttcctcgattgcgaggaagtgacggctgccaatgcgcgcaacggcgacgtcatcatcaaccagaacggcaagatgatgcgtccgaagcggctgcccagcaacctctaccagttccgtcccggcaccggtgcggatcgctgcgtgctcgactgcatcacctcgctgcagaacggcgctgacctcttgtggatcgagaccgagaagccgcatatcgagcagatcgcctcgatggtcgatcgcatccgcaaggtcatcccgaacgcgaagctcgcctacaacaactcgccgtcgttcaactggaccctcaacttccgttggcaggtctacgacgcgatgaaggaagcgggtcaggacgtcagcaagtataaccgcgccgagctgatgaaggccgagtacgacgacaccccgctggcgaaggaagccgacgagcgtatccgcaccttccaggcggattcggccaagcgcgccggcatcttccaccacctgatcacgctgccgacctatcacacggctgcgctgtcgaccgacaatctcgcacgcgagtatttcggcgagcagggcatgctgggttacgtcaagaacgtgcagcgcgcggagatccgtcagggcatcgcctgcgtcaagcaccagaacatggcgggctccgatatcggcgacgatcacaaggagtacttcgccggtgaggctgccctgaaggcgggcggcgcccacaacacgatgaaccagttcggctaacggctcgaacggatcattcgaatatcggccgggcaggcgggattgcgatgcagtcccgcctgttctccaagttggcggggcggtctcgatcacggtgatgcgagatcgccccgcattgcttgcaaagccgactccctcaggcctcagccctttcgagattcccgcattccgcacgagcgtggtacgttgcgatcccgggggcatgtcgcgctaccgatggacctcgggaacgcggccggtgattgcccgctttgtatgggacggttggccgttcgaactgttcggcgatcaccgccctgtggatcagcagcgcggctggatccatttcgaggtcgagcggcgactgctcgcgcttgatggcgggacgttgcgccgagccgttggcaagctaagggcagatggcctcaagaccgagcctgcattcgccgccgtgctcggcatatcgggcgatccctatcgaggcttgctccaactcgcggcggaaacggacgccgagttgcgcgcccggcttgcggtgcgcggcctcggctgatcgcgaggtcattcgcccggaacgagatggccgaccggctggcgtacgaggcgccggtgcctgcggcgggacagatagagcagcaggccggtcacggcgaatagcggcatcatggcggcggcgagcatgaaggcgagcttgccgggccatccgaggatggcgccgcggtggatgtcgagcacgccggcgaggacgcgctcgcccaaggtcttgtccgcgtagcgatccgacgagatgacgtgaccggtgacggcatcgatgcggaactcgtcgcgcacgctctcgagcgatgaacttcgcgaccatgaccgcacgcgcacggcggcgcccgcacccgccggcagggtcaggagcgcccttccgtaatcgttgttctcttgctgcaggaacgtggtccagacacgatcgaagccgagcggcttcgtctcggcggtctttgtatcggtcttgtttgtctcagccttggcgtctgctttgccctcggacgccgccgcgccgcgcggcggcttgggttgcatcgccgcggccatggcctgcggccgcgccagcagccagttggcgccggccttgtaccactcgaatgaataccacaggccggtcagcgtcatcaccagatagaccggcagcacccaggtgccgatcacggcgtgcagcgaacgatgcaggccgcgcccgcgcagtgccagatttggcttcagccacatcttgacgctgcgcgcgcgatgcggccagcgcagcacgaggcctgatatcagcatcacgatcaggcagatcgcggctgtgccggtgatcttgcggccgatgccgttgccgtcgcccggcagcagcagccagcgatgcagcttgcggacggtcgcgaagaagtcctcgccgcgcggcgagccgagcacgtgtccgtcatagggatcgacatagaccgaggacggccgcgtgccgccttcgctgcgggcaaagcggatatgcgccgccgccgccggatcgctggccatcgctactgcggagaccccgccgaaatcacccaccttctgaagctgcgcgaccagctcgtccggcgtgagccgccgggccgcgctggcctcgacgcgcatcagatggctgttcaggctggcctcgatctcgtcctcgaagctcatcgtcgcgcccgtgaggccgaccacagcccagagcagtgccagcgcaagacccgcgatggaatggatctgcaacagcacggccttgatcgggcgtcgagcatcactcatcgaagccggcctttcggatcagggcgattgcggctgcctgatgcgcggcgatcctctcgacaggcaacgcatcgatggggaacgatccgatctcatcgacgaccggaggccgctttgcggtcgccagcaccggatattccagttcggcggctgcaaagatcgtctgggcttccggcgtgacgaggaattcgaggaacgcgcgcgcggcggccgggtgcggtgcgtgccgcgccatcgcagctccagtcagattgacgtgactgccgccgcctctgaacaccgccggtaccgccttcacggcgtccgcccaggcgcgccagtcattgccttcgcggccgtcgcggagttgcgcgagcgcgaccgtgttgccgattccgatgtcgcaacgcccttccgcgatctcgcgcaccacgtcgttgtccttgccggcaggcttgctcgcgagattacccttcaggccggcgagccagccctccgtcgcgtcagtcccgtgatgcgcgagataagccgcgatcagcgcgacgttgttctggtggagcgccggccgcatgcacaatctgctgcgccatttgggatcggcgagctcttcatagctgatcgcggcgaggggattgtccttgcgtgcgaacaccactcgcggacggacggcgagcgcgatccactggtcgtcgccgccgcgcaggttcgcgggcaccgcctgatccagcgccggcgatgcaagcggttgcgtcagtccgcgcgcggcaagctgcgtcgtcttgtcgagaccgatggtgaggaggacatcggcgggtgagcgctcgccttcggacatcagccgcttgaccagactgtcttcgatgaagacggtcttgacggtggtgccggtcgcggctgtgaaggccgcgaccgcgggctcaaccagattggcttcgcgggtcgagtaaagtgtgagttcctcggcgtgcgccgtggcgcaggcgaaagcgatcgcggccaagggggccagcagtctgatcgctgtccgcgcggtggccatgctagaatttcaccgttgccgacagcgagacgcggcgcgcatcgcccatcgcgaccgacagaatgttgttggcggagggatagtagacagtgtcgaacaggttcttgacgttcaactggtagatcaccgggaacgtctggaccttggtctcgtaggtcgcaaacacgtccgcgaccgtgtaggacggcagcacgaagctgttcgtcgcgtcgccggggcggtcaccgacatagcgcgcgccgccgccgagacgcagccggccgggcagggtggtgccgaaatcatagaccagatagagcgatgcggtgttgagcgcgacgttctgcagggcattaccgacgagcgtcggatcctcggtgacgcgtgcgtcggtatagccatagctgccgatcacgctccaattgtcggtcagcctgccggtgacgtcgagttcgacgccgcgcgagcgaaccctgccggcggtgcggtattcaacgatgccggtcgtgggattgagctgcgaaaccagcacgttcttcttgtcgatgtcgtagagcgcaagcgtgccggagatccgcttgttgaagtcgaacctgacgccggtctcccactgggtgccctcctcgggcgcgatgttggagccgatcacgacgccgccggtgagcggcgcgatcgtcgaggtcggcttcagcgactgcgtatagctcgcatagagcgaaacctggtcggtgagcttgaggatggcgccgccgagcggcagcaccttgtcggccgagacgttggtgttggtgatgaacggccggcccctgccggcaatctggtcgtaatccatgtagcgcacgccgccgaccaacgcgaagcgctcggtcaggtgcagcgtgtcctggaagaacagcgaccactggccgagcttgtcggtctgggcgctgtcgctggccgatattgtgctgccgggaacgaccagcccatacaccggattgtagaagttgaaattcggtgtcgcctgccggatcagattgtcgcgatagatcgtgcggtattcgccgtcaccgccgaacagcacctcgttgcggaatccgccgagccagacattgccctgcagataggacgtgccgtagctggcattgctgagcgaaccctgggtgccgtcattgctgcgggtctcgacgccggtcctggcgttgacaccggtgatgcggagctggttggcgctgaaagtctcggtgttgtagctgtaggccgcgaacagcttccagtcctggttcaggcggtgctcgaccgaggcctgcatcaggtcggaggtgccccacatgttgttgaagggctcgtcgagccggcgcgtcgccgggagcgccagcggcgtcttcgtcacggaatcgaacgcggtgccgcggtcgaacggcgtgatgaattcgcgatgctcatagttgagctggacggtggtgttctcgccgtaccaggccaatgacggtgcgaccagcatttcgcgatggcgcccgaaattgcgccaatagtcttcgctgacgccataaccgatgaagcgataggcgaggccgccattgccgatcgggccggtgatatcgaccgtgccgtcggcgccgctcttgttgccggcgtaggtcgagccgagcagggtcatcgagccatgctgatagagttcggggcgcttgctgatcgtgttgacgatgccgccgggatccatgatgccgtagagcagcgaggccggccccttcagcacttcgacgctctcgaccgcggcattgaggctgcggccctgcaccagcggcatgccgttgcgcatgatcgagccgtcgcgattgtcgccgaagccgcggcgcatcacggcatccagcgtgccggccagcgtgttgccctgggtgacgccgctgacattggccagcgcgtcatcgagattgcgcggcagctgatccctgagcacctgctcgggcacgacgttgaccgtctgcgcggtgtcgagcggtgaggcaccgctgcgcagcgtggtcgagctcggcatcgcgcggtagccgagcttggcttcgttcagcgcggcggctgctgcggctgcgcgctcggacgctgtcggtggcgtcggctgggcgttccggctgcgctgccgtgccgcggcggtcgtctgggccggctgtgccgatcgcgccgaattggctgcaggcttgcgcttctgtgtcggctgctcgaccgtgaccggcggcaatgcgacgctcgattgggcgtttgccggcgtcaccgaggaggcggcgtcggcgagcaggaatgctgcgccgatcagcagatgggtgcggctcctgtcggcggcatttcgacggtcgccgacaacccggccatcagcattcacagacacgcttggacttccgattcacgcgaactcattcacgacgcgcctctagcagtcggcgcgcgcgaaaagaaccggagcagacttgaatctctctaactggattggatttgaagcgttctaagacgcaacgaggccgcgcacataggcaagcctcgcacctcatgacgtggttgctgcgtcgcgcgtcaaatcgtcgcgcgatgcgcctcacgacatcgtcaggcttaccggagctttgccgaccatgcccgtgctcacgccatcgcgcgccatcgattcgatctcgccccagttctcgcgaaagatacgcgccgcctcgttggcattttccgcatggatcgtcagactgcacgcgcgtctcgcgccgttgctggcaagctggaagtaaagaacatatccggacgattccgcgctccgtgcgtccaacggtgcctgctgcatgtaggttttccccatcagtgttttgttgcgccacccgcaggcaggatttgacagggatgcggcacggtcgtgattcagaacgcgcaatctgaaggcttgcgcgttttgtttggcggtgttgccgggattcaacaggcgatggaaccggcggtgcgcggcaactgcaactcagcggcgatcgcggcgcggcctcaactgtcgtggcgtggcttcgcgtcgtcgtcgccgcgcaccgctaggattccccggatcgaagtcgtgagcgccgttccgtcgtggtcgtcggcgccggtgatcgagtgtccgcgcgagcgtgacagcgggccatgacgccgccgaccgccgggtatttggcagcgtctgggatgcgtggcgttcgtaaagccgcttgcccgcccgtggggcccgtgctattcatttaccgaacggtcgttcggattattattggcggccggcgagggagacggagcgatgaacatgatgaccggcgtctcgccatgggagcggctgatccggcccgaccgggtgcacggatcgctctacaccgaccccgagatcttcgaggccgagctcaagcagatctggtaccggacctgggtctatgtcggccatgagagcgaggtgccgaacgccaacgactacgtggtcaagtcgatcggcccgcaatccgtcatcatgacgcgcgacgagcagggcaaggtcaatctgctgctcaatcgctgctcgcatcgcggcaaccaggtctgttccttcgagcgcggcaatgcgcgctcgttcacctgtccgttccattcctggaccttcgccaatgacggccggctggtcggctatgccttccccgacggctacgaggggcaggacaagtcgcagctcgcgctcgggcgggtgacgcgggtcgaatcctatcgtgggttcgtgttcggctcgttcgcggccgatgggccgaccctcaaggaacatctcggcggcgccgccgagaccatcgatcgcctggtgcgcacctcgccggaaggcgaggtcgagatcacggcgggcttcctcaagcaccgcgtcaaggcgaactggaagttcatcctggagaatgagtgcgacggctaccacccggctttcgtgcacacctcgatcttcggcgtcgccgacagcatgatcggcaagctctatggcggcgcctcgaccgcgctgacccgcgattacggcaacggccataccgagatcgatctgcgcccggagttccgcaagcgcgatgcgccgatgagctggttcggcaccagcgaggagcggttgcccgactattcggcgcggatgaagacggcctatggcgacaccgcggcgcgcgagatcatgatcgacggcacgccgcatgtgatgatcttcccgaacctgttcatcgccgagatccagatgttcgtgatccagccgctcggcgtcgacgacagcgtgcagcacgtcaccgcgctgcaattcaagggcgcgcccgacctgaaccggcggctgcgccagcagaccatgggctcggtcggtccggccggcttcctgcttgcggacgattccgaaatgtacgaacgctgccaccgcggcgtgctggcgcgcaatccggagtggatattccttggtcgcggcgagaagcgtcagcggcaggacgaactcggcttcatcgtcggccacgtcaccgacgaggtgccgtcgcgcggcatctggacccattatcgcaagctgatggagccggcctgatgctgtcgcgcgaaagcagcgccaccttgatgagcgccatcaccgccttcctctatcgcgaggcgcggctgcaggacgagcatcaatacgaggcctgggagaagctctggaccgacgatggcgtctactgggttccggccaacggcgccgacatcgacccggagcggcagatgtcgatcatctacgacaatcgctcgcggatcgcgctgcgggtccggcagctgatgaccggcaagcatttcacccagacgccgcagtcgaatttgcgccggttgatctccaatatcgaattgatggacgagcagcctgacaacggcgacttcgcggtcgccagcaacagcctgatttttgaatccagcctgcgcgacgacacgctgtgggcggcgcgcaacgaataccggctgcgccatgtcgatggtgaattgcgaatggcccacaagaaggtcgttctcgtcaacaacgacaaggcgatctacacgctgtcattcctggtttagggaaggtctcgccatgatcgacaagggccccgtcctgctcgacatcaccgacggcatcgcgcggctgcggctcaaccggcctgatgccgccaacggcatgagcgccgagcttttgagcgcactgtgcgacgccatcatggtgtgccacggccattcggacctgcgcgtggtgctgctgagcggtgagggcaccaatttctgcgccggcggcgatgtccgcgcctttgcctccaagggcgagaagctgccggactatatccgccaggcaaccgcctatctgcagaacgcggtgaccggattgctgcgtctcgaggcgccggtgatcgcatcggtgcagggctttgcggcgggcggcggcggcttcggcctggtctgcgcctccgacatcgtgattgcggcagagtccgccaaattccttgcgggtgcgacgcgggtggcgatggcgccggatgccggcgtctccgtcacgctgtcgcggctggtcggtttgcggcgggcgatgtcgatcctgctgaccaatccggtgatcccggcagccgaagcgttgcagatgggcatcgtcaccaaggtcgtgcccgatgccgaactcgccgatgcatcgctggcgctggtgcgcgagcttgctgccggtgcgccgaaggcgctggcggcgaccaagcggctggtctgggccggcaccggcaccagcatcgagcagtgcctgtcggaagaggcgcgcaccgttgccgagctctcgggcatggccgatgctcgcgaagggctcgccgccgttatcgagcggcgcaaaccagtgttcacggggcgctgaggtggcgaccttgccattcggacgcctcgacggccgccgtgccttcgtttccggcggggcgcgcggcattggagctgcgatcgttcgcagctttgccgccgcgggcgccagagtcgtaatcgccgatctcgacgtggctgcggcgtccgaactcgcgcgcgaaaccggtgccggcgtcgcggggctcgatgtcagcgataccacggcggtgcatgccatgatgacgcaggacggcccgttccacatcgtcgtcaacaatgccggcatcgatcagcatgccttcttcaccgacacgtccgcggacgattgggcccgtctgatcgcggtcaacctcacctcggtcctggcctgcacccatgccgcgctgccggcgatgcaggcggcgcgcttcggccgcatcatcaacgtcacctcggaggcggcgcggctcggctccaagggcggcgcggtctattccgcagccaaaggtggcgtgatctccttcacccggagcatcgcgcgggagaatgcgcggtttcgcatcactgcgaatgcgatcgcgccggggccgatccgcacgccgatgctggagcaggccgtggcaaaaggcggcgacaagatcctgcaggcgatgaccggcgcgacgctgctcggccgcctcggcgagccggaggaggttgcggccgccgcgctgttcctggcttccgaccaggcggcctacatcaccggcgaaacgctcggcgtgtccggtggcatgggtatcggcggctgagatggcgagcgcgagcgacgatatcgcaatcgatccggtcgaacgtgcgatcgagcgcctgcgcgtgatctatcggagctggacccgcgaaacgactgtggcgcagatgcgcagcgattgggatgccgcctttgccggctgctcggttccggtgacgtgccagccggtctcggctggtggtgtccgtggcgaatggattgtgccggccaacgcgccgcgcgacaaggcgatcctttattgtcacggcggcggcttccgcatcggctcggtcgcctcgcatcgcgacctgatcgcgcggattgccgatgcatccggctgccgtgtgctcgcgatcaactatcgcctcgcgccggagcatcgcttccctgccgcgctggatgacgcgctgatcgcctatcgatatctgcgtgatcagggattgcgtcccgcggatgtcgccttcgcgggcgactcggccggcggcaatctcgtgctcgcggcgatgctggcggcgcgcgagcgcggctggcctcttcccgccgccagcgctttgatgtcgccctggaccgatctcgccgcgacgggcgcgagctatgagaccagggccgaggccgatccgatccaccaacgcgcgatgatcctggcgctggcgaagaattatctcggcaaggatggcgacgcccgcgatccgctcgcctcaccgctctacgccgatctgacgggtctgccgccgctgctggttcaggtgggcgaccgagagaccgtgcgcgacgatgcgacggagctcgccgtgcgcgccaaggcagccggcgtcgacgtcgagctgcaggtctgggacggcatgatccatgtgttccagctctttccggagattccgcaggcgcgagaggcgattgcatcgctggcaaaattcctgcgcagccatcttcacatcggccaagagagggcgccacaatgaacgtcatgacctcggacccgcgccagctcgctgagaccgaattccatttcccggagccgcccaatctgcccgaggagctgcgcatgctgcgcgagcaggtccgccgcttcgtcgagaaggaagtggtaccgcatgccgaggcgtgggagcgcgacggcaagattccgcgcgagatctatcgccgcatgggcgcgctcggcttcctcggcatgcgccatgcggccgagtatggcggcaccgacatggggccgctggcctcgatggtgttcgccgaggagctcggacgctcgagcttcggcggcttcacctcgtcgatcctcgtgcacaccgacatgtcggcggtgcatatctccctgcgcggcacgccggagcagaagcagaactacctgcccgcgatcatccgcggcgagacggtctgttcgatcgcggtgaccgagcccgacgcgggctcggatgtcgccggcctcaagacgcgcgcgcggcgcgacggcgatcattgggtgatcaacggcgccaagatgttcatcaccaacgcggtctatggcgacatcctgatcgtcgccgcgcgcaccgacccgcacgccaagggcagtcgcggcatttcgctgttcatcgtggagcgcgacacgccgggcatcacggcgaccaagctcgacaagcatggctggctttgctcggacaccgccgagctcggcttccaggacgtccgcgtgccggcggggaatctgctcggcgaggagaacaagggtttctacggcatcatggagacgttccagaacgagcgcatctgcatcggcggcatctgcgccggcgagtcggccaaggcgatcgagctgacgaccaattatgtgaagacgcggcaggcattcggcggcccgctgtggaaccagcagggtgtgcggatgaagctcgcccagctcgccgcgaaggcggccgctgcgcgggcgctggcctatcaggccgccgaactcgcggcggccgggaaggaatgtctgcgcgaagtgtcgatggtgaaggcgctgtcgcccgaggtgctgcacgaggtcgtgcacggttgcctgcaactgcatggcggctcaggcttcatgcgcggcaccgcgatcgagcgcatggtgcgcgacgcccgcgtgctgacgatcggcggcggcgccaccgaggtgatgctggaggaagtcgccaagcggatgtgagggcttatcgctgcggcgctgacggcttgccctggccgaccgcctgcgcggcgatccccggtttcagccgccagtcctcgccgaaatccgccagcggatggaagaacagcggctcggtggtctcgagctggcgcaggcgctcggcatagtcgtcgagatagcgctgccgcgtggcttcgtcgacgaagttcacggaatacgacacgaagggcggcagcaccttgcagccggcataggccagcatgccgttctggatcggccacagcaccacgtcgagcgcgccgaccagcccgtcgggcgcgcacatgccgggataggcggcggtcgaggtcacgaccatcgcccggcgccccgcgaggccgccggtgtcatagcggcggccgctgccatagaccgcgccgttgacgaacacgcggtcgatccagcccttcatgatggcggggacggagaaccaccacagcggaaactgcaggatcagcaggtcgcaccacaacagcttctcgatctcgaccgtgatgtcgctgctgagcgtgccctgttgcaaattgtacttctgctcgcggtcatattgcagccggtcgggaaaccgccgctcgccgaagtcatctgatgtcgccaccggattgaagcccatggcgtagagatccgagatcctgaccgcatgtccgagcgcggtgagctccgccaccgaccgcgccagcagcgcggtgttgaacgatcgcgtctcctgatgggcaaagacgatcaggaccttcatcgctctcagtccaccggcttgaagctgagcgtggccgtgtcggcctgcatgatctgcagcttctggttggagaatcggacgcctgggccgaagctgatcggcgccatcactccggtctcgacattcctggtcttctccagctcggagatggtgcaggcccaggtcggctgcttgccgcagcgctcgatcgccgcgatcaacactttggccgcggcgtagccggtcatggtgtagcggttgatgcccttgaattcggcttccgacaccaggggcttggccttttccaggaacgccttgccggctggccctgcgaacggctcgacatagtcgaccgcatagatgccgtcgccggccgggcccatcagcttcagcaccggctcgatccggccgggccagaagatgccggtcaccggcttgatgccgagcttctcgatctccttcatcatcgcgatgttctcggcgatgatgccgccggccaggaacacctcggcgccggaatccttgagctgcagcatgtcggacgagaagtcctgctggcccttcttgtagttgccgctgtagacgacgttcagcttcttggccttgaccacgctatcgaagccgtcacgaaccgtgatgccgtaatcgtcgtcctgggtgatcaggccccatttcttgcccgggttcttgtcggccaggaagttgacgaggtggacgatgccctcctcgtaggattgtccgatcacgaacacgttcttgcgcggcggctcccacaggtgcttgaccggcgcgacgtcgatcacggtcgggatgcccgacttttccagcaccggcatcacggcgatcgactggcccgagccggagatgccgatcatggcgaagaccttgtcgacgtcgatcaccttcttgacgccctggatggtgcgcgctgtcacgtagccgtcgtcctccagcacatatttgatcttgcggccgttgatgccgccggcggcattggcctccgcgatcgcgattctgtggccgagcgaggccgcgacgccgagcagcgccggcgggccggtcaacggttcgacgtcgccgatcaggatctcggtgtcgatgatgccgggatcggcggcacgagcagggccgatagcaagacaggaagctgaaagcagcagcgacgctgctgccagatgtttgatcatcgtctcctcctcatggtgttgtgtcttttcttgtcagtagcgcagcggccagtgcacccaggctcgcttgatgtcgtgccaggcgccgaccagccccctcggttggaagcgcaggaacaggatgatgacaaggccgtagagcatgctcttcagttcttgcgccccggtcgtgaacgtcgcgtccatctgtgcgctgaacaggctgaagacgagcctggtcgcctccggcagcagcacgatcaggacagtgccgagcaccgcgccgagcgccgagccgagcccgccgacgatcaggatcgccagcgcctcgatcgagagcaggaacggaaagccctcgacgctgacgaaggacagatagatgccgtagagcgcgccggcgatgccggtgatgaaggcagaggtgacgaaggcgaacagcttgtaggcgtgcagattgatgcccatgacgcgggccgcggtgtcgttgtccctgatcgcgacgaaggcgcggccgacccggctgcggcggatgttgagggtggcaaagagagtcagcgccgcgatggcaaggcagagataggtgaaggcggcatcgctgtcgaagctgatgccgaagatctcgggccgctgcaactggatgccgcgggcgccgttggtgagccagcgcatctccaggatcacggtgttgatgatgaaggaaaaggcgagcgtggtgatggcgagatagagccccttcagccgcagcgacggcgcgccgacgatcaggctcgccagcgccggcaccacgccggcgccgaggaagccgaccggcggcggcatctgatatttcgacaccagcaccgcgtaggcataagcaccagtgacgaggaagccgacatggccgagcgagatcaggccggtgtagccggtcagaatgttgagcccgagcgcgccggtcaccgtgatcaggatgatcatcaggaacgacagcgcataggagttcaacaggaagggcgccgcgatcagcgccagcagcagcacggccgaccacagccaaaccggcggggaatcgatcagcgcgaccagctcgctatgggtctgtttgtaatcgccggtccgcatcacaccctctcgatatcgcgttcgccgaagatgccgaacgggcggatcatcagcaccacgatgatcatggcaaagcccgcgacttccttcatcccggagccgagatagccgccggccaggttttcggtgatgccgatcaggagaccgccgatgccggagccgagcaccgcatcgaggccgcccaggatcgtcgccggaaacgccttcagcccgagctggaacatggccggcgacagatcgtaggacagtgcgaagaacacgccgccgatgccggcgatcatggaagacgcggcccaggccagcgcatggaccttcgtcgcgctgatgcccatcaacagcgcggtgcggtcgtcggccgcgaccgcgcgcatcgcgacgccgaccttgctgtatcggaagaacgcccagatcgtggcgagcagcagcagcagcgcggcgatcacggcaatctggccggtgcgcacgccgatgccgccgagatggacgatgccgcggcccatgccgagttcgaggccgtgcgggtaggcatcccagatgaagttgatcgccgagcgcaggatcactgcgagcccgatcgtgaccattaccgtcgcgaacaccggctcgcccagcatcggccgcatcaccagccgctcgatgacgaggccgagcacgacggccgccaggatcgcgccgattgcgacgacgaacacgttgccgctgaccgtggtcgaaatcgtccaggcgatataggcggtgatcatggtcatctcgccctgcgcgaaattgaccaggccggtcgacttgtagatcaccgcaaagcccatcgcgatcaggccgtagatcgcgccgatcgcaagtcccgagatcaagagttggatgagatactgcattcagccctccgactgatagatgatcgcgagctcgcgggcgaatttcttctcgatcatggcgcggcgtaccttctgcgtcgcggtcagctcgccgtcgtcgtggtcgagctccttctcgatgatggcaaagcgcctgatgttctcgactcgggcaaaccgcttgttggtctcgcccacgatccgttcgaccagctcgtgcacgtcaggcagctgcgacagcgacttgtagttggtgtaggccagcgcgcggtcgcgggcccagcgtccgacattgtcgtagtcgacctggatgatggcgccgagatacttcttggcctcgcccaccacgatcgcttccttgatgaactcggaatccttcagcgcgttctcgatctccgatggcgcgatgttcttgccgccggcggtgatgatgatcgccttcttgcggtcgaccacggcgatctcgccgttgtcgaggatgtcgatgatgtcgccggtgcgcagccagccatcgctctccagcgaagctgttgaggctttctcgtcgaggaaatagcctttgaagacgccggggttgcgcagcaggatctcgccgtcggcgtcgcacttccattccgtctggggtaacggcacgccgcagccaccgatccggtgatggctttcggtctggatgaaggcgacgccaccgctctcggtcaggccgtaaccctgcgaaaccggacggccgatgatgtcgaagaagcgcaacgtctccggcgagatcgaggcgccggcacagagccgatgccggctgtaggcgaagccgagatgacgctgcaaattgcggaacatcagcatatagagcaggccgaacgccgcgcgatcgagcaagttggccttgccggcctgccgtcggtcggacagcgtgcggccccaggcgagacacgctcttgtaaagccctgccgcagcctgccgctttcgccgaggcggaacagaaagccctgctgaagcttctcgtagattctcggtacgccgacgaagaaggtcggcgcgatctcgcggatgttgatcgcgaccgtgtcgatcgattcggcaaaggacacggtgccgccgagcaccagatgcgtcaccgtgccgtagcagcgctcggcgacgtggcacagcggcagatagctcaccgcctcgaacggcttgtcggcgatcccgacggttttggcgtatgcaaaggcggcgtagacgaggttccgatgggtcagcatcgcgcccttgggcggacccgtcgtgcccgacgtgtagacgaggatgcagacatcgtcgggcgtgccctggctgatcagccggtcgagcgtggcatcggcgtccgggttctgctgcccataggccttgccgcgctcacatagggcctcgaacgacatcagctccgattggcggtagtgccgcagccccttcatgtcgatgcagacgatggcctcgagatccggcaggccgccattgttggccatcgcgtcgagcaccttgtcggtctgctcctggtcgccggtgacgaccatgcgggcacccgaatgcttgacgatgtattgcagctcgacccagggattggtcggatagatgccgaccgcgaccgcgccgatcatctgggtgccgagatcggcataaaaccactccggcgtgttctcgccggcgatggcgatgcgatcgccgggtttgacgccgagcgagagcaggcctagcgcgaccgcgcgcgccgtttcgtaatagtgccgccaagaatacggattccagatgccgtaatccttctcgcgcagcgccagcgcatcgccatgcatggcggcgcgctggcgcagcaattgcgggatggtgatggcggcgccctcgagcgccgcctgaaacgtatcggcgctcgccaccggtgcgctgcgcgcggcgccggcctgcaacggcggatgaacggtgcgaaaactgtccagcgtcgacatcacgcgcccaccttcatcgcctcggcgcgctggccgccgagataggcctccgcgaccgcgggatcgcgcctgatctcgtcgggcgtgccctcggcgatcttgcgtccgaaattgagcacatggatgcggtcggagatgtccatcacgatgcgcatctcatgttcgatcatcacgacggtgatgccgagctcgtcgcggatgtcgagcacgaagcgcgcgatgtcctcggtctcctcctggttcatgccggaaaccatctcgtcgagcagcagcaatttcggttcgcaggcgagcgcacgggcgagctcgacgcgcttctgttgtccgtaggacagcgtgccgaccacggcatccctgatgtgctcgatttcgaggaattcgataatgtgctcgacccgctgccgggccgcgatctcttccttgcgggtgcggccgaagaacaccacggcatcgagcacggtcgaacgcagatgggtgtgccggccggtcaggatgttctcgaccacggtgccgtgcttgaacagcgccaggttctggaaggtgcggccgatgccgacggcggcgaatttccagggtgaaatggtcgcaaggtcgatgccgtcgaagctgatgcggccgccgctcggccgcagcacgccggagatcatgttgaacagcgtggtcttgccggcgccgttcgggccgatcacgctgcagatctcgccgctgctcaccttcagactgacatcggcgacggcctgcaggccgccgaagcgttttgaaagattctcgatcgcgagcagcgcagtcatgacagccaccgcttgcggcgcttgtagtgcttgacgtcgcgcaggctcttgcgccccgtcgaggagacgccgagatagaactcctgcacgtcctcgttggccgtcagcttgcttgcggtgccgtcgagcacgacgcgaccggtttccaggatgtagccgtagtcggcgatatcgagcgcgcgctgcgcattctgctcgaccagcagcacggtcatcttcagctcgtcgcgcagccgggcgatcacctcatagatgcggtcgatgatcagcggcgcgaggccgagcgacggctcgtcgagcgccagtagcaccggatcggtcatcagcgcgcggccgatcgcgagcatctgctgctcgccgccggacatgtagccggcgatctggtcgcgtcgctcatacaggcgtggaaacagcgcgaacaccttgtcgcggcgctcgcgcgcctccgcgccggtcctggtgtagccgcccatcagcagattctcgtcgatggtcaaggcggcaaatacgcggcggccctctggcacctgcacgatgccgcggcggaccagctcgtccggcgcgaggcgatgcacctcgtcattgcggaaacggatgctgccgttctcgaccacgccttcctcggtgtagaggatgccggacatcgccttcagcaaagtcgacttgccggcgccgttggagccgagcagagcgacgatgttcccgttgggcaccgcgatcgaaacgtcgcggatcgcctcgatcgcgttgtcgtagacgatgcggatgttgcggaattcgagcagcgcatccggcacggttgccgcgagcggcgctgctgatggcgtcggatccgggatggtcatgggcatcgcgctcagacccggccggccgaacgacgcgggcgcgcggcgaggatcgcatcgctgacgatcttggcggtctcggcgcaggcctgggtgccgccattgccatattgcttgaccgcgtcgccgacgcaccacaagccctcgatgccggtttcgcgcggcaggtcgtaaccggcgcagctgcgttgcgccggccagtcgtcccgcatcacccggatcgacaggattttggtctggtcgaaattggcgaactgctcgcgcaggtcttccagcgcgagcgcgacctcggcatcagagtcgaaatcgccgagcgcaggcaccggcacggcataggcgacatagaggtgccagtcgggcggagccagctccggacaggtcgcggagagattggccatgttgcagagccggcgcgtcttgccgaaggtgacgatgccgggatgattgatcagcggctcgcggctcgcgacattgatgacgatattggcggccgggcgcaggtcgttatttaccctggcgatgtaatctgcgggaaacgcctcgcttcccgccagcgcgacggtagctttcggtcccgcattgctgacgacgagatcggtgtctattcgcaccttctcgccgttgcgcagcacggtgacaccttcgaccttgccattcgcggtgtggatcgtcgtcgccggcgtgccgagccagatatcgccattgcgcttgatcgcggtgcccaagctgttccagaccccgatcgtgccctgcgggcagaagccgaatttcttgaaggcgcccttgctggtgaaataggtgaggaaggcgcgcgccggcagctcggcggcgttgcaggcgaagatcgccgcgcagaggttgcggaacagcgcgtgcaccgtggcattgctggtgtagcccttcagccagtcctcggtcgattgtcgcccgtcgggcaggttgccggagcgagcgtcggcgaatttctccaggatgcgcgaggcctgcttggtcagttgcccgagcagcagcgaccagccgccgcggccgacatcgatcaccttgccgtcgatgaagaacgagctcgccggctccggcgcgcggatgtcgagcggcgcaccgacggtgtggaaggtctcctcgaaaacgccgccgaactcgatggcgatcgcgccgatattgaccttgaagccgtcgatctcctcggtcgaggcgcggccgccgagccggtccttgtcgtcgaccacgagcgtatgcagcccgccatgggcgagacgcgccgcggcgcacagcccgccggcgccggctccgatcacgacagcatcgaccttgtgagcatccacgcgcaacctccctcgatgccgccgggttggtcccggcatgcgcaatccacttgcttgatgacggtcacgataatataatccgaccggtcgttcaaattattttttgacgcaggtcaatgacctcgccgcgccgggtagatgagttctggtggacggtgcccgcaaaggggaggagggcgcggtggcaatggtatagagagacggaagccgcccgattccggcggcggcgccggtgcacgaaagagacgggtatggcgcggacgcgctcagagaattacgacgagatccagcagggcattctcaccaccgcctgcggcctgttcgcacggcaaggctacatgcgtgcctcgatcgccgacctcgcggatgcctgcaagctgtcgcgcggcgcgctgtatcattatttcgactcgaaggaagcgatcctgttcgcgatcctcgatgcgcatatccgcgagatgatcgccgacgtcgaggccgcgatggccggcaaggcgacgacgctggagcagtttcgcgccgcgatccaggccatcgttgcgctcaacgcgcgctcgagcgacgagcagcgcgtgatcctcaacgatctctcgttcctcggcgagaccgagcaggatgcgatcaaggcgctcgagcgtcagctggtcgatacggtctccgacctcctgctcaagctcgacaaggaaggcaagatcgtccggcggaccaagaagatctacagcatgatgctgttcggcatcctgaacttcagccacacctggtacgaccccaagggcggggtcgaccccagcgaattcgccgacatggtggtggacctgttcctgtacggtttcaccatgccggtgccggcgaaggatgccgcgcggccgctgcgccagcgggcctagggcgatcgcggcgaagcgtcacttctgcaggatgtgcacgtaacagaccgcgcctacgccgaccatatgcgcgagcccggtccgcgcgcctgcgtgctgacgtgcacccgcttcgccacggagctgcatcacgatctcgccgatctggccgatgccggtcgggccgatcgggtgtcccatcgcgatcaggccgccggagggattgatcgcgcactgcccgccgatatcgagcgccccctctttcaacatgcgaacgccgtgtccctcggggcagaggccgatgctctcgatgtagtgcagttcctcgacggtgaaggcgtcgtgcaactcgacgatgtcgagatcccccggcgcgagcttggcctgcgccaaggcaaggtcggcggtctccttggtgagcgccgcgtcgaagccggcgccgggcggatagacccgctcgctgcggccgaccgacgccgtggtccggatggcgcggccggcatcgatgcccagcctgcgaatgccgtcctcggatgcgacgatgaccgcggcagcgccttcgccgatcggcgtgcattgcagtgccgtcagcgatcccgacacccgcttgccgccgagcacctcgtcgagcgtgcgctcctgctgccgctgcgcattgggattcttcgccccgttgcgatggttcttcaccgcgacccgagcgatgtcctcggccgaggcgttgtgacggaccgaatattcattggtcagcagcgcgaaatgcgtgaagggaacgatggcgtcctcggcgaggtttccaatgccggtctcggcgcgccgcaccggattgcgcttgtcgacgccgaccgccagcgcaacatcggagatgccgcttgcgacctcgatgcaggcatggcggaacgcggtcgatccggaggccgacgcattctcgacatgcatcagcggcgcgccggtcgcgccgagatggcgcagcatcggtcgccccgacgccataccaagcagcgcggtcgcgacatagctcgattccaccgccggccattcgatccgcgcatctgcaagcgcggagcggatcgcggtgaggccgagcgccacataaggggtctcgctcgggttctgatagcgatgccagccgatgccgacgacgtagaccggccgcagctcgttgagtgatcgtgtcatggcgaagctccggatcgatcaggatgcgatgctgaagcggaggtcgagcgcggtctcgccggtctcgctctgcgtcgtcggaacgagtctgcccgtcatgcgctgtcccggcgcaaccggtgggctgtcatcagcgagcagggtgcggatcacaggcccgtcgtcgagtgcgactttgacgatagtgaagggggccgggcggttcttgtcggcgtgcagatgaacggtcgcttccgcaagcagcgtgccttcggccgataattcgcagggcgtcagcgcgtccccatagctgccgcagcgctcgcagccataggtctgcatcgggaagaagacatatccgcagcggcaccggccgcccttgaggcgggcgctcgttccggccaggtcagtcgagcccgcagaataaagtccgggtttcaatagcttgtctcggggcatgcgttccctccaaagaaacttgttgactgaccaacaaacattattctagcttgaatgcaagcaagaagtcgccgcacggcaaagggagcgaagctgaatggcacgagcagttcgacgcgcgcaggagccgcgagatgacgcaccgacgtcacggcgaacgcaggtcgagcgccgcgacgaggcggagcggcggatcctcgaggcggccgcgttgatcgtcgctgagaacgggctcgaggcgatcacgctggcggaggccggcgcgcgtgccggttacagccgcggattgccgtcgcactatttcaagaccaaggcggatctgttgtcggcgctgggcgcctacatcatcgattcattcatcaacgaccgccgcgccgcttcgccggagctgaccggctatgacggcctgatcgcgtcgttcaaatactacttcgtgatgccggcccggacgcctgtcatggcgcgcgcgttccacgccgtgctggccggtgcgctcaccgtgccgccgatcaccgccaccgtcgccaagctcaatcgcgaaacgcgaggtgagatcgccgcgggtctcaaggcagggatcgccgcaggccggttgagacccgacatcgatctggagaccgagagcgcgctgatcctcgccggtctgcgcggatcggtggcgcagtggctggtcgatccggagggcgtcgatctcgaggccatcggcgcgcgcttcgttgccacggtggaaggaaggctggcaaaatgagcattctgccgaacagcgttgagtattgggcggccaatcgccccgacgatgtcgccttcctcgaaggcgatcgccggatgacgtggtcggagctcaacgatgccgcaaaccgcgttgcgcatggcctggctgctcgcggcgtcgtcgccggcgacatcgtggtgctgcggacccagatccggatcgaatggcctgttctgagcgacgccatcggcaagctgcgctgctcgttgctcggcttgaactggcggctgacgccggcggagacgcagtacgtgctgtccaacagcggcgcccaggtcgtggtctgcgacgacgaggatccggccgcgctgaagcccgctttcgagggcttgccgatcaagctcgcggtctcgatcggcgcgtcggcgcccggcttcgtcgccttctccgatcttctcgacacctccgccgagccgccgctgcattcaaccgggcggccgccgctgatcctctacacctcgggcaccaccggcctgcccaagggcgtggtctcggtggtgcagccgggcgcccagatggatgcgcgcatcagcgaatatctctccgacgttgcctcgacccggcgcggccagccgggcggcgtgtcgctgctgacgttgcccctgcaccacggcgccgggccgtcgcaggtgtggggcgcgatccagctcggcaatccgaccgtcatgatgcgccgtttcgatcccgaagccgcgcttcgcctgatcgcgcaacatcgcgtcaccaactggaccggcgttcccaccatgtacaagcgtctcgcggcgctgccgaagggcgtgctcgacagctacgacgtgtcgtcgatccgcgcgctctcggtcggcgcggcgccggtgccctttgaactcaagcgctggatcatccgctatttcggcgacggcgtcctcggcgaaggttacggcgccaccgaggtcggcatgatcagcttcctgccgcctgagatgcaggagcgcaagcccggctcgagcggccggccgcacaagcacgtcgacatctcgattcgcgatgccgaggggcgcgagctgccgcgcaaccagtccggcgagatctggatcaggacgccggtgacgatccattcctatttgaacggcaagccgctcggagccgacacgcgcgacgccgacggatacttccgcgtcggcgacgtcgggatgctcgacgacgacggttatctgttcatcaccgatcgcgccaaggacatgatcatcgccggcggcgtcaacatctacccggccgagatcgaggccgcgatcctccggcatcccgatgtccaggacgtcgcggtcatcggaatccccgacgacgagttcggcgagcaggtcaaggcgttctgcgaactgaagccgggtcacgcgaccgacgaggccgcgatcctcgctttctgccgcgaccaccttgcttcgtacaagcggcccaagacgctgtcgatcgtcgatgaactgccacgcaacaccatgggcaagctgctcaagcgcgaattgcgcgagccctactggaagggacgggagagaaacgtatgagtgatatccttgatctggacggcaaggtgacgctgatcaccggtgcgggccagggcgtcgggcgccagatcgcgctgcatttcgccgcgcacaacgcggcgggcattgtcgtcaatgattacttccttgaacgcgcagagcaggtcgcgcgcgaaatcaacgccgccggcggcaaggcgatcgcgctgcaggccgacgtcaccgatctcgcctcggtgagggcgatgatcggcaaagccgagcaggccttcggcccgatcgacgttctggtcaacaatgccggcaatgcgggcgccacgcccgatcccgacgcgcgcaagccgttctgggagaccggccccgaagtctggaacagcttcatcggcgtcaacctgtacggcgtcatcaactgcgcctcggcctgcattccgcagatgatcgagcgcaagggcggccgcatcgtcaccatcatttcggatgccggccgcgccggcgaagcgggccttgaggtctattcaggtgcaaaggcgggcgccgcgggcttcacccgcgcggtcgcgcgatcactcggccgccacaacatcacggcgaattgtgtcgcaatcgccgctaccctgacgcctgcgatcgaggcgcggctcaaggccaaccccgaaatgcagaagaagatgatggagaaatacgtcatccgccgccccggcctgccgtccgacgtcgccaacatggtgctgttcctcgcctccgaagcgagcgcgtggatcaccggccagacctatccggtcaatggcggctttaccttcgcattgtgaggcatcgatgagcaccgagaacgaacaggtcgttctgaccgagcggcgcggccatatcctcgtcgtcaccctgaatcgccccgaagtgcacaatgcgtgcaacctcgcgctcgcgcgcggcatttccgatgcgatggatctgctcgatgcggaggatgggctgttcgtcggcgtcatcaccggcgcgggcggtaatttctcggccggcgccgatctcaaggcggtcgcgcgcggcgagcgtggtgtcaccgagcgcggtggcttcggattgtttcgccggccaccacgcaagccattgatcgctgcggtcgagggctatgcagtcggcggcgggctcgagctctgcctgtcctgcgatctgatcgtcgccgcgcgtgacgccaggatgggattgccggaagtccggcacaatgtcgttgccgtcggcggcggcttgttccggctgccgaagcggattccctatcacgtcgccatggagctggcgctgaccggacagttcaagggcgcggagtatttcgagcgccttggcctcgtgaaccggctcgtcgaacccggccaggcgcttgaggcagcggtcgccttcggcaacgagatactggtcaacggtccgacggcgctcgccgcctcgaaggagatcatcttccaggctgcgaactggaccgacgaagcaggatggaccgcacaggcgccgatcgcggaacgcgccttcaactccgaggaccgcgccgaggggctgaaggcgttcgccgagaagcggaagccggtgtggaaggggcgttgatcatgcacgcccccgaccgccgcagcgcgcttccggccgcgatcgcgcaacggcttcgcttgccgctgatcgcagcgccgatgctgcgcatctccggcgtcgatctcgtgaccgcggtctgccgcgccggcgcgatcggggcatttccgaccgcgaacgccggttcggtcgaggagctcgatgcctggctcacccggatcgagcgcaatgtcgccgagctcggccgtcccgcggcgccgcattgtcccaacctcatcatccgtcagccgcgcttcaaggacgatctcgcctgtctcgtcaggcacagggtcgagatggtcatcaccagcgtcggctcaccggcggccgccgttcagccgctgcatgatgtcggctgcctcgtgttcgcggatatcgcctcgctgcgccatgccgagaaggcgatcgaggcgggcgccgatggtttgatcttgctgaccgcgggggccggcgggcagaccggctgggccaatccattcgccttcgtgcgggcggtgcgcgccatgttcgacggtccggtcgtacttgcgggcggcgtgaccgacggcaccgcgctcgccgcggcgcggctgctcggctgcgacctcgcctatatgggaacacgcttcatcgcggcccgcgagagcatggcgagcgatgcttatcggagaatgctggtcgacagcacgctcgacgacatcatgttgaccaaggcgttcacggggctcgacgccagcatgctgcggccatcgatcgtggccgcgggcctcgatccggccaatctcgacgagtccgtgtcggaggcgcgcgcgcgcgaaaagttcggcggcaagaacgatgccggaggaccacggcgctggatcgaggtctggagcgccgggcattcggtctccggcgtccatgcggtgacgggcgcggccgacatcgtcgacgagatcgccgcgcaatatcgattggcattcgaaataggcgctgcataagacgcccaatccagcggaggaaaccatgatgacgatcagccgtagaacgctgctccggacgacggcggccggtctcgcggcgtcgatcggcggcaaggcatttgccggcgcctcatacgatcccggtgccagcgacgcagaaatccgcatcgggcaattcggaccgctcagcggcccggtgtcgtcgttcggcgtgctggccaatgcgatggatgcctatttccgcatgctgaacgatgccggcggcatcaacggccgcaaggtcaagttcatcaactatgacgacgcctacagcccgccgaaatcggttgaagcggcgcggcgtctggtcgaaggcgacgaggtgctgttcatcgccggcgcgatggggacgccgggcaacatcgccgtgcagaaatatttgaacgcgcgaaaggtcccgcagttgttcctcgcggcagccgcgagcaagctgtcggatccggccaccaatccgtggaccatggtcggcggatcgacctacgagatcgaaggcggcgtcgtcggccgctacatcgccggctccacgcccgatgcgaagatcggcctgctgtatcagaacgacgacgctggcaaggcaacgctctcaggcctgaagacgggactgggcgcgaagtccgcgcagatcgtttgcgagctgaactattcggtcggcgaccccaccatcgattcccagatcgtccagttgaaattgtcgggggccgacgtggtgttcctcatcaccatcccgaagatggcgagccaggcgctgcgcaagatggccgcgctcgaatggcggccgcaggtgtttctcggcgccggcaatgcttcggtgcgtgcgacgctgaaaccggcgggtttcgagaccgcccagggcattctcgcctttgcaacgcggatcgaccccggcaatccgctctgggccgacaccgtggacatgaagcagtacatggcgttcctcgaccgctacgtcccgaacgccgaccgcgcggacgacctctacgccatcggctacacggccgcggcaaccgccgcgcacgtcgtcaggcaatgcggcgatcagctgacgcgcgccaacatcctgcaccaggcgaccagcctgaagaatttcgccgcgccgctgctgattcccggcatcaccctcaacaccacgccgagcgattatgttccgatcaagcagtttcagctgatgcggttcaagggcgaggcctatgagaaggtcggcgagctgctcaccgcggcctgaccgatcacgtcgcccgcacatccttgtgatggatctgacggagtgcgcacgcgtaaaacatgcgcggcacgctgcgtagtccgccacgaacgccgcaacagcggccgatcgtggcatcgcagcgagggaagatacatccgcatgaatccgtcgttcaacatcgtcgaacgcggcgaggggtccttcgtctgctcgcgatcctgcgctgggtcatggtggtgatcttcgtgtcgttcggcatgcagaagttcacgctgcaatcggcgcagggcatcgcgcagttcatcagcaacagcacgttcatctcgtggttgtcggtgttcggcctgcgcggcgaggcccatgtcgacatcgtgctgctgtgcgtctgcctcgtgctgctgctggcgtcgttgccgtggtcgatcgtccggttgcgcggccaataggtcttgcgcttggcgatcgttggttaacccgcgcttaaacgcgcaccgcgtgtgtccgcgatccggaacaggacaattcgtcgcacggcgccgtgtcttgtcactcgaatccggtcgacctacgcaaccctcgattgacgatttgttgctaggatgaaacggtcccccggttgggagcggaatgtgacgaagtcagacatatcgatggccggcccggcgagcgttggtgttgtcttcgtatcagagcacgctcccggcattttcaatcgtcccgcattgcttagttccgttgcaattcccgcaccgtggctggagtgggagggcggtcgcgatcgtgttgtccggcagtgacccgccggaacagcgatcgggccgcccctttccccagccgcgacagatccaagacgcggaatcgtgacttcggacgggcaggttccgtcgcttgagatcgcgatgtcgacatctcgcgatggctgaaacagatcggcctgcggtcacatcgcaacatcgttccgattttgcttttgatgaaatactggttccctgtccggatcgcggccgtcctggttgccgtcgctgttggcgcacttgcgggggcgcgcgcggattccgacatggatgcgcagatcagggacatcgtcgagacggagctcgcgccgaccgcgaccgcggccgatccgggcggcctcgccgccgcggtctatgccggcggccgggtcaccgtgttcgacttcggtttcgccgacgccgccgcagagcgcacgatcacttcggacacgctgttcaacctcgcctcgctgcgcaagctgtttgaggcgacgctggtcgcgctcggcagggagcgcggcgaggacaatcgcgcggcgatgatgccggagatcatgcagcgcatggttcagggctattcccacgacggcacgccgatcggcccaatcggcaatcagcagagctattacgattttccgggcgccggccagatgttctcatcagtgcgcgatctccgcatcctgctgcgggcctgtctcgaccgcggggtgatcgatcccgaattgcgcggagcattgcagatgaccatgcgcgagagttttcgcgtcgatgcgaagttcgggcaggcgatggcatgggagcctgcggctcgacggcgccaccgtcatcgacaagccgggcggtctcaacaatgcgtcggcctatatcggtctggtgcctgcgcgcaggttcgggatcgtgctgcttgccaatcgtggcgactacccgcacgagatcgcgcgctacaggatttcgccggcactcgcgcggctctaaccaaaccaaaataccttagcaattctgcgtgctaatccgatgacacggccttcacggccaagcaggggatgcatgcaaaaaatgcgatggcacggaaccatgatcggctgtataagccggtagcttcttctccatgttgaagaggctgatatgactgacctgcaaaatcctgatttgcacgctcctgatctacatacttggctttcgcagcagccgcacggcttgcggaccttcaggaccttccagcaaaaactcgagatattgagcaaggacgaccccgagcaacgcggcgtttgccggttgttgagcggtctcgtcggtaattatgtcgaaacctttgacgaggagccgttgcctgttgcggtcgccgaccgagcctatggccgcctgctcgatctcgtcgccagccttgatctcaagggcaatcccgaccgccgcctcgctgacatcaaccgtatcgcgtcctgcgatctcctgaactgattgcgccttatctgcgagccgctgcgatctcgcgatacagcgcagcatagcggctggcgcggttgtgccaggagacgtcggtggccatgccggcctgctgcaggcggcgccaggtcaccttgtcgttgaacagcaggttcgctgtgcgcaaaccgtgggcgagcgcctccgaggtcacgggagcgaacttgacgccggttgccgcaccgcccgtgaccgcggcttcgtcgaaacccagcacggtgtcggcgaggccgccgacatcagcgacaacggggaccgcgccgtagcgcagcgcgcagagttgggtgaggccgcacggctcgaaccgcgacggcaccgcgagcgcatcggagccggcctggatcaggtgcgccagcgcctcgtcatagccgatcacgactgcgatccgtccgggattgtcgcgcgcaagcgcggtgtagcgatcctgcaggtcacgatcgccactgccgagcagcgcgagctgaatgccctcgctgagcagcgtcggaatgttgtcgagcagcaggtcgaggcccttctgccatgacagccggctgatgacgccgagcagcatcgcgtccggcaccggatcgagcccgaagcgccgctgcaacgccgccttgttggcggcgcgctccgcgatctgctcggcgctgaagcgcgcggcgatgtcggggtcggtggctggattccacacctcgatgtcgatgccgttgaggatgccgctcagcacgtcggcgcgttcgcgcagcaggccgccgagccccatgccgccctcgtcgctctggatctcctgcgcataggtcggcgacaccgtggtgatacggtcagcgaattgcaggccggctttgagcaggctgatggtgccgtaatattcgacgccgtgaagcgagtaggcctcgccgggcaagccgaaggtcgggagcatgtccggcgagaactggccctgataggcgaggttgtgcacggtcatcaccgtgcccggccgcggctgcccgccatagtgcaggtaggccggtgcgaggccggcctgccagtcatgcgcatgcacgatgtcgggaacgaaggcggcgattgcaccgcggccgatttccgccgccatccgcgagagcgccgcaaagcggatgccgttgtcgggccagtcccgtccgtcggggtcaacatagggattgccgggacgtgcatatagatgcggcgcgtcgagcgcgaacagatcgaggccgtcatgcgagccggcgagtacacggatcggcccgccgtagaattcttcgcggtgcagcagcgtctccgcggaggccagcgccttgagtaccgcaggatagccgggcaccagtgtccgcgtcgcgacgccgtgctctttcagtgctgccggcagcgcgccgaccacgtcggcgaggccgccggtcttgacgatcgggtagacttcggaggcgaccgcgaggacgcggatgggcgtcatgtcgcgagcctgtcgatcatcgattgggtgatcagcgtgattccgttctcggtggtgcggaagcgcttgccgtcgaattcgggatcctcgccgaccacgagcccttccggaatccgcacgccgcgatcgatcacgacgtttctgagccgcgcgccgcggccgacattgacatagggcatgatcaccgcgttctcgacattggcgtaggaattgacgtggacgccggtgaacagcagcgagcgccgcagcgccgcgcccgagatgatgcaggcgcccgagaccagcgaggtcaccgcctggccgcgccgtccgtcctcgtcatgcacgaatttggccggtggggtgatctcggcataggtccagatcggccatgcgcggtcgtagagatcgagttccggcacgacatcggtgagatcgatattggcgccccaataggcgtcgacggtgccgacgtcgcgccagtaggagcggggatcgtcgccggagcggacgcaggaatcgctgaattgatgcgcgacggcgcggccgtgcttgacgatgtaggggatgatgtccttgccgaaatcgtggttggaattcgggtcggcggcatcgcggcgcaattcgtcgtagaggaattgggagtcgaagacatagatccccatgctggcgagcgacttgtccggcttgccgggcatcgccggcggatccgccggcttctccaggaacgactggatcacgccgttgtcgtcgacatgcatgatgccgaagcctgaggattccgcgcgcggcatttcgaggcatccgaccgtgacgttcgcgccgctctcgacatgctgcttcagcatgatctcgtagtccatcttgtagatatggtcgccggcgagcaccaggatgtacttggtgccgtgcgcctcgaggatgtcgatgttctggtacacggcatccgcagtgccgaggtaccagttggtctccgagacgcgctggcttgcgggcaggatgtcgaagctctcgtttcgttccgggcggaagaagttccaaccgccttgcagatgccggatcaggctgtgtgccttgtactgggtcgccaccgcgatgcggcggatgcccgagttcaccgcattggagagcgcgaaatcgatgatgcgcgacttgccgccgaaatagacggcaggcttggcgcgcttgtcggtcagctcctgaagtctgctgccgcgtccgccggccagcacataggcgagggcgtgacgcgacaatggttcatttccgacggatctcatggtcatcctcccagtacttcaggctggccccgctgccttctcttgtccggaaggcctgatcgggcgccaacggggccgatcggaacgtagcaagcgcgccccggttgagcaaagcgggatggcggttttcgttcccagggtttcgcctcccgggcagcggggttgcgacttggttaaagctattgacggcgcgcgatttcggcctagagcaagcctgcgcattttcccgcccaggccagcccgctcatgacagtttcttccgtttccccccaggatatccgtgcaacgcttttgctgcgccgggagatcgcgctgctcgacgtcaggcacgaggcggaattcgccaccggccatccgctgttcgccgccaacatggcggccgggcggatcgcgctcgaagccgagctgcgcctgccgcgcaaggacgtaccgatcgtgctctatgacaatggcgagggactggtcgccgccgctgccgaccagttgcgggcattgggctacagcaatgtcgctgcgctcactggcggcctcgaggcctggaaagaggccggctatgaggtgttcgaggacgtcaattcctacgccaaggcgttcggcgaattggtcgaggcacgacgccataccccgtcgttcagcgccgacgaggtcgccgcgctgatctcgaacaaggccaacatcgcgatcctcgatgtgcgtcggttcgacgaatatgccaccatgaacatcccgggctcggtcagcgtgcccggtgcggagctggtgctgcgcgcaggcggcgcggcgcccgatcccgacaccaccatcatcgtcaactgcgccggccggacccgttcgatcatcggcacgcaatcgctgatcaatgccggactgcccaacaaggtgcgggcgctgcgcaacggcacgatcggctggacgctcgcgaagcacgatctcgagcacggcgccggcaagcgcggcgatgtcgggccgttcgcgggcgcggctgacaatgcgcgcgacgtcgcctatcgggcgggcgtccgtcacatcggcgcggccgagctcgccgcgctggaagccgacgtgctgcgcacgctgtatcgcttcgacgtgcgcgagacggaagaatatgcggccggtcatctggccggcttccggcattatgccggcggccagctggtgcaggagatcgacatggccgcgccggtgcgcggcgcccgcatcgtgctgagcgacgacaggagcatccgcgccgatatgacggcgtcctggctcgcccagatgggctgggaggtgtatgtgctcgaaggcggctatgacggaccgctcgacgtcggtccaccgcgcgtcgtgccgcggccagatcccgcgcatcgctaccggcgtccgtatgagggcaccgatgtcgcggagcaggcgatgcaggcctatctcgattgggagtacggcctggtcgaccagctccgtcgcgacggcacgcacgggttttatgtgatctaaggagcgatgagatgcggtcgagctttgaccgcaaagagagcccgtcattgcgagcgcgagcgaagcaatccatctgtccgcgagtgcatggatagatggattgcttcgtcgcttcgctcctcgcaaggacgaaaggactgcgcgaactcagtccgggctgaacgcgtcgtacaccagcttgcggaacatcggcgtgatgcgctggcgttcgttctgggtctgctccagcatgatgtagatcatgtcgagcttcggatcgacgccgaaataggttccgctgccgctgtcccatttcagctcgccgatcgagccgggcggcggcggcctggcaatgccgggatcggtacgcaccgcgatgccgtagccgtagccgaacccgtcgccgggaaagtaccagtagtcgcggccgacgccggaaccaggcccgatatggtccctcgtcatgtccttgaacgcggccgggctcagatatcgcttgccgtcgagctcgccgccattgagcagcatctgcgcgaagcgcgcataatcgagaatggtcgacaccaaaccgccgccgccggattcccactccggatgcgcgcgccggtcgttctccccgtcgatcaggatggtgtccgagggcagcggctcggctagccgcgtccgttcggtctccgcatcgagcacaaatcgggtgtcgttcatcttcaggggatcgaagatgcgctccttctcgaactgatagagcgacttgcccgagacgatctcgatcacccggccgagcacgtcggtggaatgaccatagcgccacagcgtgccgggctgccgcgacagcggcagcttggcgagccgcgcggtgaattccttgttgtcgaatttcccgtcgaacaggtggccgtcgcggtagatcttctggatccagtcggcgccgatatattcgtaggtgatgcccgaggtgtgccgcatcaggtcttcgatcgtgacggggcggatcggcggcaccagctccaccttggccggatcgttgccgccatcgggttcgatggcgaccttcacgtcggcgaaggccgggatgtatttcgacagcggatcctgcggcgacaatttgcccgcgtcgaccagcatcatcgcagcggtgttggtgatcggcttggtcatcgaatgcagcgcgaacatcgtgtccggccgcatcggcgatttggtggtgacgtcgcgatagccgaaagtcttcagatagaccggcttgccgtgctgctggatcaggatggcggcgccgggaatgcggccgctcgtgacctcatcgttgaagaacgcggtgatgcgttcgagtttctccggcgacggggcgggggcgtcggagccgcgcgccgcgcccgatgtgacaagcgcaagacaggcgaccgcggtcaatgctccgcgaaccatccgcatggcgaggtggatcgtcggccgatcatatccgcatgacattgaaaaaagccgcccctgcctgatgccttgaacgccgcagtcttagcgcaggcgcccccgcaccataatcattttcaggcgacattattcccggacgatgggcgaaattcatacaatttgcgtggcgccgaccggcgtccgcacggcattcgacagcacttgcagggcctggctcagttcggcgcggttgcgcgcggcgccgagcgacacccgcaggccgcgcggtgccgcttcacccgtcgcaaaggcgtcttcgccgaccacggcgaggccattgcgcatcagatgcgacagcaggtcggtgccatcgaaatgtttcggcaacggcatccagagatggtggctggccggccgcgctgcgtagctgacgcccttgaggaagcgggccgcgagctgctggcgcgcggccgcctcgttgcggatggcgcggatgatgtcggcggcgatcccggagcgcagccattgcgtgaccagcgccaccatcagcgagggcggcatctgcatggtggcctgcatgcccgcgcgcatgcgctgctcggcgctcgcatcgggcgccagcagataggcgacccgcagcgccggcgcgatgcatttcgcgatgctcgcggcaaggtaggtgtgttccggaatcaggctggcaatcggtgccacctgcggttcgagcgggccatagacgtcgtcctcgatcaggacgcagccgcgcttcctgatgatatcggcgaccgccttgcgccgcgccgcgctcattgtcgccgtggtcgggttctgctgcgtcggcaccagatagactaccttcggcttgtgcttgcggcaggcctcgtcgagcgcgtccggccgggcgccctcggtgtccatcgcaacgccgaccaggcggacgtcgagccgcgccgccgcggccttgatgccggggaatgtcagcgcttccgtcagcaccacgtcgccgggcgatgtcagcgccagcagcgcgttgaagatgatcgcctgcgaacccggatagatcacgatgcggtcggccgatgcattcggcacgcgcggcgcgagccacgccgcgccgacctcgcgctcgtccgcggtgccgccgggccgggtatagccgagataggctgaaaatccggcctcggagcggatggtcgcaagtccctgtgcgatacgcaggtcgagattcgcttccaccggctgcggcggcaaattcatcgacaggtcgatgttgaccggagcgggcaggtcggaggccgcgcgcgccgtggtctccgagacaaaggtgccctggccgacgcgggcgtcgagcagccctcgccgtcgcgcctcgccataggcgcgcgtcacggtggtcagatcgatgccgagcgcggtcgccagcgcgcgatgggtcggcaggcgttggccgcgcaccagccgaccgctcgcgatgtcggcggcaagtgcatcgacgatgcgcagaaacatcgggccgtgccattccgaaactgtagggatccaatccatgcaattcgacgctttgtctttgattgtatgctcttagaggcatattgtatggatcatcagatcaggtcaaggacaacgaccaaggacgactgcgatgaccgagatggtttccctgccaaaggcgatgttgcgcggcttcaccatgaagtgcccgaactgcgggcgcggccacctgttcggccgcttccttaaagtggctgatcattgcgaggtctgcagcgaggacttcaccccgcagcgcgcggacgatttcccggcctatctcgtgatcgttgtggtcggccacgtcgtggtgccggcgctgctctggatggagatgacctacgcgccgccggcctggctgcaactggcaatctggctgcccgtgacgttgttcagcgcgcttgcgttattgcagccgaccaagggcgcgatcgtcggcttgcagtggcagctcggcatggaggggtttgcggcgacgcggcgtgcggtagcgcgggcgccgagtgccgttgggcgaacacgccaagcctaacgtgatgtcgtagcccgaatacagcgaagcgaaatccgggccggaatcttcaaatcggatgatgatggggtcggaacatgcggcccttctccgtcaccagcaccacggcgagcgctgccagcgtgcagagcaagaagccggtcgcgaacggcagcagcgtgccgttgtaatcctggccgatcgtggtgccgatgccgatcccgagcagggtggtgattgtgccgtaaagcgacgaagcggtgccggcgatcttgccctgcggctccatcgccaatgctgtgaagttcgccattatcagcccgaacgcgaacatcatcaggactgacagcgccatgaacagcgacagcgacagcatgtccgtcttcaccgcgacgaacaatgccgcggcgacgacggcaaagccggtcagcgccgcgtgcgagatcacgcgcatgccgatgcggccgacgatccgcgaattgaggaagccggcgatcgcgacgccgaccgcacaggcggcgaaggcgaccgggaagtaatgcccgagcttgaagacctcggtgaagatctgctgtgacgagaacacgaaggcgaacagcgagccctgcacgccgccggcggcgagcgcatagccgagcgtctggcggttggtgacggtctggcggaacgcggacagcacctccgggatcgccagcgacttgcgcagctccttgggcagcgtctccggcatccgcatcgcgctccaggccagcgcgatcacgccgtagatcatcagcagcacgaagatgccgcgccagtgcgtcagcagcatcacggcctggccgaatgacggcgcgatcaccggaaccgcgatgaacaccatcatcgccagcgacatcacgctcgccatccgtcgtccggcgtagcagtcgcgcacgatcgaggtcgcgatcacgcgggttgccgcggtgccgagcccttgcagcgcgcgcgccaagagcagcgtctcgaatgacggcgcaatgatcgcgagcaggccggcgatggtgtagacggtcatgccgccgagcagcaccgggcggcggccgaagcggtccgacagcgggcccatcacgaactggccgacaccgaagccgaccaggaagatcgacagcaccatctgcgggcggttggcgtcggcgatttggaacgctgagcggatgttcggcagcgccggcagcatcatgtccatcgccagcgggttcagcgccatgatggaggcgatgacgacgacgaattccggaaagcccatcgggcggtggcctgaggaaacccaggcatcggcattgatgtcagacacttacgacctcttggagagccccggatcatagtgttcttgctgcgttgcacaatcggcatttccagatgggagaccgtcggcgagggctgaggtaatccggtcatggaaccggaccggcggcctcggcctgggcgatatcgttgctgctgcaactatttagctcgtgccgcgcgaaaacctctgctatccccgtaccagcatccgcacggggcaggcgcatcgcgtcggtcacgcccgcgcggccaagaactgattcaagaacgggtttggggaggccaatgtccatcgagatctccgcgcgctcgcgcggcgctgaactgtcggatgaggagcgcaaggtcctcaccgcaacgctcgtcggcaccaccatcgaatggtacgacttcttcgtctacgcccaggcggcgggcctggtgttcggcgcgctgttcttcgcgccgatgaacgcgaacaatccgctgctggcacagatcgtctcgttcgcgacgctcggcctgtccttcctgttccgtccgctcggcgccatcgtctgcggccatctcggcgaccgcttcgggcgcaagaacatgctggtggtcacgctgctgctgatgggcgctgcgaccgcgctggtgggcctgttgccgacctatgcgcagatcggcgcctgggcaccggcactcctcattctgcttcggatcctgcagggcttctcggcgggcggcgagtggggcggcgcggccctgatggcggtggaatcggcgcctcgcgacaagcgcagcttcttcggctcgtttccgcagatcggcacgccgctcggtatgattctggcgaccggcgtgctgtgggtgctcaccgcgacgctcggcaagcaggcgatgatcgaatggggatggcgcattccgttcctgctatcgattcttttgatcgtcgtcggcatcgtgatccgccgcaccgtggaggaatccccggtgttcaaggcgatgcagcgccggcacaaggaatcctccgcgccgctgaaggagttgatgcgcaatcatgccaaggagattttccgcaccgcgctgatcttcatggccaataatgcggccggctatatcctgatcgcgttcctgatcagctacggtgccaacacgctgaagatgccgtccgagcagctgctgctgatcggcacgctggcggcggtgagctggttcatcttcacgctgctgggcggcatcctcggtgataagatcggccgcgtgcgctgcttccagatcggatacggcctgatggtgctgtgggcggtgccgatgtggttcctgatcgacagcaagaacctcttgctgttcttcgtcagcgccgtcggtctcaccattgcgcttggtttgtcctatggcccgcaggcggcgctctatgccgagctgtttccagccaaggtgcgctattccggcgtctcgatcggctacgcgctcggcgccatcttcggcggcgccttcgcgccgatgatcgcgcaatggatcatcggcagctacggcgagtcctggcgcgtcggcgtctacatcgcggtgctggcgctgatctcgctgatcacggtctcgaccatcaaggacccgcagggcgtcgatctgaatgtgaatgacgcgggcacgtgaggtgtgcagggcggattagccgcaaggcgcgatccgccactgcctctgcgttgcggtggattgcgccggagcttgtcgtcgggccgcgctttgcgcggaccccggtgggccaatccaccctacgcagcgctggaacttcggcgcgccattcagatgcgggcgccgcggttgtagccgtcgacgagctgattgtagtcacgcatcagccgggccggcgacccctccaccatccagccggcgccggggttgctcagcatcatcttctcacccgagctgtaaggcaccttgtcgcgaacccggcgcatcagttgcttcgccgtggtgaggaacgatttggcgcttccgatgaacatcgagccgagcttggcgtcgccgtccttgccggaggcctcctcggttgccttcaccgtggcctcatactcgttgagcgcctgggtgatcgcgtcgatgtcgggcttgtcggcctgctgcgcgcgaagcacgcgtttggcctggatcatcagggcctcgacataatagtgcgtcttgcggccttcactcgcctcgatcgcggccagctgctcggcggcgtgcttgtcgttgatggcctcgacgccggcgcgcaacgccttgtcggcgccggcgaacgcatcccaggccgcgaccaggcgcggatgcagcgccttgcccttggccatcttgtcgtccttgtagttctcctgggtgtagtagtcgtccgcctccttcaacagcggctcgagcgtggtgacggcggcaacataggcattcgcggcggcttcaagcccggcatcgtgcgggtccgccgcattggcggctgcgacgctcgtcttgcagtcggacgtgtcgtagatcgtataggtgccgtagatgatccgctccttgccggtgggaccgctcttggcggcccaggaaaaatagcggtcgcgggattcgtacgatcgcgccgagaggcggttgatgcacccgacataggcattcatcttttgcgtcagttgcgcattcgccgatgacgcaggcggggcctgctgggcggcggccggttcgagaaaggaaaagacggctgcaatcacaaggaaaggggtatttcgcatcgggaatttgccctcatctcggccggaagttggccgcctcagtctaggaaggttatgtgacggcaggaggtgtccgtcacgcgcctccgccgaggccgcgcggcacactatcgacagacttgtttgtcggctacgggccaaaagccactaccgccggaacaaggcgcttatcggtgcgcctggttgattccgagcaatgccttcagcttcttgaccgcgctgtccggcgtcgtcagcacctcgcggccggtggcttcggcgacacgctcggcggccggcgccatgctgtactgcgcgagcgcgatcaggtcgcagtcgcgcaagtccttgctggcctcgaccacgatgcggtcatgctccgcacggtcgccgcgatcgagcgcggccagcgcgccctcggcgagcttcggcaccagcgtgacctcagacggaaattccggcggcatcgacaccagcgtcggcgggaaggtcgagagcaggccgatccgctttccccgtgcgaccgcctgttcgatcatggcttcgttcggcttcaggaccggcatcggcgcctgcgcgcgcgccaccgcctcgatgcagggcccgaatgccgagcaggtgaacaggatgccgtcagcgccggtgctggtcgcatagcggcccatcacgaggaagcgttcggtcatgcgctcggtgagcttgccctcgcgcgcgagatcagccgacaggctgtcgtcgagcagattcatcagccgcgcttccggccaatgtcgtgcgaatgacgcctcgatcggcacgatcgagtgcttcagggcgtgaatgagcgtgatacgcatggtcgctgctcttctccctctccccgctcttcgcggggagagggttggggtgaggggctctatcgtcgtaacaggtcagagggggatatgcggagactccccctcacccgtcattcaagctttgcttgaatgacgaactctccccgcaagcggggcgaggtggagatcacttgaacgggatcgcgtacatcaagccgcccttgctccaggtggcgttgaggccgcgctcgagcttcagggggctcgccttgccgacattgcgttcgaagatctcgccgtaattgccgccggccttgatcgccgggaccagccatttgttgtcgaggccgagccggctgccgagatcgccggatacaccgagcaggcgctggatcgccgggacctgcgacttcgtcatctcgtcggcgttcgactgggtgacgccgagctcctcggcttcgaccaggccgtaatgcagccaggtgacgatgtcgctccagacctcgtcgccgttgcgggtgaacgggccgagcggttccttgctgatggtcagcggcagcacgacgtaatcgtcgggcttcggtgctgcggtcgcgaccgcgccggcgagcgcggaggcgtcctgggtcatggcgtcgcagcggccgccgaagaaggcctggtacatggtgtcgggccgatcgaacaccagcggcttccagtcgatgccgttggcacggccgtaatcgccgagcgtcacctcatgcgtggtgccctgggcgacgcagacggtggcgcccttgagatccttcggctccttcacgccgaggtccttcttcaccacaaacccctggccgtcgtagaaattgaccgggccctggcgcaggccgagcgtggtgccgcgcagataggtctgcgtcgagttgcggtagagcacgtcgatttcgccggactgcagcgcggtgaagcggttctgcgcggtcagcgcgacgtagcgcaccttggcaggatcgccgagcacaccggcggcgagcgcgcggcaataatcgacgtcgaggcccttgaaattgccttgcgagtccggcgccgaaaagccggcaaagccggtcgagacgccgcacaccagcgtgccgcgctgcttgacggtgtcgagcgtcgccgcgcttgcggttgaaagccccgcgacgagcaggctcgccgcgatcaatacgttcctcattctgtcctcctcctaatgaccaacgtctttcaatgcgctgtcgactgcgacaccgagcctttccacgatcatgtcgatgtcgccggacgtcgcgatatagggcggggcgagcagcacatggtcgccgcgctggccgtcggcagtgccgccggacggatagcagccgagcccgccagcgaacgccgcggacttgatccgctgatgcagcttcagcttgggatcgaacgactgccgtgtgccgcggtcagcgaccagctcgatcccccagaacaggccgcggcccctgatgtcgccgacatggcggtgattgccgaaacgctcgaccagccgctgctcgagctggcggccgcgctccttgacctggtcgagcagcctctcctcgctgatgaccttctgcacttcgagcgcggcggcgcaggcgagcggatgcgccagataggtgtgaccgtgctggaacgcgccggagccgttgcgcacggtgtcgacgatgctgccgctcgcaagcatcgcgccgatcggctgatagccgccgccgagccccttggcgaccgcctggatgtcgggtgcgatgccttcctgctcccacgcatgcagcgtgccggtgcggcccatgccgcacatcacctcgtcaaggatcaggagcgcgccgtggcggttgcagatctcgcgcaccgccttgaagtatccctccggtgccggcacgcagccggcagtggcgccgaccacgggctcggcgatgaaggccgcgacattctccgggccgagccgctggaattcggcctcgagctcggcggcgaggcggccgacgaacgcggcctccgattcatcgtcgcgcttctcgtgataggcaaaagcgggcgtgacgtgactgaacgacggcgacagcagcggcgcgtagggctcgcggcgccaggcattgccgccggccgacagcgcgcccagcgtgttgccgtgatagctctgccggcgggcgatgaagcgggcacgcttcggctcgccgcgctcgatgaaatattgccgcgccagcttgatcgaggcctcgatcgcctccgatccgccgctgacgaaatagacatagccgaggccgcccggctcgtggccgaccagccgttcggcgagctcttccgccggctccgacgagaagaacccggtatgggcataggcgatcttcgacgcttgtcttgcgatcgcggccagaatccgcgggtgctggtggccgagacacgagacggcggcgccgcccgaggaatccagaatgcggtggccatcctccgcgatcaaccagacgccttcaccaccgatcgctttcggcggggtctcgcgcaggctgcgatgcatcacgcggctcttgttggcggccatgacggtcatcctttctcgacaaaatattgcgacgtctcggcaagccggccctcggtctcctccagcttgcgctttgcgcttgcgcccccgagcgtgaaggcgacggcggccagcgactgcgccaccgcgatcgcgccggtgaggctcgggaagaagccgggggaggaggcggcctcgaacagcagcaggtgatcggcgccctcggccatcggcgcgctgatcgtgtcggcgatcgcgatcagcgtggcgcgcgcttgatgcgccgcgcgcgccgtctcgacgctgaccagggtgtagggcgcaaagccgatcacgaccacggcgtcctcagtgcggaaggcaccgtggtcgagatcgaacggaccggaaccgccgaccagctgcacggcgtcgggccggaacaggcggagctgataggtcagcagttccgccacgctgcggcagctgcgaaatcccgtgatccagatccggtttgccgcgtgcagcgcacgcgcggcgtccgcaatcgcattcgcggaaattcgcgcaagccctgccgcttcggcttcgagcttgtcgtgaatcagtttgacgtcggcattcggcccgccgcggcggctcctggcgcggccggagaacggcgagccctgcgccggccgtcgcgcctcggtgagtgcggcgcgcaattcgtcccagccggaatagccaagcgcttttgccagccgggtgaaggaggccgggtcggcgccggcgacggcggcaagctcgcgcatcgagcgggtggtggcgtcgtaatcattggctgcgacaaaccgaccaacctcctgcaagcgcattggcagcgacggcaatgcgctgcacaattcgttcaggggcgatggtttcggctgagcctgggccatgaaacatatgttgcacgtttatcaatttggtgcaacatatgacgcgcgcgcatagcgcatggcagcagatcgcttctcattgggatccttgcgctgtgacgacatcgacgccgaaacgccctcccgcccgaccctggcggttttcgctcagcgatccccgcgtcgccggcctgttctggcaggtcctggtggttgccgttgcagttgccgtcatcgccttcctgtggtcgaacgcggtccataacctctcggtgcggcgtatctcgaccggcttcgccttcctcggccgcgaagccggcatgccgatcgccgacagctggatcgactacacgccgaaggacacctatctgcgcgccttcatcgtcggcgtcgtcaacacgctgcgcgtcgccgtgatcggcatcgtgttggcgaccgtgatcggcacgctggtcggcatcgcgcggctgtcgtcgaactggctcttggcacggctcgccgccgtctatgtcgaggtgctgcgcgacctgccgctgctgctgcagctgttgttctggtacgtcctgatgcagggcctgccggcggcgcgccaggcgttcaagccggtcgaaggcgtgttcctgtccaatcgtggattgatcctgccgtcggtcccgctaagcgcgtccaactggtggaccatcctcgcgctggtcgcaggtctgaccgtcttcaccatcgtcaggcgccgcctgatcgcgcagcagatgcttgacggcaacgcgcgcccggcgtggccttacgcgctcggcctgatcgtcgcgctgcccgcgctggtgtcgttcctcgcgggcgcgagctggcgcatcgtgctgccggagctgcgcggcttcaacttcgtcggcgggctgaccctggcgccggaatactttgcgctgctgatcgcgctcgtcacctatacctccgccttcatcgccgagatcgtgcgcagcggcatccaggctgtgccgcgcggccagtcggaggccgccaaggcgctcgggctgaagcgcggcttcgtcttgcaacacatcgtgctgccgcaggcgctgcgcgtcatcatcccgccgatgaccagccagtatctgaacctgaccaagaactcctcgctcgcggtcgcggtcggctaccaggacatcgtctcggtcgccaacaccacgctgaaccagaccgggcaggcgatcgagtcgatcgcgctgatcatgatggtgttcctcaccatcagcctcggcatcagcctgttcatgaactggtacaacgcgcggatcgcgctggtggagcgctgagatgagctcggtcgcccatgtcccgcaggatccgctgccgatcggcccgcgtcccgccccgcgcgcgctcggcggacatctcaccgcctggctgcgcgccaatctgttcgcctcgatcccctccagcatcatgaccttgctgctgctgttcctgctcggcaaggcctgcatcggcctctggcaatggggcatcgccaatgcggtctggatcgtctccggcagcgacaccagcgcatgccgcgcgctgcgcggcgtcggcgcctgctgggccgtcgtccccgagaagtatcgcttcatcctgttcggcacctatccgttcgacgagcagtggcggccggcgcttgcggtgctgatcttcatcgcgctgttcgtggtctcgagccgccgcagcttctggcgcaaggagctgttcctgctgtgggccgcggccctgatcgtgatcggctgcctgatgtggggcggcttcctcggcctctccttcgttacccaggatcgttggggcgggctgccggtgacgctgatcctcgcgaccttcggcctcgcgttcggcttcccgctcggcatcctggtcgcgctcggccgccgctcgaaactgccggcgatccgctcgctctgcgtgctctatgtcgagctgatccgcggcgtgccgttgatcagcctgttgttcatggcaagcgtgatgttcccgctgttcatgcccgacggcgtcaacatcgacaaactgttgcgcgcgcagatcgccttcatcctctatgccggcgcctatcttgccgaagtggtgcgcggcggcctgcaggcggtgccgcgcggacagtatgaagcgggcgatgcactcggcctgtcctattgggagaagcacgcgctgatcgtgctgccgcaggcgatccgccacgtcatcccgccgctggtcaacaccttcatcgccttcttcaaggacaccagcctggtcctgatcatcggcatcttcgacctgctgacgacggcgaagaccgcgatcgtcgatccggcctggcagtccttcagcgtcgaggtctacgtcttcgtcggcgtgatctacttcgtgttctgcttcgcgatgtcgcgctacagccgcagcctcgaggcgcagcgcggaacgaactgagcgatcgcctctcgccaattcctagaatgttcgctctgccgccatgcccgggatgagctccgggcacgtccccttgggcggtcaccccttgccaagccatcccgatcctatttatgatcataaaatggataaatcggccctgccatccctggacccgtcccggcgcgcctcgatcaagcgcaagcgctccgacgctgttgccgacctgatccgcggccacatcttccaggccggattgcagcccaacgaccggctgccgcaggagagcgagctgatcgagatgttcggctgcagccgctcgaccatccgcgaggcgctcaaatcgttggaagtgcaggggctggtgcagaacaccacggggccgggcggcggcgcgcgggtggcgccggtgtcgatcaaccggatcgtcggcctgctcagcaactacttctatttccagtcgatcagtacggcgcagatctaccagatccgccgcctgatcgagccggagctcgccttcagcgtggtcggccacctcacggcggcgcatttcgccgcgctcgacaaggcgatcgaggttcaggagcatcatccgggcgggcccaccgactgggagcatcaccgccacgccgagatcgatttccacgacatcatgatcgaggcctgtcccaatccgctgctcggcctggtcgcgcgcttcgtcaacgaggcgatccgccatttgatcggcaagctcggcgtgcaggaattcgcatcgagcttcacctgcgagaacatcgagtttcacaagcgcctgatggctgcgttccgctccggcaatgccgcgcgcgcccgccgcgtgatgctcgatcacgtgctgagcgccgaggccgtggtcgtcccgaagggagatcggcgcgtcgatctgcctgtctttcaccagccgttgcggctcgactgaagatttgcgtaggaggcgacgacgatggtcatgcggcgcgagaatgagttgtggagctggtcggccgtcgatctggcgcgtgcgatcgcgacgcgtgcgatttcgagccgcgaagcggtgcagtcgagccttgatcgcatcgccaaggtcaatccggcactaaatgccgtggtcgaggtgctgacggatgaagcgctggccgaggcggatgcggcggatgccgcggtgagatccggcgcggagctcggcgtgctgcatggcgtgccggtcacgatcaaggtcaatgtcgatcagcgcggtcacgccaccaccaatggcgtcgcagcgttccgcgacgtcatcgccgccgaggacagcccggtggtcgcgaatttccgcaaggccggcgccgtcatcgtcggccgcaccaacacaccggcgttctcgcaccgctggttcaccaacaacgatctgcacggcgcgacctacaatccgtggagccgccggctgacaccgggcggctccagcggcggcgccgcgtcggcggttgcttccggcatgggcgcgatcgcgcatggcaatgatttcggcggctcgatccgctatccggcttacgcctgcggcgtcgccggcctgcgcccgaccccgggtcgcataccgtcgttcaatccgtccgcgaccagcgatcggccgatcaccgcgcagatgatgtcggtgcaggggccgctcgcccgctcggttgccgatctcggcgtcgcgctcgccgcgatggcgcagccggatccgcgcgacggcacctggctgccggtgccgctgcaaggcgcacagctcgagcggccgatcggggtcgcgatcgcgccggcgccgttcggcgacgaggcgccggaggtcagtgcagccgtgcgcgctgccggacgctggctcgccgaggcaggctttgcggtggaggagaccacgccgccgcggctcgcggaggccgccgatctctggcatcgcctcgtcatcaatgaggagcggcgcgtgctggcgccgctgatccgcaagttcggcgatgcgaggtcccgctacaatctggattgccatatcgcctacgcgccggagctcgacggcgaccaggtgctggcctgcttcgagcagcggcttgcgatcgtgcgggcctggcagctgttccaggagcgctgccccgtcatcatccttccggtctcggcgcagctgccgttccgcttcgatcaggatcaggaaggcgctgacgtcgtgcgcgcgctgctcgacgcgcagcggccgctgctcgcggtgcccgcgctcggctttccatcggtcgtggtgccgaccggaaccgccggcggcgtgccggtcggcgtgcaggtgatcgccggccgtttccgcgaggacatctgtctcgcggcggccgcggtgatcgaggcgcgcgcctcgacgctgacgccgatcgatccgcgcgactgaatcaacaacaaagctctgaacacaacgggagaacaccaagtgacgaatgcaccgatctggcaatggtcagccgtcgagaccgccgcggcgatcaggaacgacaaggtgacgtcgaaagaggtggttcgcgcccacctcgaccgcatgcatgccgccaacccggcgctcaacgccgtggtcgtcgacctcggcgcgtcggcgatgcaggccgccaaggccgcggacgagacgctggcggcaagcaagcgcggcggcagtgaggtcggcccgctgcatggcgtgccggtcacgatcaagatcaacatcgacgtcgagggccaggccaattcgaacggcgtggtcgccttcaaggacaatatcgcgccgggcgactcgcccgtgacggccaatctcaagaaggccggtgccgtcatcatcggcctgaccaacacgccggaattctcgctgcgcggcttcaccgacaacccgctgcacggcctgacgcgcaatccctggaacgcggaggtgacctgcggcggatcatccggcggcgccggcgcgtcgatcgcggccggcatcggcaccatcgcgcatggcaacgacatcggcggctcgctgcgctggccggcgcattgcaacggcatcgccaccatcaagccgacccagggtcgcattcccgcgttcaatccctcagccaccgcagaacgtccgctgatggcgcagttcatgtcgtcgcagggcccgctggcgcgccatgtcgccgacgtccgcctcggcctcgaggtgatggcgcagcgcgacccgcgcgatccctggtacgtgccggcgccgttgcagggtccgaagccggccgcgccggtcaaggtcgcgctcgcgaagatccccggggacatggtgaccgaccgtggcgtgatcgcgcttcagcgcaaggcggccgatcatctcgccgatgccggctatgccgtcagcgaggtcgacgtccccgatctgaacaaggtgtggcagctctggtgcgatctgatcatgaccgagacccgcgtgttgcagcaggaccagatgctggcggtgagcagcgccgacttccagaagacgttccatggcttcatcgcactggcaaatcagttggaccaggccggctacatgaaggcgatcgccgcgcggtcgggccatatcaggaactggatgaccttcctcgagcagtacccgctggtgctgatgccgaccacggtgcgcaagacgccggaggtcaacgccgatctcggcggcgatcagcgtgtcaaggatttgttctggaacgacctgcgcttcatttcgtcgatgaacgtgctggggctgccggcggcggtggtgccggtggggctgcatgagggattgccggtcggtgtccagatcgtcggctcgcgctatcgcgaggacatgtgcctcgacgccgccgaggcgatcgagcgcaaggccggcattctgaccaggcaattgtgggaacggcgctgaggcgatcgcgacctcatttttcaatcgtctgatctagagcaagatgagtttggattgaatcggatgcgacctctccccattggggagaggtcgatttgcgcagcaaatcgggtgaggggccgcagctccaacgagagagcgtaaccccttgcccgggcgctgcgcgccgacctctcccaagggagaggtgaacggctgccgcgccagacaacactctcgtcatgctttagggaacgccgcggcggcacctcgttgcggtgttcgcttgtttggcgtagggaccgtgttccttctcccggaattctggcgcgaaatcgcagagcgccatgcccggcggcggggttgtcggtgatccctgattgctgcaggagatcggccgaaccatccgaatccctgggaacgaaatgtccatcaccaaacgctcgcatctcctggccgcaatcgccgccgtgtgtctctcatttgcagccggcgctgcccgggcggaggatggtgtgctgcgggtcggcatcatcaccgacatgagcgggcaatattccgacggcaatggcccggggtcggtgatcgcggcgcagatggccgcggaggagatcggcggcacggtcgccggacgcaagatcgagatcatctcggccgatcaccagaacaagcccgacgtcgcgaccggcatcgtgcgcaactggatcgacaacaagggtgtcgacgtgatcgccgaaggcgtcaattccgcggtggcgctcgcgatccagaccgtcacgcgcgaacgcaagaagctgtttttgatctcgggctccggttcatccgatctcaccggcaagcaatgctcgcggaccagcgtgcagtggacctacgacacctatgcttcctctaacgcgacggcgaaggccgtggtcgcgcgcggcggcacgccctggttcttcctcacggccgattatgcgttcggtcaggcgctggagcgcgatgccagcaaggccgtgacgtccgccggcggcaaggtgctgggcgcggtccgccatcccttcgacaccgccgacttctcgtccttcctgctgcaggcccagtcctccggcgccaagatccttgcgctcgccaatgccggctccgacttccgcaatgcggtgtcgcaggccgacgagttcaacatccgcgccagcatgcaactcgtcgcgctgcaggtgacgctcaccgacgtgccggcgctcggcctcgcgcatgcgcatgatctgctgttcaccgattccttctattgggaccgcacgcccgagacccgcgtcttcgcccaggagttcttcaagcgccacgggtcgatgccgaccgcctatcaggccggcgtcaactcggcgctgcggcactatttcaaggcggtagccgccaccaactcggccgattccgagaccgtgatcgcacagatgcgcaagaccccggtgaatgatttcttcgcccagaacggcgtcgtgcgcgaggacggccgcatggtgcacgacatgtatctgatgcgcatcaagaagccggaagagtccaagggcaagtgggacctctacgagtacctcgcgacggtgccgggcgaccaggccttccgtccgctcgctgaaggcggttgcccgtacatcgcgaaggcgcagtaggcgaggcggtcgggtcagagcgcaccgtaaggtgagcacgcctctcaggctccctctcccgcaaggggagagggaaccctgccgccggcggctccctcacgcgcgtgccactgagttgcccgacgggcaactcagtgaaaatgcgtcaagcctctcgcgcaaaaatatttcggtttatcgtaacggcaactcagtgtatggttcgcccgtctcacccgatcgaggggcgcttgcgcatcgtcaggagtgttgcggtgagatgcggtggacgccgaggtcacgagagacgacgcgtgacgga

SEQ ID NO: 2 - DNA, 352953 bp, Bradyrhizobium enterica
  misc_feature (334781)..(334790): n is a, c, g, or t
cgccgcccccgccactgccacccagaccaccaccgccgccgccgccggacgtacccttatgcaccacagaaccgccagcgacgccgcccgtggcggtgttgttgctgaacgtcacgttgctgacggtcgtcgagccggcgttgacaaagatcgcaccaccggcgcccagaccgccgccgccgggggcgcttctggatccgccgccggcgccgccctgggcactgccgttggcaatcgtgaggttcgaaatcgcgaccgtgcctgagagcacgaagaacacgcgattggcgttgccgccgctgatgacgaggccgctcgatcccgagccatcgatcgtgacgttgttattgatgggcggcagcgcgccattggcggcgctggttgcaatcgtcgagtttgccggcaggttgaacgtgatcgttccacctgcgacgttggcctgattgatggcatcgcgcagcgagcccggaccgctatcggcggtggtggtgacgacgaactgcgcttgcgccgcggtcaccgtcccgagacagacagcgacgaccagcgccgtcgcgaaccaaaacttgcttctcactgtgccggccgcccgcgcaaattgatttccatgcattggttcgtccgccccacgggcgccaccctcaatcgaggccgatcgtcggcggcccctgcgaactgcctgctgcaaattgatttcaagcgatatgatggcgccggacgcagactccgtctttcatgtcgcaggctttcgagcgcgcgtcttctcagcccgcgcactgcgtcttctcacccagcgcacagagctactttttgtctgaatgtaaccaaacggccacgctgtgatccgggcctgactcaggaatgccggcgcgctcagctacaccgcgagtggaaatgagagcggatggcagcgcgcggcaatatctccgcccgaccgctgtcagccggtatgtcgctctgatctgcgcgatcggcgacgcgctggtttgatgatgcccgggtgacctccgagcaagatgggctacgcggccttcgacgcgcgttccgcaaacttgctcagcaaccccgcgatctcacttcccggtttggccgcgctgaacaggaaaccctgcacctcgttgcagccttcggcgcgcagccagtcgagctggtctgtcgtctcgaccccttccgcggtcgtggtgatcttgaggctgcggccgaggccggagatcgcgcgcacgatcgcgaggcaatcggcgcgccgcgccaggtccttcacgaacgagcggtcgatcttgatcttgtcgaacgggaagctgcgcagatagctcaggctggaatagccggtgccgaaatcgtccatcgagatgctgacgccgagctcgcgcagctgatgcaggatcgcaagattggcttcggtctccgcgaggaacaccgattcggtgatctcgagctcgagccgccgcgccggcaagccggaatgcgccagtgcggagatcacggcctggaccagattgcggctgcggaactgcaccggcgacagattgaccgcgaccttcacgtcggccggccatttcatcgcctcggcgcaggcttcacgcagcacccattcgccgagcgcgacgatcaggccgatgtcttcggcgaccgggatgaattccgcgggcgaaatcatgcccttctgcgggtgccgccagcgcagcagcgactcgaagcccgaaatacgattggccgcgatgtcgaccagcggctgatagtgcagctcgaattcgccgttgctgaaggccgcgcgcaaatcgcgctccatgtcgcggcgcttctgcgcctgcagatccatctccggctcgaagaagcgatgcacgccgccgccctcggacttggcgcgatacagcgccatgtcggcattgcgcatcaattcctccgacgtcgtgccatcgcccggcgacaatgcgatcccgacgctggcgccgaccacgacttcgagcccgtcgatttggtaaggcgcgctcagagcatcgatcagccgttcggcgaaagcgctcgcctcgttcggcgagacgtcggcggcaagcacgatcgcgaactcgtcgccgccgaggcgggccgcgacattgtcgtcgcggacgacctcgcgcagccgttccgccaccagcttgagcagccggtcgcccatcggatgcccgaaggaatcgttgacgttcttgaacaggtcgagatcgatgcacatcaccgcgacccgcttgttgccgcttcggccgcgctccagcgcctcgcgcagacgctcctggtagaagtcccggttcggcaggttggtgagaccgtcatggtgcgccatgtgcgcgatccgtgcttcggcggcacggcgttcggtgatgtcgaccaccgcgaccaggtagccgtcgcggccctcgaacgccaccttgcgtccgaacgtcagtacatggatctcggtgccgtcggccctgatgtggcgccagtcgcggctcgattgatagacgtcgccgatctcgcgcaaggcggcgctgtgcacgccccgctcgtcctccggccagatctcgcgcagcgtcatgccgagaaatcgctcgcggctgtacccgtagtgctgaacggcggcgtcgttgacgctgaggaattccatcgtgccggcgtcgaacacccacatcggcatcgggttgttctcgaacagcaggcggaacgacacctcgcgctgcttcaacgcggtgacatcggagacggtcagcgacagcatgtcgccgaacgccgtgacgccgagccgcaggcagcgatcgccgctgtcgatctcgaactggccgccaggaccgctgccgacgaagccgcgcaggcgattcatcaccggcggcgccgcgagcggattgccgccggcgctgagccgacgccacagcaattcggttgccggctgcatcaggagcctggctgcgccctggttgagatgcacgatctggaaatcggccgcctcgccccgcgcatcgcggatcgcggcgagcgacagcacgccctcgtcggtggccgagaaaatcgtatccagcagattgtactggtcgttgcgctcgttgacatagacaccgaccaggatgccgccccagcgcgaccgcgtcggcagcgccagcacatcgaaggtccgcaccaggccgtcgcgcacgcaatgcgccgacgccagatagggccggcagttctcgcgcgcgttggcggcagcttcggtcaacgccgtcgcgcagtccggcggcagcgcgctgagcggaatgtcccaacgctcgtcattcagccaggtctggacgtaacggccggtgtgcgacgcgcacagcacgccgtcgacgtcgcgcaacagcacgatatggtccgcaagccggccaaggctgccgagcatcacgtcttcgtaatgcggcagccgttcaccgggacgaaccgctgcctgccacttgcgctgcagaaccggaacgtcggcgaacatctcggaattgaacttggccgatatctttgctgatttcttgttggccatcaccacggcacgccccgttgacgcgaacgctaggcatgacccggaaaagtgcgaagcggctttccgaaaggatcatgcccaagcaaaaatccccgtggcatccaagtcatgccgcagcttaacgtcatgtaaaaatggcgatgcggtgcgtcgccgccagcgattatgacagcacaaattcgcgcgatggttagttcgtgttagagactatgacagttgcgtgaaatgcaattcggtcaggagtcagcgcgccacgacctcgacttcgccgtcgacgccgttgacgacgttgaacgggcgctcgaacaccttgccctcgttcttggcgatcgcacgatactcgccttcggagagcacgacgcgcgggaacgcgccgatcgattccttgatcacgtcgccgcccggcgtgatcaccgaccacgcggtgttggcgagcgcctcgccgcccttctcgctgaccagcttgagcgtgatgacggctgcgcgatgggtgacggtgacgtcggtcagcttgcccgccgcgacgcgaatgtcggagcgcaccaccgagttggcgtcgccatagttggagacgatgtagtaggtgccctccggcagcagcgcgacgtcgccggccgatacgttcggcaccaggggtccgcggtccgagccgtcgaactgactgcccttgtagatcgcgaacgaaatctggttggccgggatcttgctcgagccgacccggccttcgatccgcagcccgccggccggcagcacgaacgactcgcggtcggtctccgatttcaggctgacggcgcgcaccgcactgacgaggccgagcgcgacatggacgacgtagttgcctggcggcagcaccacgttgggcgtcgcgccgcgttcctcgcggatcagcttgtaggtgccgttgtcatccggcttgtcggcgaacacccgccacaccagcccgccattgatcaccggcagatccttgccgtaccgcgccgtcagcgacagcaccgcctgccccgcggtcggcgagccgggcggcggcgtcaccgggggcacggtcgcaatcgacggctggacgatggtcggctggttcagcgggccgggcagcacgggccccgatccggacccggacggcggcgccagattgagcgccgggccggacggcacgtccggcaccgaggctggcgggatcggcggcggccggtcgctgaagaactgcgcagagccggacgtgggggttagggcgagcaaaaatgccgcaagcgcaaatagcggaaggagccgcatgccccgcccgcatccgccgatgccgttgcccctcgtagtcatgtcaatgcttttcaacgaaaacgcggcaaattcaagccttcgtcgaagcttcgtcacagtcctggcggggtgtcaccccaattggaaccggccgttcaccccgatgttagccgtatcgtcgcggtccagtcacaatccctgcctaccgcggtcggaccgggcatgaatcatgcctctcgggaataaccatgaacacggacgacgctggcgcagccatgccgcgcagcctagtctcgtgctggcaggagatttgtcgtgttggatagctggatgggccgcggccacaagagctccgacgggcccgacaaggtcggactgggaacggttcgccggccggtgatcgggcttgcgctcggcggcggcgccgcgcgcggtttcgcccatatcgggatcatcaagaccctgcttgcccacggcatcgtccccaacgtcgtggtcggcacctcgatcggctccgtggtcggcggcgcctatgcggccggccatatcgacacgctggaacagtgggcccgcagcctgcagccgcgcagcgtgctcggctacctcgacatccgcctcaacggctcgggcctgatcggcggcaccaagctggccgccgagatcgaagccgcgctcggccaggtcattatcgaggacctcacggtcaaattcgccagcgtcgcgaccgaggtccgcaccgggcacgagatctggctgacccagggccgcgtggtcgacgccatgcgcgcctcctacgccctgcccggcatcttcgcgccggtgctgatcggcgaccgctggctggttgacggcgcgctggtcaacccggtgccggtttcggccgcccgcgcgctcggcgccgaaatcgtcatcgcggcgaacctctccagcgacgtgttcgcgcactcgaccacgatctataatcacgggccatcggccgcgcccgaggtgacggtcgcggtgaccgccgaggcggacatcgagccggaacctccgaagcggcggtttggccgcttcttctccgccgaacgtaccgtgaaacgggagtttttcggcagcgccagccgccccggcatctccagcgtcatggtcgacgccttcaatatcatgcaggaccgcatcacccgtgcgcgcctcgccggcgatccgcctgacatgctgatctcgccgcgggtcggccagatcggctggttcgacttccaccgtgccgacgagctgatcgcgcacggcatccgcgcagccgaacgcgccatcggcgcgatcgaggaagcgatcgaaatcctggtgccgccgtcgaccggcgcgggcaccaccgggaaatagcgctcaggcggtcttgatgtagtcgcgcagcgcctcctgctcgcgctcatattcctgcacgcggctcttgacgatgtcgccgatcgagatcagcccgaccaccttgccgtcctcgacgacaggcagatggcggaattttccggtggtcatcatttccatcagcgcgctgaccgtatcggactgccggcagctcacgaccttcctggtcatgaccgcgctcaccggctcgtccagcgcgcccgcgccgcgctccgagagcacgcgcacgatgtcgcgctccgacaggatgccctccatccggccctgctccatcaccagcacggcgccgatcttgcgctcgccgagcagcttcaccgcagccgaaagcttcgcgccgggcgcgacgctcatgacctgatggccctttgcatcgagaatggaacgtaccgtcattgtcgcctccctgaatccgtccgcgccccgcttgagcgggatcgcgcctgttcgccagagtcttcaatcaacagttccgcgccgatttcggttccggggcgcggtcggtagctgggctcgattttgccggcccgctttgtttctgtgtcgcaaagatgatggaggaattcgaaccgagccgcaagcggcgatcaggcgcggcctgactggtccatggacgacgcatctgcagcatcgtctcgcgcacgcggtatcggatcgaacagcgagaacagcagcagcccggcgaggaagccgccgatatgcgcctgccaggcgacgctcgcctcctcgccgccgagcgacaacgaggtggcgccgaacaggatattgacgccaaaccagatcgccaggaaggcgagcacccgtccgttgcgcagcgcccgccacagcgacagcgccggcactttggcggctgcctcggcatcgccccgactgaacgacaggaagctgcccttcacgaaggcgaaacggattgccgccgccatcgtccccgacaccgacgccgatgcgccgatcatcggcgcgatcgcgtgctcgtgggtcaacagatgcgcgagcgcgcctgcggccgccgtcaccgccatgaagacgaagaagcgcaccgcgccgaagcgccgcgccagcgcgctgccgaatggcaacagccacaacacgttgaagccgatatgggtgaggttggcgtgcagcagcgaataggtgacgaaggtccagaccttggcgccgtccccgcccgggaaggtgatgtcgagcagcgtcgaatcgtagcgcttcgggatgaagccgaagacgtcgacggtccagttctccagctccggcggcagcaatacccgcagatggatcaccgcgatcaggaggatgtaggcggtgagcgcccgcggcaaggtcaggatcggctcgcgcggcgcctccggcggcggcgcgagcggggattcgggataggagtccaaggggtcggcgacctcgaaagcggctgtggatcagagataggcggctttcacacccctgtgcaagtgcacaatcccgaaatcggacaccgggtgtcgctcggcaccggaatcgagaaaaaagaaaagggagggcgctgagaacaccctccctgatcggttggccttcgcgtgccccgagaggatcgggagaacatccccacccctccccgcacggcgaccaaactgtttgacgccacctgtgtaccaaccacgccggcgcttggggcagccggcgaacgggaacgcacggaccctatgcgggccgcccgccgacgccaaggacatagttaaatttacgttaacaacacaaagctgcctataagacgcccaaaccacggccgcggcatggacgctgcacagccttccctgcacaacagacaagggaaggcttctgagcaaaaccgggacagatgtgtcccgccgagacaggtgccgggcaaggttctttagatgaaacacagctccagccgcgaattcttcgcctattggaatgcgaagcgcggcaccgcgcgtgcacccgaccggagcgagttcgagccgtccgcggtgcgcgagctgctgtccgacatcttcgtgctgtcctatgacggcgaaacccgcttcccgttccgcgtcgccggcacccgcatctccgccctgctcggctgcgacctgaagaaccgcagcttttccgccctgttcaccgacgaaagccgcggcgagatcgaagagatcatcacctgcgtggtcgaagagaccctgccggccatcgccggcatcagcgccaccgccgagaccggatccaaggcgcaccttgaattgctgctgctgcccttcaccgcccgcgtccacatgccggcgagcctcaccggcctgctcgccccgttcgaggacgacgtcaccaggctccacgacctggtcctgacctcgtggcgttacctgcatccccaggagcgattcgtgccgcggaccttgcgcaagctcgcgatcgcgcgcggcctgatggtctacgaagggctgcgctagcccccgactccggtttggcgacgcgatggaaggcaccggtcgcttgcaccgcaggccgtggaactctattagctggttcgccgccatggcgggattgacccgcttattgcagccgcggcggggctcggcatgtttcgaaattcgatcaggcagaagatcgtcggcatcgccacgggactcatcatcctcgcggtgatcacctcgctgctctccatggtgatggcgagccaggtcggccacctcctcgatgaactcaccaatcgctacatccccgcctacggccatctcgcccgcgtcaacatccgcgcactggagcggtcgctggcgatgcgccggatgatgatggcgaagatgcagccgccgggcgaagacgcaggctacgatgcggcgcgcaagactttcgacgaagtcgagccgctgatcaagcgcgaggccgacgccgcgcgcgtgctgatcgcctcgatcatcgccgatccctcgacgccctcagacaatgccgcgctcggacggctcgacgaccgcatcgacaacgccgtcaacgacctcttgatgcgcctgaacgccgagaacaagacgctgctcggccagctcgacagcaaggatttcgcggccgcgcgacagaccacgctccgcgccgacgccctgcgcgacgaattcaacaccaggatcgaaggcatccgtgccgacatgctggcgcaggtcggctcggccgcggcgaaggtgaccggcgcgcagcagcgggcgatcatcatctccggcgtcgtcaccgccatcgccgcgatcctcggcttcgtattcgcgatgctggtcggcagcggcatcacgcgcccggtgatgcgcctcctggagggcacccgcgaggtcgaggccggccgcctcgacggcagcatcgccatcacgacccaggacgagatcggccagctgtcggccgccttcaaccgcatgatcgagacgctgcgtcacaaccagcgtatccgcgagacattcggccgctacatcaatccgcggatcgccgagggcctgctcgagcagccggcaatcgccgcaaccgaaggacagcgccgcatcatgacggtgatgttctgcgacatgaagggcttcaccagcctgagcgaaggcgtgacgccgcgcggcctggtcaagatcatgaacctctatttgtcgacgatgtcggcgccggtccacacccatcgcggcatcatcgacaagtatatcggcgacgccatcatggcctattggggggcgcccttcgtcgaggaggccgagcagacccatctggctgcgcttgccgccatcgacatgatcggccaggtcaaccagctccgcaaggatctgcccgagctgctcggcgtgcgcgcgatcccggccgactgcgacatccggatcggcatcgccaccggcgaagcgctggtcggcagcatcggctccgaattcatgatgagctacacggtgctcggcgataccgtgaacctcgcctcgcggctggaaggcgccaacaagttctacggcagccgcagcctgatctcggaggccaccgccgcggcctgcgcctcgaccatcgagctgcgcgagatcgaccgcctcgtcgccgtcggccagacccagccggtcgccgtgttcgagatcatcggcaagaaggatgagttgacgccggcgcagaccgacctgcggcagcgctacgccgacggtctcgccgcctatcgcgagcgccgctgggacgacgcggcgcgcgcgttcgatgccgcgctggctgccgtaccgggcgacggaccgtcgatcacactgaaggcgcgggttgaacgcttccggcgcgatccgccggctgccgattgggacggtgcgtggcacctggagtccaagtagagcggctcgccggcgtcagatcgcgccgtcgcatatcctgcacatcaccatgcacgagaccatcatgcctgaactgatcaatcttggcgccctacaattgaagttcctgcacagcaaggagacgaccggcggcagcatcgacctgttcgagatgacgttgcagccgaacgcgcggatgccgatcccgcattatcatgagagctgggacgagacgatctacgggctgtcgggcgtctcgacctggcggctcgacggcgaggacatcgagctcggcaccggcgagatggtgttcatcaagcgcggcatcgtgcaccgcttcaccaaccgctcgaacggtcccgcgacttgtctctgcatgctgagccccggcgcgctcggtccgcaatacttcagggagatggcagcgctgctgaccggcggcgcgcccgatcccgcgaagatgaaggaaaccatgctgcgttacggactggtgcccgtggcgccttgaactctcggcgaggtccgtttgcatcatcaattgtccttgtccctgcacgtcagattctaacaccgaagttagtttcggttccgtcgtcggatcgcggaccagcccgcacgcaaatgcaacgtccggaagcgacagtgcgattgccgcatcgacagatatttttcagaacgcgaggaatgcctgctgcgatcgggagttagtgcttcagatcaatgactgttcacgtcgaatcgggaggtgcgcatgatcaagtcaccggcgaagctcgcaatgcttgcggcatttctgacagcgccgatcatcatgttgccacagcagactgcccgcgctgccggcggcggtggtggcggcggaggagcaggcggcggtgaactctacggctcgagctacagcactcctgcgccgtcgtatccccaggagaagggcagacggaccacgcacagggtgaagaaaccggccaagcaatccagcttcgacgatccggcattccgtgacggctatcgcgctgcctatgcaacgatctacgagcagaacgactatgccgccgcgatcgcgcagttgcacgcgctcggcaacgatgatcatccgaacgtcgccaacctgatcggctactcctatcgcaagctcggcgactacaagcagtcgcaggtctggtacgagcgtgcgctgagggccgatccgaaccacgtgctgacgtggaactactacggcctgtggcagatcgagcagggcaaccgcgatgccgcccaatatcatctgagccggattgccgaaatctgcggcacaacgtgcgacgaatatcgctcgctggccgcggcgctcgagaaaccgccagggacaagtctcgtctactgaacaagccgcgccttcctgcgcgagagcgatatacgcggataggtcagtcgtggatgccgctggtccccattcagaccggcgcgacgcggagcagctcggcgtcgcgctctcccccggtgtcgacgagatctcgctggcgctggtcgtggacggctggtcgcgaacctgtcgctcgcacgccgcgacgttctccgccaccggcggcgcggtgacgagccgcagcggcctgcgcatctatccgcaaaccgtggcgaccagctggcccgcgggccgcctgctaccggcagtcggcaccacgcccgcgcatgcgctcgaccagacgcttgccgggatcgaggcgcgcgatggctcgggcacagcggatttggtcgccgtgcagctcgaatatccgcggggccaagccgtgcgctgaaaaatgccgctccaatcgcatttgatagtctgctatccccattgtcatctctttgtcatgaattgtgcagacaggttcagcggtacagttcggggacacgcatggactatttcaaacgcttcaactttctgttcgccgcgccggttttcgagtccgacgacctcgaaggcatccgcttcaaccagatcgtcactgagatcgagcgctccggcttcgaggtggtgcgcgcccgcaagctggaagacgccgagatcgcggtgcagaccgatgccgcgatcggctgcatggtggtcgactggggcaagaagggcctcgagggcaagaccgcggccctgatcaatctgatgcgccgccgcggcctcgacttcccgatcctgctcctgatccgccgcaagcgcttcgaggacctaccggtcgaggtgctggacttcatcgacggctatgtgttcctgtcggaggagaccccgtccttcatcgccaagaacctgatctccaggctgaagcaatatgccgagaacctgaagacgccgttcttcggcgcgctggtcgactatgccgaggaaggcaaccagctctggacctgcccgggccacaatggcggcgtgttctacagccgcagcccgatcgggcgggtgttcgtcgagcatctcggcgaagccgtgttccgcgacgacctcgacaattccgtgctcgacctcggcgacctcctcacccatgaggggccggcgctgaaggcgcagaaggaagcggcgcggatcttcggcgccgaaaagacctatttcgtgctcaacggcacctcgacctccaacaaggtcgcactcggctcgctggtcaccgacggcgacctcgtgctgttcgaccgcaacaaccacaaggcagcgcatcacggcgcgctgctgctcggcggcggcatcccggtctatgtgccgacggtacgcaacgcctggggcctgatcggtccgatgcgctgggatctgctcgacgagggcacgctgcgcgaccacatccgcaagcatccgctggtcaaggacgagaacgcctggaagaaggagcgcccgttccgcgtcgccgtggtcgagcagtgcacctatgacggcaccatccactccgccgagatgatcctgaagcggatcggccacctctgcgactacatcctgttcgacgaggcctgggccggcttcatgaaattccacccgatctatgccgggcggttcgcgatggggctcgccaatctcggccccgaggcgcccggcatcattgccacccaatcgacccacaagcagctcgcgagcttctcgcaggcctcacagatccatatccgcgaccgccacatcaagggccagaagcgccgggtcgagcaccgccgcttcaacgaaagcttcatgcagcacgcctcgacctcgccgttctatccgatcttcgcctcgctcgatgtcggcgcgcagatgatgaagggccgctccggcgaagtgttgtgggacgacacgatccggctcggcatcgagctgcgcaagaagatccgcgcggtgaagcgcgagttcgaggaaaaggagacgcgccccgagcggcgctggttcttcgagccgttcgtgcccgaccgcgtgatgatccctgatgccgcccgcgagaacggcgtgcacaatgtcgcctgggagaccatctcgaccgaccagctcgcgaccacgccatcctactggcagctcaatcccggcgagacctggcacggcttccccgagctgacggccggctttgccatgaccgacccgaacaagctcaccttgctgacgccgggcttcgaccatgccaccggcgcctatgccgatcacggcatccccgcgccggtcgtggcgcagtatctgcgcgagaaccagatcgtcgccgagaagaacgacctcaactccctgctcttcctgctgacgcccggcgtcgaggccagcaaggccggcacgctggtctccgggctcgtcgccttcaagaagctgcacgacgacaacgcgctgatcgaggacgtcatcccggaattcttccgccgccgcccgcaacgctacaccggcgtgcggctgcgcgatctctgcggcgacatgcaccgcttcttccgcgacggcggcgtcagcacgctgcaggccaggcaattcctgcccgagcacctgcccgagatcgcgatgtcgccgcgccaggcggcgcaatatttgatccgcaacgacgtcgattatctgccgatcgaccagatcttcggccgcgtcgccgcgacgccgttcgtggtctacccgcccggcatcgccaccatcgtgcccggcgagcggctgtcggaacgaagcaagccgatgatcgattatctcaagatgttcgaggcgagcttcaacgcgttcccgggcttcgaggtcgaggtgcaaggcatctacaaggagatcgacgacgccggccgggtccgcttctacacctatgtcgtgtccgaataggccggcggacgcagcacaatggagaatgatcacaagatcaccgtccgtgcctcgcgcgacagcgacgtcgatgcgatgctgtcgatctaccgccaccacatccgccacggcatcgaggagagcgtcgacgacaacggcacgccagagcccgacgatctacgcgaccgccgcaagaatttgcgcaacacccgcctgccgcatctggtcgcggtgtgcgacggcgaggtggtcggctacgcctatgtggtccagttccgcaagcgcccggcctaccgctacacggtgaagcattcgatctacatccaccaccgcttcatcggcaagggcgtcggcggccggctgctgcaggagctggtcgacacctgcgccgcggccggcttccgccagatgatcggctacatcgacagcgacaacgccgcatcgctcgcgctgcacgaccgcttcggctttgcccgtgtcggtcacctgccgggcgtcgcctatcgttacggccgctggtccgacaccgtgatggtacaacgctcgctcgccgccggctcgaccgccccgccgccccccgcgccgctgtcgcggcggtgatgggggccttccgcttcccgtcattccggggttcgcagagcgagagcccggaatccatttcgccgcaattgtgcggcccgacggattccgggttcgtgcttcgcacgccccggaatgacggcggggagaaacaccactcgcttcaacagctcggccgtacgcgcgcccctactccagcgtgaagccgacccgcagcgtcacctgataatgcgcaaccttgccgccctcgatgtggccccgagtctgcaccacctcgaaccacttcatttcccggatcgtcttcgacgcgcggctgaccgcattctcgatcgccgcctcgatgcttttgtccgatgatccgaccagttcgaggatcttgtagacgtggtccttgtcgtgcgtcgtgggcatgtcgacctcctctgtagatgcgcgatccggacaatctgtagtccgatctggacagtttgtcgtctgatgcaaaccggctgtcgccgaaccaatgctgcgcggcaacacgccggttgatttgaatcaacgtgtcgcggcgcatttagtgccaactgcatttggcgccaactttgcaactgcccttgtccgcgccttgacctatggtagcatggtttgatcaagcattcgggagcgatacgatgtcgactgcgtccagctcacccgccacacctcctcacagcctcggatccgggcttgccaaccttcgcgcgaagtggggctggatcgtcgccctcggcgtgatctacctgatcgccggcgtgctcgccttcggcagcgtgttcttcgccaccgtcgtcagcgtgctgttcgtcggcgccatgatgatcgtcgcaggcgttgctgagatcatcaacgcgttccagttcaagacctggggcaagttcctgttctggctgctcctcggcgcgctctacgtcgtcgcgggcttcattaccttcgagaacccactactcgccgcggcgacgctgacgctgttcctcggcgtagctctcgtggtgtccggcattgtccgcatcttcctggcgttcggcatgaactcggccgcgccgtggggcatggtcgcgatctccgggctgatcacgctcgtgctcggcgccatgatcctggcgcgctggccggtgtcgagcctctacgtgctcggcatcttcctcagcgtcgacttgatctgcgccggtgtcagctggatcagcatgggcatggcgctgaagcagcgcgcctgagcgcgcaaggcgcccgcgaacctgccggcatcgcttgaggcgcgagccttacgtgaaggcgcgcgccttaacgttgtcgtgtccagatcgcagaatcgcagcttcccgctcgaacccacttccatcaggtcccgtccaattttgcgagcgggccattccggtttcgccgaaccgaaggatggaatttcctatgtcgatgcgatcaaggttttcatcagtgacattactcaccgttgcgagcaccaccgcgtcggcggcagccgccgtgctggccactaccgtcgccacgacggcgctgacgaccacggcagcccatgcatttcagccgcgattcgatccgccctgcagtttcctgatcttcgcaggatgcgggcagcctgtgtcaacggccgatccgggtcgcgcgcgcaaccgcgacatctcgccggactacatgaaacaatccgatccccgttacaatcaggccctgatgaacgggggctgaggtggtggtggtggtggcggcggcggtggtggcggcggccgctagcgggttggcgttggaacgtcgggcgggtgagcgatggcgcaacccgcccaacaaggccaacctcagggctgcgcgaggtgccagtaacggctgctatcgcctgatctcctcggctgcgcgcaccagcgggcggtcggagagctggatcgggccggagaacggcgtgctcatttcgaggatcagatagatcgcggccgcgatcagcgccgccgcggcgacggtgatcgagatcacgaccgcgttgcgcggcgcacgaaagcccagcgtcgcgaacatcagcgtcaaccagccgaccaggatgcagatcagcggcgacggaaacgaaccgtcggactgctcgacaaaggtccagcgctgctgcactgcctgccggtagaccgaccgggcctcgttccacagcgcgatcttctgctcgtcgttgaacttgagctcgcggagactgttgccgacctggtcgagcagatgttcggacacctcgttcgcgcgcgagatcggcgcatccttgagcgcctgctcgacataggcgagcagccgcttgcgcggctcgtcggcgctggggccgagcggccgcatgctgcggtcgagcaggatgagatcggtggcgaagacatgcagattgcggtcgaccgccacataggtgttggcggcattgttcatcatcaggccgagcagcagcgacggcatggtgacgaacagggtcgcaaccaggcgtaccgaggtattggtctcgtcgctgcggtgatggtccgcgagctgggcatggatcgccatggtcgcgagcgccgcaccggtcaacagtacgaagatcaggatggcgacgacgactgcaaccacggcttgcggagacctgcgagagaatcaggtgcacaggatagcaagtgccacgcggcggtgcatgttgactgcccttccccacgcgctatccagtgcgggccagattgagggcgtccgacgcgccccggagagcgcaagcgcgctgtggaggagactgacgtgcatattgtcgacgacagcgaggtcaaccgcgtcctgagctttccggtcctgatcgaggcgatcgaggccgcgcaccggcggccgaagattgcggtgcatgacagctatctcggcgacgacaagggccagcagctggtgacccgcagcgcggtcgatgccggtcgcttcatgatgaccaagctgtacaccagcttcccgggcaaccttgcccacggcaagctgccggcggtgcaggcggtctgcgtgctgttcgacggcaatgacggccggccgctcgcggtgatggacgccgccgagatcacccattggaagaccgcggcggactctgcgctcggcgccaagcacctggcgcggcccgacgtcgagacgctgctggtggtcggcgccggcgagatggcgcactggctggtgcgcggccaccgcacggtgcggccgtcgctaaagcgggtccggatctggaatcggaccatcgcgcgtgccgaggaactcgccgcgcagctcgaaggcgaagggattgccgccgaggccgtcaccgacctcgacgccgcgacccgcgaggccgacatcatcaccacctgcacccgctcgcgcgcgccgctggtcaagggtgccaatttgaagcccggcacccatctcgacctggtcggcggcttcacccccgacacccgcgaatccgacgacgaggcggcgcagcgctcgcgcatcttcgtcgaccgccgcgaatccgccttcgacggcgtcggcgacatcctgcagccgatcgccagcggcgcgatcaaggagagcgacgtgctcggcgaccattacgacctcgccggcggcaaggtgaagggccgcttgtcggatagcgacatcaccttcttcaagaacgccggcggcgggcatctcgatctgatgacctgcgagacggtgcttgcgcagctggggaaggagttgcggtaacgacaaggaccgagggcaggctagcgaagcgtaactcgcccgacgccgtgacgcggctacgtctcccgcagccagacctcgccgatcgagtgatcggagcgcttgcgcagcacgacgtcggcgcgggtccgcgtcggcaggatgttctccctgagattggcgcgatgatgctcgcgccacagccgctccgccacctcgcgcgcgtcgctcggcggcaggtcccggtaatggtgaaaataggacgccgggtttcggaacgcggttggctgcagcttgaggaagcgctcgacataccaggactggatgtcggcctcgtcggcatcgagatagatcgagaagtcgaagaaatccgacaccaccaccggcgcattgccgcgcgccagcagcacgttgaggccctcgaacaccaggatgtccggcagccggatcagctgccgctccgacggcacgatatcgccgatcagatgcgagtacaccggcaattccagctcgccctcgcccgccttggccgccgcgaggaagcgcagcatccgcggcaggtcgtagctgtcgggaaagcccttgcgccgcatcaggccgcgctcttccaggacggcgttggcatgcaggaagccgtcggtcgtcaccagctcgacgcgcggatgatcggcccagccggccagcagcgcgcacagcacgcgggcaaaggtgctcttgccgacgccgacactcccggccagtgcgatgatgtagggcgaacgccgcgccggccggccgagaaattccgccttcacctgcatcagattgcgcgccgccgagaaatgcaggttcagcagccgcgtgagcggcaagtagacgtcggagacttcggccgtcgtgatcggcccattcaagccgcgcaacgccgcaagatcggcctccgagagcgtcagcgatgtgctggcccgcaatgcggcccagtcgctgcggctgaagatcatgtaagccgagagttcgtcggggttggtcatcccgcgatcttgccgaggcaaagactgccgcgtcaatggcacagaaccgtggagcgggttagcgaaccctaacccgcccgacgctccctactccgcggcctgctgcgtcggcgcatcgagcgctgccgagaccttcggcggcgacatcggcaggctgtagaagcgcttgccgagcgcattgtggacggcgttggcgactgcggccatgacggggaccagcggcacctcgccgacgcccttgacgccctgcggatgcttcgggttcggcacctcgaccagcgcgcagtcgagcatcggcaggtcggagcaaaccggcatgcgataatcgaggaagcccggattatcgaccttgccgtccttgttgtagatgtactcctcgttcagcgcccagccgatgccctgcgcgacgccgccctgcagctggccctcgacatagctcggatgcacggcgcggccgacatcctgcacggcggtgtagcggatcaccctgacgatgccgagatcgacatcgacctcgacgtcgcagatatgggtgccgaagccgccttcggcgccttgggtgttgagctgcacgctggcgccgatcggtccgccctgcgacggcgccttctcggcgaggtccgcgagcgtcagcggctcgaactggccggcattcggactgaccggatgcgcggcgccgttctcccacttcaccgcttcaggatcgatctcccagatcttcgcagcccgctcgcgcaaggtcgcgatcaccttgtcggcggcctgcgtcaccaccatcgaggaggcgaacagcacgcggctaccaccggtcaggttggagaaaccgacggtctgggtatcgccgatgatgacggagacgcgcttgtagtcgatgccgagcagctcggcgcagatgttggcgatgccggcgcgcgagccgccgatatcgggatgccccgtcgtgacgacgacgttgccgtcctcggtgatgttcacctgcgctgaggattcaccgccggcattgaaccagaagccgctagcgacgcccctgccctgcaatttgccgagcggcgcggcataatgcggatggttcttcgcagcctccagcgtctcgatatagccgatgcgcgggaacaccgggccgtgcgcggccttggtgccctccttcgctgcgttcttcagccgcagcgccagcggatccatcttgagcgcctcggcgagctcgtcgagcacgcattcgaccgcataggcgccgatcggcgcgccgggcgcgcgataggccgcgaccttggagcggttggagcagacgtcgaagccttccgacagcacatgcggaatgtcgtagggcgcgaagctgcagccgaccgcgccgcggatcggcgagccaggaaaggcgccggcctgcagatagaagctgccatgcgcggcgacgatggtgccgtccttcttcgcaccgatcctcaccgtgctcttcgagcccgaggtcggcccggtggcgcgcatcacctcctcgcgggtcatcaccatcttgaccgggcgtccggacttcttggcgagcaaggtcgctagcggctcgagatagacgatggtcttgccgccgaagccgccgccgatctcggcggggatggcgcggatgtcgctctgcgggattcccgtcagcatcgaggtcatcgcccgcaccatgaactggccctggctcgacgaccagatcgtggtcttgccgtcggccgcgaccgagatcaggcaggcatgcggctcgatatagccctggtgcaccgggcgcgtggtgaaggagcgctcgatcacgatctcggcgtccttgaatcctgtcgcgatgtcgcccttcctggattcgatgcggcccatgatgttcgagggcttgccgtcgaatttgttgaactcgtgcaggatcggcgcgtcaggcttgagcgcgtcgtcgatctcgatcgcccagggcaaaacctcgtagtcgacctcgatcagcttgcaggcttccgccgcgatcgcctccgtggtcgcggcgacagcggcgacggggtggccggggaacagcgccttgtcgcgcgccatcacgttgcggcacatccagcgcatgtcctggatgccgagcatcacggcgcccttctcgatcgtgaagtcgacgatgtcgcgcgaggtgaccaccgctttcacgccgggcagcgcctcggccttggcggtgttgatcgccttgatgcgggcatgcggatgcgggctgcgcagcaccttgccccagatcataccgggcatcgtggtgtcggcggcaaacgccgcgcggccggtgaccttgtcgacgccatccggccggatggtgcgctggccgatccatttgttgttgacgacgttcatcgcgcagtctcccgcatttcagccgcggtctccatcaccgcgcggacgatcttgtcgtaaccggtgcaccggcagagattgccggcgagccagaagcggacttcctcttcggtcggattggaattcctggcgagcagcgcctcggaggcgaccagcatgcccgaggtgcagatgccgcactggagcgctgcgtgctccaggaacttctgctgcaacgggtgcagcctgtcgcccttggccatgccctcgatggtcccgatctcgtggccttcggcttcggccgcgagcatcaggcaggagcagacgaggcggccatcgagcgtgatcgagcaggcgccgcaatcgccggacgagcagccttccttggagccggtgagccccaattgcccgcgcagtgcgtcgagcatggtctcatagggctcgcacaggaattcgaccggctcaccgttgaccgaggtggtgacgtgcagtttcgccatggtgctaatgtcctcccgcgcgctgggcggcgatcgcggcggtgcgcttgagcagcacgccggcggttttgatccggtaagcgatggtgccgcgcttgtcgtcgatcggacggcaggcggcgcggcacgcggcagcagcagcttcgagcgccgcatcgtcgagcttcgagccaacaagcgcttgcgctgcgggtgcgaccaagagcgccgtcggcgccaccgcgccgaggccgacacgggccgcggtgcaggcgccgtcctttaacgtcaggctgacgccgatgccgaccaccgcgatgtccatctcggtgcgcggaatcatccgcaggtacgcatcacccgagcccttgggccgtggcggcagcgcaaaactgacgagaatctcgccgggcttgaggttggtgcggcccggtccggccggcacgtcctcgaccttgatctcgcggcggccgttcgggccctgcacggtgacgatggcacccgccgcgatcatcgccggtacgctgtcgccggccggcgagccgttgcagagattgccgccggcggaggcccggccctgcacctgcttggagccgatcaggttgacggcctcgagcacgcccggccacaccttgccgaaacgcggatgctcggcgagcgccatgccggagacggcggcgccgacgcggaaaccgccatcggcggtctcggtgatttcggtcatctcgccgatcttcttgatgtcgacgatcaatcccggccgcaccaggccggagcgcatttgcaccaataagtcggtacccccagccataatgcgggcggcactcccggcggcagcaaatgcgccaatcgcttcatcaagcgtgcgcggtgctacgtatcggatatcggtcatgacggttcttctggtctccctcggctgcttgtcagcgctgcttgttcccgttgggggatatggccttattgctggccggcagaccgcaagcctacacgcctgatcggcgtccgaacagccgtcgaggtgcggcaggaagcacaggctcccatgcaggatgtgcccttgcgcggtgccgaagggcccgtcgacggttgcagtcgtcgaacattcgcgcgtcaccaatccatgcgaaggcgcgccgaagtgcggtaatcggcggcgcggcccttgcttgctttcaaccacgaattcgtgaagcatgccggtcgctgcggcagggatgcccgcgcaacgacagatcgggagatggtggatggcggatgtttcgcgcagaacactcctcaagctcgcggccagcctgccgcctgcgatggcgaccccggccatcctgtcatcgcgcgccgtcgccgcggccaggggcaagaccatcactgcggtgatgcattcggacctgcgcatcatcgatcccggcttcacctccgcctacatcacccgcgaccacggctacatggtctacgacacgctgctcggcatcgattccagcttcaaggtccggccgcagatggcagactggacgatctccgacgacagactgacctacaccttcacgctgcgcgacggcctgaaatggcatgacggcgcgcccgtcacggccgaggactgcatcgcctcgctgaagcgctggaccgccgtcgacggcatggcgcagaagctcgccgaattcaccgcttcgctcgaggcgaacggcccgaaggccatcgtgctcaagctcaaggagccctatggcctggtgctggagtcgctggcaaagccctcctcctatgtcgcgttcatgatgccgaagcggctcgccgagacaccgcccggcaagcagatccccgagcaggtcggctgcgggccgttcaagttcgtggccggcgaattccagccgggcgtcaaggcggtctatgagcgcaacgccgactacgtgccgcgcaaggaaaagccggattggctggcgggcggcaaggtcgccaaggtcgatcgcatcgaatggatcacgatgcccgacgcgcagaccgcgatcaacgcgctgcaatccggcgacatcgatttcctggaacagccctcgatcgacctgctgccggtgctcgaggccaattccgatctgaccgtggccgtgctgaacaagttcggcttccagatcgagggccggatgaacttcctgcatccgccgttcgacaatcccaagatccgccgcgccgccttcctggcgatgaaccagaaggacgtgctcgacgccaccgtcggcaacgcgaagttttacgagatctgcggctcctatttcgcctgtgacacgccgctcgccagcgacgtcggcgcggagacgctgatcaagggcaacggcatggccgaggccaagaaggcgctcgccggctcgggctatgacggcacgccggtcgtgatcatgatccccggcgacgtgcagacgctgaaggggccgccgacggtcgcggcgcaactgttgcgcgcggccggcttcaccgtcgacgcgcaggtgacggactggcagaccgtggtgagccgccgcgccagccagaagccgcccaaggaaggcggctggaacctgttcttcaccttcaccggcgccaccgaagtgatgaacccgatcgtcaacaaccagatcgccgcgaccggcaagaaagcctggttcggctggcccgaagacgccaaactcgagcagatgcgcgatgcctatgcgcgcgcaacctcgcccgaggagcagaagaagttcgcggtcgagatccagaaggaagcctacgagcaggtgatctacctcccgctcggccagttccgcttgccgagcgcctggcgcaaatcgctgaccggcgtgctcgaaggcccggcgccgccggtgttctggaacgtcgacaagaccgagtaatcgcgcgcgaccaaaaaacgcgaaaacaaccccatgcaaaggagccggcggctcgacaaggccgcttgacatgtcgggcaactcagggataaatttctaatattccgaaatcgtgtaaatctcggccgcgccggcaatcgcatccgcgctgctcttgcaggcgaaggactcgcgagatgaatgcccgtggactctcgaagtctagctttcgggtgagctgatgtcaggtggaccgccacgggcggtttgtgaccaacgcggacgaagcgtagttcacagttccctgcttgttctcacccgatcatgggtctgtccgcacttgaccccgtgtgtcctggtttgaatctcgcagtgtcctaaatcacttagcgacaccgtttaggctgttatactgaccgcagtgctcatgacgatttttatggggtggcaaactcgttccctacggggttctccgtaaggaaaagcccggattctccgcggcggacggtatcacaatcgtcccctagcctgtctcaaggtttcggagggcagttctccaatgagccgagcgtattcgaaggaaaagcggccaaggttctggaatccgcaccttaacgccacgccggttacagtcgtcagttcatccggctgcctcaaacattccgcggcgcgctggagtcgtatgcgcttggcgaattgcgccggcgagccatgacctgcaagcgcaaattctctaaacattgtccgtgcactgacgttggcaacgctggcaagtttcacggcgtcgataggcttgtcccaattcgtctcaatgaatgtttcgacgatattgaccaccgagcgattcgcgcgaggaggcgtgccctgcagccgatccgtgaagttgtgccggtgcgccagcaagaaccttaagatcaggcttcgctccaactcggccagaagcatgggcgaacattctggaccaaatgtttccagattctgggccagctgaaaaacaccctggcgaacgaacgacatctgcctcgaatcaggggcgtcgccggagaatgtcaatttccggtcgctggcatctcctagcaggctcttcaacgagcgttcgagagctttcgcatctaccctgaccaccaactgccggtagccagcttcaaaatcgagccgaagcctggactcagccgatacaaatggactccaagctccgatcggctcgctcctgttcgcagtgctgaatttcgcgtccccctgaattgaaaaaaactgccggacaaaatccgcctccggaaaggacagggaaacagcgctgttataagagcagaacgccaacccgatcgacgtcagctgtgcaaaattagcgcggataccaaagccgtcgttccgtgcttcgaaaccggttgcgccgtaagcagaataaagcttgtcgcgtgcaaactcgctgtcgcgcgagtgcaccacggggtaacgctcgagatatgcgaggccgcgcaagtcgaatcctgctccgccccgaatattacgtcgtcggacgagtttttccagcaatctcaaattgcacagcggaagatggatcgctggccatcctgtgccacgtgctggccggaaactgccaattccggctgatccgctgacatgcgacagactcacccgcgaactgcgcttgctgaacgcgatgggcgcagtcggattggcaggaaatgtacaaatcccggtttaaccgaatgcatctaacgtttggaatgcattcgtcaccagcgccgtacgttggaaaacctgcgcgcccacactgcgcgacaatccgtgtcgacggccgcgagtggcacgatgaccgacttttgacggtgttgagttgatcggtctcgctcaaattgagcgcgatcggcgcaacgccataactgaggtgagaaataggccttggctcaagtggttcaattcccccgaattcgccaatcgctgcagcccggacgcaggccccggccgcagatgacggatgctctcgggagcatgtcggttgcgctgtccgttgtccgcgatgcgccaatggaaacgaaggaagatgttcgcaaggcaatactccttctcgatctcgtaaatacgcaggcccggctgctcgctcgtgatctcggcgacactgccgcccgcgaactgattctggccaacgccgcactcgttgcagaatggcttgaggtcgcccgcagcgcgacatcgaaaacgtgaagcgccttcccatcaatgacgaaactcacggaatcggagacaaaccatgtttagccgtaacctaggcgctgaccgccttgctctcctcgcggccaaaacaatcggcgccagcatcatggtggcggaccagaacctcaacatcgtctacatgaacgacgccgtcgttgagcttctgcgcgaagcggaatctgatcttaagaaggagctgccgcagttcagcgtcgacacgctgatcggaagcaatatcgatatctttcacaagaacccgagccatcagcgacgcatgctggagggtctcagcgccaagcatcgcgcgaccatcaaagtaggtcagaggacgttcgacctgttggcatcgccgctgttgcaggctgacggacgccgggtcggcttcgtcgttgaatgggccgacgcgacggtacgcctgcaaaacctgaattatgcggcccaagcctcggctgccggccgagcgcaggcggtgatcgaattcaatctcgacggcaccatcgtgaccgctaacgaaaacttcctaaatgccttgagctattctctgggcgaaattcggggcaaacaccacagcatgttcatgccgattgaggagcgggatagcgcagcctaccgcgaattctgggcctcgctcaatcgtggtgaataccaggccgccgaatacaagcggatcggaaagggaggcaaggaggtatggatccttgcgtcctacaatccggttcttgatgaaaagggcaagccctttaaggttgtcaagttcgcgaccgatgtcacgaaccaaaaactgcggaatgccgacctgtccggccagatcgacgcgatcaggaagtctcaggccgtcatcgagtttaaattggacggaaccatcgttgaagccaacgacaatttcctgcaggccctcggttactcccttggcgagatcaaggggcaacaccacagcatgtttgtggagcacgtggagcgcaccagcgccgagtatcgcgaattctggacgtcgctcaatcggggccagttccaagccggagagtacaagcgcatcggcaagggaggcaaagaagtttggattcaagcttcttacaatccaatctttgatctcaacggcaagccgttcaaggtcgttaaatacgccagcgatgttacgagccaggtcctgacgcgcataggaaacgaacgcgtccgtaacatgatggagtcggttgcagcaggatcagaagagctcaatgcttcagtgcgggaaatctccgaagcgatgaccaaatcgcgggagaccgctttgggggccgtcgagcaggtcgccacggcagatgcacaagcacagcgtctttccaacgccgcgcaggcgatgagcggcatcgtcgagatgatcaacaacattactggccagatcaatctccttgcactgaatgcgactatcgagtctgcccgtgcaggtgaggctggccgtggctttgcggtggtggcgtccgaggtcaagagtctcgccaatcaagccaagcaagcgaccgacaagatcgctcaagagatcggcagcctcaatggcatttcggcggatgtggtgaacgcgctgaattcgatcaagcaagcaatcaacagcgtcagcgagtacgttacctcgacggcggctgctgtcgaggagcaatctacggtgaccaacgagatgtctagcagcatgcagcgcgccgccgccgaggcagcagcgattgcgcgtggctagacaggctgctgcacgtcgaacgaagatgccgggccgttgccgctggaaatagccaattctgcttccacgcaatggtcctccggctctggcttcccacattcgtcgagtcggaactggatcggccgagtctgcatctcgaagctaatctcgtcccaaccttctgcttcgttgatccaaaacgaggcgtcttcattttcaaatactgcgcgctggcggcaaaagctggccattgcttggcaataagcaagcatatccattacgcatgctcccacctgtcaatcactctgggcgaattgcgcgacctacctatcttggcgcgactgtcgtgacaacggcttctgtcgaacttggcacgaaccgaacaacattggcaccaaccggactagatgttagctttcaggaggtgtccatcgagcagtatctcgcgctgcccgaacgggtggatgctgctaagttcgctatccgggaatacggcgagcacctcgtgccgaggctcggatgccgcattttgagatcaagcaaccgcagaaccggtccacctctccccgtagtggagaggtggatttgcgcagcaaatttggtgaggggtcgcagctccagcgagggaccgtaaccccaccggcgcttcgcgtcgacctctcccttgggagaggtgcctcgccttactgcccgttggtccggcgtgcggccttcggcgcttcgtccttcagcttctccaatgcgccgggcatcatctggccgaacatcgagctcagcatcgcggtcgggatcaggccggcgctgctgccttcctgcccctgcccgcccgacatcaggaattgcggcaccaggggctggttgatccgcgtcagcgcctcggcgaattttgcaaaattctgctcggcaagccggtattccggcccgccataggcatcgaccgcgagcttggtcgcctgcgcgttggcggtgccgaccgccagcacgcggtcggcctcgccctggccttcgagccgcgactgctcgccgaccgcggccgcggtcaccttgcgcgtctcggcatccttttgcgcgcgggccagcgccgccgcaccctcgttctcgttgaccttgacctggatcagcgattgcgtcagcgccgactgcgccgccgccgtcgccttggcttcgttcaacgcgcgttcctgcaccgcggccttctcctgctcctgataggtctcgatctgctcgcgcgcgatctggcgcgaacgcagctggatcaggatgttctcgatggtgtggtcgccgggagctgcgcgcggcgtgccgatcaacacctcctgaaggtcgagcgaatagctctcgaacctcgccttcatgtcgtgcgccgcctcctcctggatcgcggcgcggttctgcaacagctcgatcaaggtcatcttctgcgcgatgttcttgaagaacgcagagaccatcgggtcgagcgtctgctcgaccagcttcttcacgtcgccgaagcgctggatgatcatcggcgccttcttgtagtcgatatgcatcaccaccgagagcggcagcgtcggctcgaacgcatccttcgtgatcagcgagatctccgacaggttctcgtcgagcttcatcgcgccgacctcgccgcgcatccatttcaggatgaagttgacggtcgggatcacctcgatcttgccggcgtaggtgttgaaggcgtatttgcccggcaacagcggctccttccagacgccgcggctgccgttcagcaccagttcgccatggcgatattgctcgcccgagacgtcgtcggtgcgcggaccagtgtagaagatgacgacgccgacattaccgaccgggatcaccgtcttcggcaccgcctcgacggtcgcgaacaggcggttgatgtaccaggtgccctcgacgatgacctggagctgacggccgcgatagccgccggcgctcaggaatttctccggctcctggaaattgttgtggaaggtcgcagcatcccgcagcgcgatgccgacctcgggcgcgatgatctcgcccggaggcagcgacgggccgtcatgcacggtgacgatgccgaccagatcgtgatcggccgccagcacgaccggagcaaagccccagcgctcggtgatggtgagctgcatgctctcgagcacgccgcgctcacgctcgctcagggcgtgaccgtagacgcgctcgtcggtgatgacggcgaactgcgtggtgttgatcgcataggtaccctcgcgcaggatcttgcgctgcgggcccttctggccgccgccgagcaggaagcggcgtgcgtcctggaagtccgacttgtcctcggtgtcgttggcaccgagcacctgcgacggctccagcggcgcgccgtcgcgcgcgaacacataggcgatcttgccctggccgacggtcacgaggtccgagcggtggatccggtacatgaagggaaacatcacgtgcaggccgccgcgcagcacctccggctcataaccggcctcgccgttcagcgcgatgaagccgccgccgatcgagcccttgatcgcccacagcttctcgacgatgccgacctgattgttgggaatgtagcgaaatacgttcgatatccgcagcaggatcacaaacgcgatcgcgactgcggtccaaatggccggttgggttaaacctgagccattaagaaaaccgaggaagtccatagtccgtctccacaattcgcaactgggcggtttggggacccaaacctgacccaagaattgcgatgcggacatgtggagcggccatggcggtgcaaggcgtgaacattattcgcgcagccgatctttttttgatgacaggatgaaccgcctgacgactcgcgcgacatcgacgcgcgctgcaattgcacatcattcgcagcgcggacaccttacgcttaacgtttcgggtcacgcccgcggatatggtcgaagccttgcttgatcgcggcgaagcgcgcgtcgaccaccggttcgaattcgaggtcggtgaagatatagggccaatcgctttcgatgccttcgcggacgagttcaccgacgtacatcggatcgataccatcggagatgcgttggcggaccagattgatccgctcggcaagcgggcccgacgtcggcaaaggacgggtcgccccctcgaagcgcttggggagattgcgcgtggagtccatgatgtgagtgcggataaacccgggacacagcaccgatacgccgatcccgcgcggcgcgagttcgggccgcagcccctcggacaacgcgacgacgccatacttcgacacgttgtaggccgtgcttccccctgaaatgatgccggcgagcgaggccgtgttgacgatgtgtccaccctcgccgtgctgctcgatcaacggcccgaaaatctcgatcccccagatggtcgccatcaggttgacgcccagggtccaattccacgacgcgtcggtccaggtgccataaggcccaccgccgccgacgcccgcgttgttgacgaggatatgcaccttgccgtagcgagccgtcgtggcttcggcggcggcgtggagttcggctttcagtgaaacgtccgctttcacgccgtcgacatcggcgttggtgcgcctcagttgctcgagcgccgtggacagggctgcttcctcaatatcgcaaagcatgaccttcgcgccggcctgggcgagagcggtcgcgatccccaatccaatgcccgacgctgcaccggtcacgaacgccgtctttccagcgaggtccttcacgtgcattcccccatgcaagcggacatcttgtccgcaacatgccaagcatcagcgggcgccatatgaccgcactttcatgtgattgggaagtatgcgggacgtccgctcttggccccaaagccgacatccgaccggccggagctgacgtcagcttttgaccctgaccggacattggccctagccggacaacagcctgccatgctttgatgcagcgggtcattttccgatttcggaggccttttgacaggcgggcgcgttgaacggcggttagcggcagtgcttgcggcggatgtcgctggctatagccgcctcatgggtgccgatgaggagggcacactggcccggctaaaggttgtcagaaatgccgtggtcgaccccaccatcgccgctcatcgcggccgcatcgtcaagaccaccggtgacgggttgctggtggagttcgccagcgcggtggatgccgctcgctgctcggttgagattcagcgcggcatgtccagtcagaatgtgaatttcccagagcaccgcatcgatttccggatcggcatccacgtcggtgacatcatttttgacgacaacgatattttcggcgacggcgtcaatatcgccgcgcggctggagagtattgctgagccgggcggagtttgtatctccgatgacgcctatcggcaaatacggggcaaggtcgaaatcgtcagtgatgatcttgggcctcaaaacctgaagaacattgtggagccgatgcgggcgtggcggcttcagcttgctgatcaacacgtggcgagaccgcaaccgggcttgcattcaggccaatcgcaagcgctcgcgattcccgacaagccgtccatcgccgtgttgccatttcaaaacatgtccggcgatcctgagcaggagtatttcgcggacggaatcgtcgaggacatcatcactgcactgtcgcgcttcaagtcgctgttcgtcatcgcgcgcaattcgagcttcactttcaagggtaaggcggtcgacatcaagaaggtcggccaggagctgggcgttcgttatgtgctcgaaggcagcatccgcaaggcgggagcaagggtcagaataaccgggcagttggtcgatgccgcgagcagctcgcatctgtgggcagacaagttcgatggatcacttgaagatgtgttcggacttcaggaccggatcaccacgagcgtggttgccgcgattgcaccgaagctcgaccaggccgagattgaacgctctaagcgaaagccgaccgaaaagctggatgcctatgattactatcttcgcgggcttgcggttgtcgaaggcgcaaccaaggacgagaacgaggaagctcttcggcacttctacaaagccatcgagatcgatcccaattttgcactagcgcatgcgatggtggcgcggtgcttcaccctacgcaaagcaaacggctggatgacagatgttgcaaaggaatcagccgagaccgccaaagtggcccgacgcgcggcggagctgggaagagaagacgcggcagttctgtcacgggccggttacgctctcgcgcgggttgcgttcgaaccggaggaaggcgctgaccttatcgaacgggcgcttgcgctcaatccgcatctttcctctgcatggcaatacggtggcctgctcaaggcatttcgcggagagccggaaacggcgattgaacatttggctcacgctatgcgactgagcccgctcgatcccagtctctactcgatgcagacggctatggcgctcgcccatttcgttgccggccgatatgacgagtcggttttttgggctgaaaaagcctcgcgggaggatccgaacttcttgcccgccattagaattatcgcgactagcgccggaaattccggtcaactggagcaagcccagaaagcggcaaagcgagtgctggaaatagatcctgcatttagagtatctagtgtggccgatcacgtaccgctgcgccgtcccgacgatcttgctagatatgcggaaggtctacgacgcgccggattgccagaatagtcacgcgccgcctacgttttgcgtgtcccggcatcgttgtgacggtaggcgccacttccgctcttggccccaagcggccgacccggcatgtccgctggatgtcggctctttggggtgaagccgacttgatatactcagcctgagttcttccggttttgacccatggcggacgatccgccggttcgtcaaatcccggacccattgttgatctgcctgtggctccccacttccgtcaattttggtcgtcatgtcagatccggcattttcgccaacgcgtagccgtggaaggtcacgcgatcattttttagtaatttgcaggacggaaaaaatgaaaagcgcaacgctgtttgcccttggtctgtttgcggcggcaatctggtcacacgacagtgcgagatgtcagacgtcgcctttccctccgctttcgcttgcgccgccggcgtcgaatgaagaggccgcatctccggacgcaaccaacgctcggccgccgacggcgaccgccaagggttcggtgccgccccgagccgcccaagatgtgccaccacgcgccgcttcacgatctgcggctgtcgaacacacaccgtcgcagtccgaccgcgcttcgcccgcacaagcgatcaacaggccgtcgccgtctgccggggcggcccccgattacgatggctttagcgtcggcatcgacgatgcccccccaagccggacgacacgacccgtcaggtcgcacgaggcaaggcagcccaagctcaatcaagcagcagatcatgtctcgaggcaacagacggccaatcccgggaacgatgacgagctaaagggcaagcttacgatttgccggggctgcaagtaacagctgccactcggggcggatgttggaattggcacgttattttttgcgggaggcttcttgcgatgcaagagtccggtgatggcctcctgccagcatcgcggactgtaccttttcaaatgaccgttgctcgatctggcggacgcgctcgcgcgatattccgtactccgaggccagcgcctcgagcttcgggggatcttcgctcaaatagcgtgcggtgaagatatgcctttcacgggggctcagcttttgaatggctgcagacaaagcctggcgccgttgagccagctcctggtcctcggccaacgtcacgtcatggggaggcgacggatcaaccagccgttcgagggcatcgccgacgtcaccggcatggttgtggcgcaaattcagggacaagtcgccacgcaagcgtcggtccatgttcacgacgtcacgttcggataccctgaggtgcgcggcgatcgtcttgacctgttctggcctcagatccccctcctccaaggcggagatcgcactcttcgattgcctcagtttgaagaataacttcttctgggcagcgtccgccgtgatcttcaccagcgaccaggagcgaagaacaaaatcctggatcgtcgccttgatccaccacatggcataggtggacaggcggacaccccgctccggatcgaatcgtcgcacggcctgcatcaggccgacattgccctcggaaatgacatcggcaatgggtagcccataccctcgatatctcatggcgattttcgcaacgagacgcaggtggctcgtcaccaagcgataagccgcttcacgatcgccgcggtctcgccatcgccgaccgagggtggcctcttcgtcctgagagaggatcggaaattttcgaatttccgtcagataggtcgtcagatcggtgccgagcgacggcaatctctgagaaacagctcgagacatttctccctcgcagtgctcaaaaatcttctcacatctgccgcgctctcgtagcggcagagcaacaggatgcatcgtctacaaagcaggattaccgtctgcctcatgacggccagaacgtcggccctttcggttggagccatcggtctttcgatccgaaccggactccagaagacgcagggcatccacgatgtcgtcgaagctcccagctccatcgatcgtctggttcgagtcccgatcgtctttcacggcgcaggcatccacggcccaagacgatagaatggcccgtttctcgtacgatgtcaggtcgcaatcatcgacaacgtccattggatgggcgaacgcctcggctggatgcaatagcccggccatctccaagtccgtcgttcgtcggcgatccatctgcagcgagaggcgatcgggaaacgtctcgtgcaaaagtgcctcgacggagcgctgctcctccctcatccggcgcgcgatatacgctcgctccaggtccgacagacgcgtcgcgagcagcctgcggtagcgccgaatattggtgcgatgggtacgcaggcgttcaaggtgtccctcgatcatcactcgccccctttcatctcaggcagccagggcacgttcggtcgagcgcaaccggcaaggctttccacccggaggatttcggggtcccccgtcgagttcgcacagggcctcgagaatttcatcgatcgatacgggcttcttcaatccggcgggcgagcgaagcgacgggcatgatgcgatcgcggatgcgtcagacgcccaggatgccagaatcgcccgcttctcggccgtcgtcaggccggtgtggcacacgacatcccggggatggtcgaaagcggtgccgggatgcaggagcgcgttgaagtcaaacacgttgtcgtcagcggtcgtcggccgcatgatatcctcctttgcattgacgacgagtggcagccgcgcgaagtctcgcgcggcgccggtcggagacggctcaggccgccttggcttccagcttctggacgttgtcactcggcacgccgattgcgatacggcgcggcttcatggcctcagggatttcccggaccagctcgatcttgagcaagccattgtcgaacgcggcgctcttgacctgaacatagtcggccagattgaactggcgcttgaagttgcgggtcgagatgccgcgatagagaaaatcgcgctcggccttgtccgacttgctgccctcaatggtgaccacgttctgctcggccgtgatcgagatctcgtggggcgcaaaacctgcaaccgccagcgaaatctggtagcggtcctcggagagcctctcgatattgtagggcggataattgtcctcgccggcccgctgggccatttccgcgaggtcaaaaaggcggtcgaagccaacggtcgaacgccaaaggggcgagaagtcataagtgcgcatagccaaatcctccaaagagcaagatggttacgagcggcaccggacacgaccggtgcccgtctcaacggtccggacccacgaggcttccggacaccaccgttcggtggcgacaaaaaaactagcaaagtcgtttttggtttcaagagggggaccaaaaatttttatggctttggtcggccgaaaccgaaagcacgcgggccagggtaacaaatgccggctatcgcggcccttagccgacaccacttcaatccgccttcggtgccggcctttcggggagaagccgatgcggattccttgagcgtgccccctacctcggatgccaccagcgtccgccgatcacgacgccttcggatgcgatcctgcgatcaccggtcaggtgctcgccgacgacgtcgacatagtcgaattgcccttgccggatcgagagcagcgtggcgtcgccgacgctgcccggcttgaggctgccgagctccggccgccgcaacgccatcgcggcattgacggtggaggccgcgatcacgtccggcagcgacatccccatgcagaggaatttcgacatcgtcgtcacctggtcgaaggccgggccgtcgatgcagagctgatggatgtcggacgagatggtgtccggataaaagccgttggcgagcatcgcgcgcgcggtcttgaaggcgaacgagcccttgccatggccgatgtcgaacagcacgccgcgctcgcgcgcttccagcaccaccttcttcacggtgccctgcgcggttgccggcgtattggggaacgggcggaaggcatgggtcagcacatcgcccgggcgcagccgcgccagcacctcctcatagctcggcggcggatggtcgatatgcgccatcaggggcatgccgacctgctccgccacttcgagcgcgatctcgagcggcaccagccccgaggtgcccgaggcgaacagaccgacccggaccttgatgccgacgatgaggtcgcgattctcgtccgcgacgcgcgcggcatcgaccggattcatcaggcgcaactcctcgctttcgccgaccatcacccggtcggagaagccgaagatgccggcatgcgagacatgcagataggccaggatgcgaacctggctcggctcgatcacatgcttgcggaaacccgcaaagttgcccgggccggcgctgccggtatcgaccgaggttgtgacgcccgaggtccggcagaattcctccgcgtcgatgccgagcgaggtgccgccccagtacacgtgagtgtgcaggtcgatgatccccggcgagacgatctgcccggagacgtcgcgcacgtcggtcgcaccgtcggcggccagtccctgcccgatcgccgcgaccttgccgccggcaaaggcgacgtccgtcaccgcatcgagcttttgcgacgggtcgaccacccgcccgccgcgcagaatcaaatcgaaagccatcgtcatctcctgatttcagtccgggacgatggtcgacttcggcggtgcctgcaagcggctcaaccgacacgggcctgttgggaaaccggcgcggtcactgttgcatgatccgcgctacggtccgcatccttatcaacatccttggcggatgcgaagatcgccgcaatggccgggttgtgcgcagcctcggagacggcaatggtctcgcgtgcccaacggtatgacgactggaatatctcctgatggcggtcgaaatcggtgacatcgatgccatcgggcgtcggcgggcgcatcaccatgtcgagcggcgtggtcggcagcgtatcgtagcgctgatgcgcgacgaggcttcgccacagcacgttgacggcgctcggcgcagccggaagcgccttgcgccggaacggcatcagcagcgacgcgagcaactcgaacctgcccggcagcgccgcgtagtcgacatcgaacatctcggtcgccggctcgccgaaatggaccaccagattggggccgctcttcatctggtgcatctgcgccagcggaacgttgtcgacgaggcatccgtcgaccagcatcgagccgtcgtgggtgtagaacggtggcagcaggccgggaatggcgctggatgcgcgcaccgcctgccacagcaggccggtccggatcagttcgaggctgtgcgtcgacagattggtggcgactgccgcgaacggccgccagcaatcctcgatccggcaattgtggccgtactgatcggccagcgccgcatcgaaggccttatggtcgagcagcgcgtagcgcggccaggtcgggcggcggaagctgcggctggagacgaagatctcatgcgtgccgcgctcgagatgctcggcgtcgtagttcttggcaaagcctgccgccatcgccgaaccgacgctggtgccgacgaagatgtcgaacatcgcgccgcgctcgcgaaacgccttgtagacgccgacatgcgcggtgccgaggctgccgccgccgccggcgacgaacccgacggcgcggccgcacaggaagcgaaccaggctgtcgatatcgatctggtcctcgagcgcgacatggtggtgcatgaagcacggcagccgcgcgagccaggccgcggtgccgctgacctcgttttgcctgatatcatgaacgcgcacgaggcgccgcgccggcgccggatgcaccccgcaagcaaagctttcgagctgggtgagatcaggcgccggcgcctggccgcggcaggcgaacacgacgagatcggcctggcggatggtctttcgcgcccattccgacgcttcggcgccaccgaaataggccaccagcggcacgtcatactcgatccggttgagccagtcggcgacttcggaggcatccagcgcacggccgggaaacatcgcctggacgcgcgcgaggtcgacgatctcggcgccggcggcggcaaggccctcgcgcaacctttgctcgaaggcggcagggaccggttcgcgtccgcccgaaatcagcgcgacggtgcgtgccttcggtgaggcccggaccggcaacagccgcgcggtctggatcgcaaagcgctgtgcaagcgcggccagcagcgcctcgacgatcccgggcgtctcctcgaccagccgcgcataggccgcccgcgtcagcaccagcacgctgctgtcgcggatcgcgatcacattggcggtgcgcgggatgttggcgaagaagccgatctcgccgaccagttcgccggcgcgcagctccgcaatcggctcgggatgatcggtccggtgcaccgcgagcgcgccgtgcagcaccaggaataatgcatccgaagcaccgccctgctcgaccagcagctcgccgcgaaccaggtcgcgccgggtcatcgcgccaaaggcgatcagccgctgctcggcgctgagtgtcctgaacagcgcgaagtcctcggacaggtttccccacgcaaatgttgcacgcggcggcacacggttcgattgcatgattagatgttagcgccggggcgccgcccctgcgagcgatatcacagcatgatcggcagcacccggccgctattcccttgggggcactgcaacaggaatagcgacctcacccgaccaattcgggccatggcacgatggtcgacttcaccgtcttcatcgccatcgcgtccgccaccgccatcgagatcgacatagacatagacatattcagcccagccgccccacatgtgcggcgccttgtcgaagccgggatcgcggccgcaatagaccggcgtcaggcatttgttggcgctctgcggatagtggatgcagtaatagcagcggctgcacggcatcaagggcgggatcatcaccttcgatcccaccttgagcggcttgctcatgaagtcctcggtgaactccgggcagcattcgacgatcacgccgccgagctcatggccgagcgtgaacggccagggcagcggcttcggccaatgccctttcaggatgtgcaggtcggttccgcaaacgccgcaggcgccgaccttgatcaaggccgcctttttgccgacttccggccatggcacggtccggattacgggcttggctccaggtctgtcatgcgtgcagacgcggatctgctccatcggttcgccctccctgtccgtgtcgttgggccgggttcggccgcaccggccttaggtcaggacgatcgggatgtcatgaaggcctgtcatgaagactttcctgacaggctttggcggacgaggcgcttcagcggggaacgacagcatgaatcctggtatcgaaggcatcgtcggcatgtacgtcaagctgggcgagctcgacacgctgcaacgcatgaaggagcaccggcagagcctgctcgaccaatgcgtcgacactgcgaatttcaacttcgacgtgacgcgatcgatctaccggagtgatctcgaagtgatcaaagccggcatcgagaagctctcaggcgagatcaccggccatgtcgacgtgttcaacgagaacaggatcgccggctgggccttgtacgaccagcaccccgacaagcgggtgacgatcgatatctatttcaacggcgagctcgtcgccgagatcgtcgccgatcagttccgcaaggacctgctcaagctcaacaagggcgacgggcaccatggcttcatgttcgagccgccgagcgggtcctatcagccgcccttgcagctcgagatccgcgcggcgaagcaaaaagtgctcaaggcggtgacggtcgagccggcgatcgacgccgagaccaaataggatgtgcgagtagaccgcaagcttcggcctcgccttgttcgggtacggcgcatgtgaacttcgctgatcgctctagcgccgcgtccgggttccctcccacaaccgtaacgccccgttaaccctatcagctttagggtcatcggggctccgaatggacggtggccgggtttgtcgtgatgtcgtttgcacagaagaaaactaacgtcgtccccgtagccgaggagcggcgccgcttccagcgcgtcaaggtgcacctgctcggccgctacatgctgcccgaccggcgcgagtttccctgccagattatcaacatgtcgccgggcggcctcgcgctgctggcgcccggtatcggcaatgtcggcgatcgcgtgatcgcctatctcgaccatatcggccgcgtcgagggccgcatcacccgcatcatcgacaacggctttgccatgacgatcggcgccaccgcgcgcaagcgcgacaagctcgccgcccagctcacctggcttgccaaccgcgacatcctcaacctgcccgaggatcgccgccacgaccgtatcgtgccgcgcaacccgatcgccctgctcacccaggaagacggtacgcggatgacctgccgtatcatcgacctttccttgtccggtgcagccattgccgccgagaaccgcccgccgctgaagtcgctggtgatgctcggccgggtgcaggcccgcgtggtgcgaaatctcgaggaaggcttcgcgctcgagttcgtccacgagcagtccgcggaaaccctcgaagagagcgttaccgcgaggtaaagcgaaaagccgcttcagacccccgttttcagcctgcgaaggcggcctccggtgcaccggtggccgccttcgccgcgtttggcacggtgcaatcggcggttaacggccgcgcggtttggcgcaacaaaccgcgctggcgcaacacttgccgcgttaatgcataaaatttgaatcaattgcagttgtttcaaattttacgcgaattcgattcaagtacagatcgaattcgccgcagcttttaccagtattcgcgtcaaatctactttgcgcacttagcggcggcgaaaaaactttgtgcgaaacgtggtcccaacaagaagaacgggggccacaatgtttgggttcaggggacaggggaaaggtttggcggttgccgccatcctgtttgcgacgtgcgtgtcggccaaggccggcgacgtggtctatgccagcctgggtgacgtcgcgcgttcgccgatcggctgggtcgaattctgcgccgacaatccggccgaatgccgcggcggcgcgacgcaaccacgcgacatcgtgatgtcgcagaccgcctggcgtgacctcgtgcgggtcaacaagtgggtcaacgaatccatcaagccgatgaccgacatggatcattggggcgtgatcgagaaatggtcgttgccgaccgacggctacggcgactgcgaggactacgtgctcctgaagcgcaagatgctgatggatgccggctggccccgcgaggcgctgctgatcacggtggtccgcgacaagaagggcgaaggccacgcggtgctgacggtgaagaccgacaagggcgagttcgttctcgacaatcagaacgagagcatcgtcgcctggacggagaccggctaccgcttcgtcaagcggcaatcgcagagcgatcccaatgtgtgggtctcgctcggtgacaaccgccccgcagtttcaacggccagctcgcgctgagcggcaacaaggaatcgagttcgcgacccggtcacatccccacccctccccgtcccagaccggttcgcgcgcggccaggcttcccccaaagcctggccgcaaccttttgctgcatgcgaaaacaccgaaaatccttatggatcataggtgtttagcgatccactccgaaacgattggagacgcaaaacccaggaacaggccgtaaacttccgacaggaccgggaaaaatccgggcaacaccggccggccgttcaaatagaacggccacaccacgtccgcccgtagcggctcggctcggtaatgacggtatcacccggcacatcgatccattgcccctcgagccgcgcccggtagcgcccgtcgggggtgtcccagtcgacgtcagacagcgcggtgccgtcggcgtcgctgcagcaccgcccgccgcccgtgctggcgaggccctcgaaacatcccctcagcggcgagttggcgtagcggccgtcagaatcccgcgcggacgccggcgcgccaggtgaacaatggcgacgagcgcagcgatgccgatcgcaaagcgcgacatagtctcatcctttggtggttcccggcgcctgttgaagggcttcaacttccagttggcatggtccctatacagacctaaaagcgtctcttctaagaactagatcgatccactcgcggttcggacggccgcaaccggagcgcgatgaccttcacatcctggcagtttggaattttcgtcagcgccgtttttgcagtcttttacttgccgcccctgcggcgcgcgcaggtccatattctgatcgctgcgagcgtcttcttttacggatacggccagccggaactgttaccgctgctgttagtcgccgtggtcggcacttgggctttcttggctctgtcgttccggcggcccgcctataccgcgctcggcattatcttcaatctcggcctgctggcgtttttcaaatacaaattcctgttctttgcgccgccggtccagaccggccaggccatcggggatttcctgctcaacctgccgctcccgatcgggatctcgtttttcgttttccacaatatcagcctgctggtcgacctgccgaagcaaaaacgcgaaaggagcctgtgggaagtgttcctctatgtgatcttctttccgcagctggtctccgggccgatcacgcaggccaagaacttcttcccgcagatcaagcccaagtcgattgccgaagtgccgttcgttgaggcggtacagtggctggtgctgggctactttttcaagctgtacgtcgccaataatctgaatgagatgacgtcctacatggcctatccgctctttgagacggtgaaggccactgataaatggctgctgttgttcctctacagcttccagatctacgccgacttttccggctattcggcgattgcgctgggccttgcattgctattcgggtaccgcctgccggagaatttcaaccggccatacatcgcgacctcgatcgccgacttctggcgccgctggcatatctcgctgtcgagctggctacggaactacctctacatcccgctcggcggcaacaagcacggcaaggcccgcacctacttcaacctgatggcgacgatggctctcggaggcctctggcacggtgcggccgtcagctatctggtgtggggcttcatgcacggcctcctgctcgcaatcgagcggcggttcgtagaccggctggatggcgccaagtcccccctgctgaacgccgccagggctttcgtcgtgttcttcgccgtgtcgctgttgtggatcctgttcaagctgccggacttcgcgcacgccgcagcctattttgtgggactattcagcagcgacgaggtaccgaacccaccgaagatctatcggagcttggcgctggcctatgcgctgccggtgatcctgcaacacttcatcgtccccggccggccaaagggctcgtgggcgcgacggctcgagccggttttctacggcgcgcttgtcgccctgaccttcgccgaagccggaccggattccgcgttcatctatttccagttctgaggccggatcgatgtcgtggctgctgaagtttttcgttaccgccatcatcggcattctggccttgaaggccctgggcggatcggacgacccgctgttgccggtcacgacggatgatcgcaactatcatgttgccgtcagatacgtcgaccagccgtcgcaccgcatggtgatcgtcggcagttcgctgtcggtcaggctgtccgaggattacttcacctcgcccaacatcgagaatttagctctggccggcgggtcgccggaaaccggccttcagatcattgcagccaacgagccgctcccgcagctggtgcttgtcgaagccaacatcctgacccggccggttgacgcccgcctgatcgaacggctcaaagcaagattgacgaccgcgacgccggcggcgttccagccgatcagatcggctgcggctggttatgaggtcctgttacaccccacgaagtcgaaagaccaggtcaggcgcggcgccgactggcgtgtggcgcagccggctgctgagatcgtcggtccgccattccagcttcaggcgcagccagctccgccaccagaaacgatcgagcgaactctctcgaggatcgagcaacttgtccggagcctgcgatcgcgaggcaccaaggtgctgttcttcgaaatgccttatcccgccgaggtcgagcggagcgccgctgtcatcagcagcgccgcgatggcgcggaagacctttcccgacagcgcttcgtggcttgcgcttcaggtcgaccggtcggagctcagatggacggatggcgctcacctggatgaacgctcagcgatcttcgtggcaagagcaatagagacggccgcggcagagcaaatcagcccatagcgcggaaaagcccgcgcggcgggaaatccccaccgcgcgggccacctcccagccactccgccgaggaacagccggccgggacatctcatcagccgacggcatcactcgccggcgcgcgaacggtacttgccgaatttggtctggataccgagccagatggccgcacaggccggtgacaataacggtcgcgattgccttccagccggcgcgctcgacctgatcgctggccttgcaccacgcgacaatggcagcctgcggacccgaatgtccgaagcgccggccgaccggatggaagaagccgaagttcaggctagcattcgtgaccttccacgtcttccgccacacatgggcgacgtggctccgctactacggcggcgccgatgtgcagggcctggttgcgacgaagaactggcgcgacgagcacagcgcgagccgctattcgcacgtggtgctgcgtgatgaatggaagcaggtcgaggatctgccgatgatggggaaaacccgggggaagcgacgtcgcgcgtgaaattcgcgagtgcgatcaacgcgcagccctttttcccccaaagcttggccgcaacctttttcgagagacgcgaagactctgacttccgcatcagtcggcctgatcgccccggcggactgagacgtcagtcccgtcttggggcagaagcctcggaatttgcggcgaattttatggaccccgagccatcggcttgaggccacgggttttgcccgagccgaggttgtgctatttccaacctttcaattgatgtccggttctggtcgcatggtcgaacttgccccccggaatgcacaagccagcagcctgatcggcgtgcagccgatcgcgatcggcgctgtggcgctggtgctcgtgctgttcgggatcggctcgatcgcgctgtggcgcagcttcggcggcaccgtgcccgagaccgaccggatggccgccgcccgcctgctgcaggcgcgaactgcgcaggtctccgaggccctggtggagaagaccaaggggatggagctgacccagcaggaatccatcgaccagttgcaggaggtgcaggaccagctgcaaaccatgcgcaagcagttcaccgcgcagcaggccgacaccaagaagctgtccgaccaggtcaccgcgctgaccgagcaggtcgagggcctgcgccagtcgctggcgagcgcgcaggccaatgagccagcagccgaacccgagccgcgcaagcgctcgaaggcagcccgtagcgccaaccggaagcgccacaggtcgcgcggctgacggcccccggggcggccagcgccgagcggcgggatcagccacaaaatgcaccaaatcccatgcaagatcagtcactaacgtggaaccttgcgaactcggaccgtccggcagcggcctcgcaggagtgcctgttacagtgaattaatcctgactttgtgaactgcttcacatatccgacttcgaatccgagtcatccttaaatgaccggatggcgtgagccgatttcaatatccggggctggcaaggtcgttgacggtatactgcgtcgacggccttgttttttggcccgctgaatcccggtctccggactgcaccccgcacccgacaccgagcgcgccgcgccagcgaccgcaagcaagcggccgacggccctgcaggcgcgacatcgctacggctgcttcgtgggatcgtgcgacacgcgattgcccctcagccgcagccgcgccagcttcggctcgagttcgtggagcatgtagaccagcgcaaccgcaaggctcgaaacaatcaccatgaacagcaatgtcagatcgggaatggtcagcatctcggatgtcctctgagaccggctccaaccgcagccggaccatatgttttcgtgatgcgctcacgcgctaaccgctgtcacgcaaagcaagctgcataccaatgcgcgacggccccggcatcaagacaccgaggccgcgcctgtattccaagacctgtattccaagactcatcagcatggcgatccaatggatcgtccatgcgtcggcggatggctcagttgcaaacctgcacgggccggatctgccagccatacggtgtcagcatgcgacggcgcacgacgtaacagccgccgtcaccgtagccataaccatcgtcgtagccgtagccggcatagtacggattgccgtaatagccgtcatagtaatcgtaggcgccgtagccgagcccgaagccgatcgctgctgcagcgaacggatagccccagccgcgccgatagtagccgccgtgccagccaccgccatgccagccaccaccgtgccagccaccaccgtgccagccaccaccgtgccagccgccgccgtgccaaccgccaccgccgcccatggcgtggaaggcgccgccgtggaagccgccaccgccgtggaagccaccaccaccgtggaagccgccgccgccaaatccgccgcgcgccgacgcggtgtcgaccgtgaacaggccgaccgataccgtcgccagcaaggcgatcatcgttttacgcaacatcacccgtcactcctctttccaggcttttcctttcaagcctcctccgccgcgtcccgcgcatgctaacccaatctaggaccgcagcttccaacgcgcgcctgtgtcgcgctcacttctgcgcgacccgcgttcatcaaggcacggccttcaaaagttaacaaccgcggctgctgctccccgtgccttgggcgacgatcgctccgggcgcgagcagaatcgcgattgtcgctgacgcgacggtgacggataatttgcgcatggcaactctcccttgcggacatcaacgggtccgcaaaacgccggttcccacaggcgttggagcaataaggtttgggagcaatgcaatttgcgcaagctgatcgaatttgacgacgacacgttcggcaagctgaagcagcttgggcgcgaccggatggcgaccctgcaggagctcgcggacgaggcgttcgccgacctgctcaggaagcacggtattccgatcgacctgaaggacgcgctgcgcaagagcgcaagacttcaggaggcagcaaagcccggccccgcagcaccgaaggctgcgcgcaagcagggccggaagcgctgagggttcagccgatcttcttcagtcccgccttgtactgcggtcccctgatcgcataggacttcgccggccgcgacaacgcttccgcctgcgcggcgtcgagcgtgcgcaccacgcgcgcgggcgctccgatgatcagggaattttccggaaactccttgccctcggtgatcacggagccggcgccgaccacactgccgcgcctgatgcgcgcgccattcatcacgatcgatcccatcccgatcagcacgccgtcttccagcgtgcagccgtgcacgatcgcgttgtggccgatcgtgacgttgttgccgatggtcagggggaagccgggatcgacatgcagggtcgaattgtcctggacgttggagccctcgccgatctcgatccactcattgtcgccgcgcagcacggcgccgaaccagacgctcgctcccggcttgaggcgcaccttgccgatcacgacggcattatcggcgatgaagtagctgccgtcggcgggaagatcgggcccctgcccgtcgagttcgtagatcgccattgaggtctccttggatcggaagagaccttggcacagcggcggacatggtttcaagcaagcgccgtgacgatccggcgcggatcacgatcggctcagccgagcacgcccgtagcgcgtagcgtcatcatgaagaaagtgcccgacatcaggctccagaagccggagatgacggttgccatcatcacgaactcgaagcggcggcgctcgatgcgcgcgccgcgcagcgtgttgcgcatgatgatgaagggtgcggcgaacaccaggaacgggacagcggcgaaggtcttcggcgccacgccctcctgcagcaggccgaaaccggccgggcgctctgccatcgcctgatagccgctggccagtgcgcccgcgaacgcaaagccgatgaagagcgagaacagggaattaagggtatcgggcgacatcgggaacttccgctacgcaacaggctactcacccctgcttcgcagaattggctgccggccgccacatcatccttaaggaaaggttaatccggtccgcccggcttggcgtttgcgcatggccgttcgctcagggattccgttggaatcgtacggaaattcctcgcctcatggcatattcggcaggtgattcgaccacccccgacccggcctttgcctcgttcatgacgcttctgtcgaccgcccagcatctcgcccgcgacacccgccgcaatccacgcgcgcatctcgtcccgatcatcgcctcggcggtcatcgcggccggcgcgattgcgctcgtcgcctatctgttgtggccgacctatacgaccatcccggtgagcgatccgtcgcggctgccggtcagcgtcggcggcacgctgttcaacgtgccgacgatggcggtgcgcatgaagatccagcgccactccgggccgcaggagcgcgtcgatctgagcttcctctatccctcgctggaggcgccctcagcgcccaagcactacagcgccgaaacggtcgaggacaaggtgcagccgatcgaccggatcttcgtgtcgatcgcggcccaccacgattcactggcgcccgacatgcgcctgcgcacgatctacccgcgctatctcgacgatcgtgcaaataccgatgacggcctgacggcgcgcgcgttccgcgacggcacgccctatggcggcgaggacctgtacaccgcggccgagccgcagctcgtggcgcgctgcacgcgcgatacctcgacacccggcatgtgcctgagcgagcagcgcatcgagggcgccgacctgaccttccgctttccgcgcagctggcttgcgcagtggcgcgacatcgccaccgcgatgaaccgcctctccgcgcagatgcacagcgcgaagggataacttgttcgtcactgcgagcatcgcagtgacgattcaacaagcagaggctgttcagccttactcggccagatcttcttccaggatggccatctggaactggaacgagcgatcatcgtcctcgtcgtcgacgaacagcacgccgatgaactcctcgccgatatagacctcagcggagtcgtccttcttgggccgcggcaccacgcggatcttgggattgctgaacacgcgcttcagatacgcgtcgagcttcctgacttcctgaacgtccacggccgtctccaatcgggtcgatgattttcggggaggttttaggacgagatggcaaagatcgccagcgccttttcaggctttggcgacgtgatgttgcgcacacgcaaaaacgcgctgccgatcagaaagcgaatgaaatcaaagaccgatcgcgttgagcatctggtccatggtgcgcgaaggttcggcacagccggcttcgccgacgattttcgccggcacgcccgcgacggtgacgttgtgcggcacgggcttgaccacgacggagcccgccgcgatgcgcgcgcaatggccgatctcgatattgccgaggatcttggcgccggcgccgatcaacacgccgtggcggatcttcggatggcggtcctcgttctccttgccggtgccgccgagcgtgacgccatgcaggatcgagacgtcgtcgtcgatgacggcggtctcgccgcagacgaaaccggtggcatgatcgaggaagatgccgcggccgatcctggccgccggattgatgtcggtctggaacaccgccgaggagcggctctgcagatagaaggcaaaatccttgcggcccttctggtacagccagtgcgcgagacgatgggtctgcagcgcatgaaagcccttgaagtagagcaagggatcgatgaagcgcgaggtcgcgggatcgcggtcatagacggcgacgagatcagcgcgaaacgcattgccgatatcgggctcgtcgcgcagcgcctcgccataggtctggcggatcaggtcgcccgacagcgcggcgtggtcgagccgctcggcaatgcgatggaccaccgagtcttccaggcgctcatgatgcagcacggtcgcatagatgaagcttgcgagctcgggctcgcgccgcaggatgtcttccgcctcgccgcggatccgatcccagatcggatcgagcgccgcgagcttgctcccctgcggattgacctgatgaactgccatagctggtctcgcaattcggttgttctggagtgcgttatagcacggtagacccagcgcgtcccgggaaggctcggtacggtaaaccccagccgaacgaccctggggccgacgtctagaggaattggtcgggatttcgccgaaatcaagccgtgcttctgcaactattggcggatttcggcccaagtgtggttttgggcatggtcggcccctctgacgggggaagcatcatcaacagccagacgttacgcgcccgcctgaccgatgcccggtcggtctggatcgccaccatcgccattcccctcctcctgctcgcgcctgccttctggaacggctatccgctgctccaatgggataccggcggctacctggcgcgctgcgcgcatggtgtgggtcgcgaccttcgtggtgctgatcgcagcggcgcgcgccttcgcaaaagacgataccgaagacgatgccgagaacaataccgacgagctatttgcgctgcgccaggaagtcgatgacgccggtcttgtagaccttgtccccgaccgcccgcatgtggtcgcggttcggaatgtcgagcacctgcgcgcccggaatgatccggccgagcgctgacgccgagcccgcgatctcgtccttgctgccgactgcgatcaggaccggcacgccgatgccggcggcttcctcgtgcgtcatcaatcggcgcgagccgcgcaggcaggcggcgagcgcgcggcggtcggagcgggtctggtcggcgaaggcacggaaggtgcggccgaccggatcggtgacatcgtcgagcgacggcgcctccagcgccagcgcgacggtctcgccgggcccgccgccctcgatcagcccgatgccgatgccgcccaggatcgccgagcgcacccgatcggaatgctggtgcgccaggatcgcggtcatccgcgagcccagcgaatagcccatgatgtcggcgcgcgcgatgccgagatgatccatcagcgcgatcacgtcgcttgccatgatcgcgatctcgtactgcgcggcatcgtagagcttggcggattcaccgtggccgcgatcgtcgagcgcgatgacgcgacggccggccttgacgagctccgacacccaggtcggatagatccagttgacgttcttgctcgaggcaaagccgtgcaccagcacgatcggttcgcccgcgccctcgtcgagataggcaatttcaacatcgccgtgatggaagctcggcatcatcgattccgtttcttcttgcgatttgcgatttgggatttgcgatcgaccggcgaccgcaagcttagccctggactggcatactcgccagcgcggcctgggcggccatctgccgcttcaggcgcagggccttgcttcgtcggagccaccacgccgtggttcgctcggtggtggccttgatcgacgacaggaaaccgaacagcgcaagcagcgcgccgaacagccacatggtgaggttgaacgtgccggccaccagcagcagcgcgccgcgcccgagcagcttcatgatggcgcgggtctggccgcccttcacctcggcgatgcgggccgcacgcgcgatctcctgcgggttctccgcgaccttcagcgtgtcccgcgcggcgcgaacgccggccgcctcgccgatgcgcccgacgtccttggcgacgcgcaccagcccgccggccttctcggcgcggaatgccgcgcgaatggccgttgcggtttccgccggccgaagcaccgagccggaggcgaccgcctcgcgcagcgccgcctgatcgaccacttcgcgggtcgagcgtccggcccattcgatcatgccctcgctcagccgtcccgccttgcgcgtgtccttgaccagcgtcagcccggcgcgcagcggcccggcgccaccgaccgacacgtaggtcgccgcggtcacggcaagcccggcggccgcaaggccgagcaccagctggtcggtgtcctcgcccatcaccaggtgcttgccctcacgcacgacgtccctgacatcgccgaacacgaacaggtcgcccgcgaccgtgccggacaggctcgccacatcgtcggcattgccggtcacgaggccggtggcgaagcccttggcgaaatgcgtagtcgacgactgctcggcgcgcgcatcgtcgactcgctttgtgagctccgcgctgagcgcgatgttcttctcgcccgcgagcgcgacgaagctggccgcaagatcggcgtctccggtagcgagtgccgcctcgatatggtccgatatcaaccccgggttgttgcgcagcacggaattgaccctgaggtcggcgagatcagcgggatcgtcccgcgccgacagcagcgcgcccgcgtcacgggcatgcggccaaatagcagcgccgacggcagcacttaccgccaggccagccaccgcaacgccgaggcgcaccccgttcattccgctaaaacctctagttttattcgccttggaaatagtgtgccgtttttgcgacacaacggctccgaccaaagaagggcttctctgggacgacaagattgtgtcgaatttgcatgagcaaatgagccatcggggctctaggaatcaactgttcccgccagtatggtgcgcggcatttcgcgatgccgcatgctgttgattgcgtctgcccatcgttgccaccaaggtgagaatatgtccgaccacgtcgtcccgcacttccataacgatgccggtgtctcggtgatcgagatcggatcgcaggagttcatgtgcgtgggcgccaacccgccgttcgaccatccgcacgtgttcctcgacctcggcaacgacaacgagatcatctgcccgtattgctcgacgctctatcgcttcgcgcccgacctcgccgccggcgaagcgcggccgccggaatgcgtgctgaaagacaaggtcgcctgaccgccccgtggcgctgacgcgaaccgtcatcgttgccggcgccgggatcgggggactgacggcgtcgctgacccttgcggcacaaggctttcgcgtcgtggtgctggaaaaggccgaacggctcgaggaagccggcgccggcatccagctctctcccaacgccagccgcatcctggtcgagctcgggctcaaagagccgcttgcgcggcgcgcggtcacgcctgaatccgtcaacatcctgagcgcgcgggccggcggcgaaatcgcccggatgccgctcggccaggccgccgaattccgcgccggcgctccctactgggtgatccatcgcgccgatctgcaggccgcgctgcaggccgccgtcaacgatcaccccgatatcgacctgcggctcggctgtcagttcgaggacgtgacaaagcacgccaagggcctgaccgtcgtgcagcgccgcggcaatgcacggcagcaggaattggcggttgcgctgatcggcgccgacggcatctggtcgtccgtccgcggacatttgtttccggatgtacagccgcaattctccggcctgatcgcctggcgcggcacgctggacgcaactgccctgccgcgtgaatacaccgcgccgcgcgtgcagctctggatgggaccggacgcgcatctcgtggcctacccgatctcggccggacgccagatcaacgtggtcgcgatcgtgtcgggcacctggaacaggccgggctggagcgcgccgggcgacagcaacgagatcaagggcgcgttcgcctcggctcgctggcccggcaccgcgcggatgctgatcggcgcggtcgacggctggcgcaaatgggcgctgttcacgctgcccgacgtcggccactggagcgaaggcgcggtgacgctgatgggcgacgctgcgcacgccatgttgccgtttgccgcgcaaggcgccggcatggcgatcgaggatgccgccgtgctcgccaaggccctggccgactgcaccggcgaaaacaccgccgggattcccgccgcattgaaactctatgcgcgaatgcgccgcgagcgtgtgctgaaggtgcagcgtttggcgcggcagcagggccgcatctatcatctgagcggaccgctggcgatcgcacgcgatctcgcgattcgcgccatcggcccgcagcgcatgctggcgcggcaggattggatctacgactggcgcgcctgaagcatctgcggctcgcgcccgatcacctcggccgaaagcgcttgttcagtgaaccacgccccgcggggcgcgcggccccctcgccgccggcgcgggcgttgcgggtgcggccgccgcaggggtgtccggcgggctttcatggcacttgttggcccgccatgcctgatccgccagcctctgctgtgagtggatcgaaattagctcgttgcgatacaccacctcggagaccacggtaccgccgacgccggtttccgccttggccatcagcttttcctgatccgtcgcgcgggacgcgaggttcttgcgctcggtgtcgagctgcttgcaatcataaaggtcgtatttggcgggatcggcgaatgccgacggcacgctgtcgccgatctgcgcacagccggaaacgcccgcggccgaggcgagcagcacaacgatggctgccgcgcgcaacagattcgggcggcatgggaaacgaacgggcattcggctttcttattcggacagtgttgagattgcctaaagcagccgccggtgtccggattgaggctcaatcgcggcggcgcgctgcttatcccaatgcccggccgccaacgcaaatggaattgcgggccgcagcttaagcccttgaaagcgcatctgttagcagcggataatggcaattccactccgccaccaaacgcgctagatatcggcacgccctggagcatgatccggaaaagtggaaaccggttttccgacaagatcatgctcaaacaaagagatgagatcgtgacgcgtttccgtggaaacgcatcacgatctggcaatgcggacgtggcggaactggtagacgcaagggacttaaaatccctcgacggcaacgtcatgtgggttcgagtcccaccgcccgcaccacatctccagcgcttgggcgcctgcgagtctgcgcaccctaccctgcgctaccgcttcaatttgctggccttcgatttcttctatttcttggccttcgcttttttggccttggccttctttgttgtcttggccttcgccttcaccggcttcttggccttggccttcttcggcgatttcttgactgacttcttggttgacgccttggcggcagccctcttggtcggcttcttggctgccttcttgggggtcttcttgacggccctcttcttcgcggcccgaccagcggtgttgggctgttgcgccgcgccgccactgccagcacccccgacgcgtgccgggcgcggcggcaccggctcctccatccagaagtcgagctcctgctccttgccgccgcccggcttccagccatcgagcgaatagatctgatccgcattgccgccgctgccgagatagccgcgccaggaatagtggtcgtagacgccgttgatgtgcagcgcataggcctgggcaagcttcttgttgccgcggatgatcacgagattctcgtcattcttctccgaggcggcgaccgagaaattgtgcgatccggtgatgaccgcgcaatcgtcggagaacggatcgatcacgatggtcttggaatgcacgatcgcgatcatccccgcattgcggatctgcgacacgctgaactcgacatcggcccacgacggttcgttcgtggcgttgacgccatgcggcaactgcacgtcgtcatggaaggattgcgccggcgcgcccgatttcacgacctggccgccgaccgagacgatgttgccgttcttgctgggcatcatcgtcgacaccacgccgcggacgtacatgtcgttctgctgcgcgcggtcgagcagtgcgctcagcagcggcgactggcccggcatgaacatcaggaagagcgcgccgtccttggcgttcttgatcaggtccagcaccggcttgaactccgcctcgccgttggtcgcggcgaagtagaccgagatgttgctgtcgttggtcggagaggaattcgacgccttcagcgccgccggcatggcgttgcccgcggcgaccagcttgccccactgatcgaggtagcgcttggcgatcaccgcattctcgatgatcagcacattgttgagctgcgtgcacagcccggtggtggtccagttcgtgcttccggtcagcacacggatggcgttgccatgcgcgtcgctttcgaccacgaacttgttgtgaacgctgggcgacgacctgcccgcattcgacaggtcgcgatgcttgaccgtcaggccggcgctactgagctcgcccgcgatgttcggtttggtcgcactgccattgccgagcaggacgttgccgcggctgccgaacggcttcagcgcgccgaccagttcctcgtcattcatctcgtagatggcggcatgcacctggctgccgcgcaggtcggcatcatgcagaaagcccaggatctcgtgcagggcgtcgccggacaaatagcgccgcgcctggttggccggatcggacaggcccttgacgaaattgcgcagcgcgtcgtcggtcgtattgcccttcacgaagcggctgacgatctgggacatcaacgtgccccggttgaaataggccgacaggccgccgcccgcatcgccggaagcgaccgtcggcgccgtccatgccgacaccgaggcgggatcgggcgtgaaggtgccgttcgcaccattgttcatcgcggtgacgcggtaggagacgttgtcggtgtcgacgacgctgtgatcggtccagatgcagcgccggaacggcgattgagtcgaggagatgccggcgtccgccaccggcttctcgccgggcttcggcggaatgcggttggacagcacggtcgtctgctgcgtgatgttgttgcgccgctcgagctggaaaccgacccagtcgttggaccaggtgcccggctgccaggcgatcaggatatcgtcggcgttcgcataggccttgacattgattgtcatgataatttccccgaagctgggtgaatccatcggtgcgaaacaatggacgccgccgtgcacggctggtgatgcatcccgggcggcgccgacaccagcccgtagaacaatacctcgataacccaaggtagattgtgaaatagacgacaacttgccaggcaaaatcggcgcggcgcgaccgccgtcaaaccctttgcgagcgcccattggcatgccagggcgcgcggccggcccgcatcacctcatcgtgtccaccggctgtggcgaggttcacacgccgtgctcgccgactgtggtattgtcgaggcgttggaaaattcctgccgcgcatttcgcggctctcgcattccgagatcaaatgtctttggagctgggcgatgacgattgctgatcgcaatcggattgccggtcgcaatcagattgacaacaccgcgccggaccatggcgcttccctgctcgagcacggcgacgacgccgctcattgcagcaacgggctcaatgcgcagagattccgcgaagcaccgcccgacgaacgcgcgatctaccaacgatggatccgcggcgcgatcgtgtcgtgcgtgctgctggcgctggccgctggcgcggcggtctggatgagcggcggcaacgccggacagacgcagctcacgagcctgtcgagcacgagcagcgcgagatcgggccacatgccctagcggccatcggttcggtccgatcactgcttcattgtcgtcgtgctgcaggcgggcgcatgcctcgccgcacgcggcgacgcaaacgaaaatggccggggacgagccccggccattccattctgaatcaaggcgcgcttactcggacttgtcgatgttccagaagatcggcgtcgccgggccgtcgagcacaccggtcagcgacttccgccatgcgctcggtccctgatactggcccagcgggatgtagatgacctgctcgtaggcttccttctggatatcggatgcgatcttcttctgctcgtcgagcgacggcgcgcggacgaaggcatccttcagctgttcgattttcggatcatcggcccagccgaaccagccgccattcttgccctggccgccgatcgagaggttggcgatcgggttggagacgtcggcgctcacccagttggtgaagaacatgttccagccaccgtccttcggcgccttctggctggcgcggcgagtcaccacggtctgccagtcggtcgcctgcagatcgaccttgaagccggcgtcgcgcagctgctgggcaacgacgaccggctgcgccttcagcgtggtgacgtcgccgggcgccatgatgacgaccggcgtgccgtcgtaacccgactcggcgagtgccttcttggccgccgccatgtcgcctcccttcgccagcgtctcgccaccgatctccgacgcgaatggcgtgtcgcagatgaagaacgcgacacaggtcttgtaatacttgggattgccgaccagcgcgtcgagcacctgtttctggttgatcgccagcagcgccgcctggcgaaccttgatgttgtcgaagggcggatagaggaagttcatgcggccaagcgtctggaagccgaacttgttcagcgtctcgaccttgatgtccttgtcggcctcgaggatcgacaacgtgtcgaacgacgggttctccacgaaatcgatatcgccggactgcagcgcgttcatcgccgtctgcgcgtcggccatcgtgacccactcgacgcggtcgaccttgacgaccttgccgcccgcggtccagctcgccggctccttgcgcggcacgtagtccttgttcttgacgtagaccgccttgacgcccggctggaattccgcctggacgaatttgaaggggcccgaaccgatctgttccgggatcggcttgtccggcggcgtttcggcgagccgcttcggcatcatgaaggcgacgcgcgacgacggcttgccgatcgaatccagcaccaggccgtagggctccttcagcttcagcgtgatcgtcttggcatcggtggcctcaaggctcgccgtgaagtccatcagcttctggcccatgccgtcgaccttggcccagcgcttcagcgacgcgacgcagtcttcggcggtcaccggcgtgccgtcatgccacttcaggccgtcgcgcagcgtgaacgtgtaggtcagcttgtcgtcggagaccttccagtccgccatctgcggctcgatcttgaagttggagtcggtcgccaccagcgtgtcgtagaccatgtagccatggtcgcgcgtgatgtaggccgtggtcaggatcggatcgatgacgcgcagatccgaatgcattaccgcggtgatggtcttgtccgcggccacggcgtgttgcgtaaacgacaattcctgcggcgcgaacgacagcgcgaccgccgtcaacgcagccgctagcgtgcggcgcttccaacgcgagatagggaacatgaaatctctcctgacgtgtaactggtcaaagccggcttattcgttatgcatgcggttcgttatttggcgaactaacatgctgtatggcttgtgaaatcgagacttgcatcaagcgcaatgcgcgtcaatcggtttcgggcgagatcaaacgtatacgaacgaatgaacgagaagcctggtgcattttgactttacaaaatcgtcgcctgagcctttcgtgcgataagcatgcgcgcaggtacggatatgcgtagtcatgcaatcaaacaactagagagaaacgacatgaacccagccaatcttccgtttgattccgaagcgatgctgcagggcctgcgcagctgggtggaatgcgaaagcccgacatgggatgcggctgcggtcgaacgcatgctcggtctcgccgcgcgcgagatggcgatcatgggcgcgacgatcgaacgcatcgcgggacgccagggctttgccggctgcgtccgcgcccgtttcccccatccgaagcaaggccagcccggcatcctgattgccggccatctcgacaccgtgcacccggtcggcaccatcgagaagctgcaatggcggcgcgaaggcaacaagtgcttcgggcccggcatcttcgacatgaagggcggcaactatctgtcgatcgaagcgatccggcaattggctcgcgcgtccttcacgacgccgctgccgatcacggtgctgttcacgcccgatgaagaggtcggcacgccctcgacgcgcgacatcatcgaggccgaggccgcacgcaacaaatatgtgctggtgccggagcccggccggccgaacaacggtgtcgtcaccggccgctacgcgatcgcgcgcttcaacctcgaagccaccggcaagccgagccatgccggcgcgacgctgtcctccggccgttccgcgatccgggaaatggcccggcagatcatcgctatcgacggcatgaccaccgaggactgtaccttctcggtcggcgtcgtgcatggcggccaatgggtcaattgcgtcgcgaccacctgcaccggcgaagcgctcagcatggccaagcgccaggccgatctcgaccgcggcgtcgagcgcatgctggcgctgtcaggcacggccaacgacgtcactttcaaggtgacgcgcggcgtcacccgcccggtatgggagccggatgccggcaccatggcgctgtatgaaaaggcaaaaggcctcgcagcggcgatgggcctcgacctgccgcatggcagcgccggcggcggatcggacggcaacttcaccggcgcaatgggcatcccgacgctcgacggcctcggcgttcgcggcgccgatgcgcatacgctcaacgaacacattgaggtcgacagccttgccgagcgcggccgcctgatggcggcactgctggcgacgctcgactgacgtcgattgcactgcacaacacgttggcactgccagatcgaaatttagccttgtccatttttgaggcttcgcctacggtccggccgtccaactcgacgatgcgggagagatcgaagcgacaacattcgtgttgtcagcttcggcgccgacggagcaaccgccccggaaactctcaggcaaaaggactgtatcgtcaggacgatctggagagagacggacacgaccgcacatcaagggccgtgacgtccaccgaaggggatagttcgcgatcgggcacaggtccgatgcggatcaagctctcaggtaccgtgacagatggggcgctgaaacagccggttgcaccggcggttcggcgactctaatccacgggagcctgaagaccaccatgccacacattgcgatcatcggcgccggcatcaccggcgtgacgacggcctatgccctgctcgagcgcggctaccgggtgactgtcctcgacaggcatcgctacgccgcgatggagacctcgttcgccaacggcggacagctttccgccagcaatgccgaagtctggaacagcgccgcgaccattctcaaggggctgcgctggatgctgcgaagcgacgctccgctgttgatgaatccgaagccgagctggcacaaatattcctggatcggcgaattcgtcggcagcatcacccgttatcgcgccaacaccatcgagaccacacggctcgcaatcgaagcgcgcaagtatctgttctcaatcgcgcagcgcgagaacatcgccttcgatctcgagcgccgcggcatcctgcacgtctatcacgacaaggccggcttcgacgcgggcctgcgcgtcaacacgctgctgcaacaaggcggcctcgaccgacgtccggtgacggcggacgaaatccgcaccctcgaacccgcgctgcagacgagctgctatggcggcttctttacgccgtcggatgcgaccggcgatatccacaagttcacgcgcggtctcgccgaggcctgcatccgtcgcggcgcgagctttgtccatgaagccgatgtcgacaccatcgcgcgcggcgatgacggtttccgcatcggctggaacgacgtcgcttcgcatgacgccgaggtcgcgcaacggcacgagctgcaggccgacggcatcgtcatctgcgccggcgtggcaagccgccacttcgcaagcctgctcaacgaccgcgtcaacgtctatccggtgaagggctactcgatcacggtgcagctcgatgcgccgcaaagccgcgacgctgcgccgaccgtcagcctgctcgatgaagcggcaaaaatcgtcaccagccggctcggcgccgaccgcttccgcgtcgccggcaccgccgagttcaacggcttcaaccgcgatatccgcgccgaccgcatccagccgctggtggattgggtgcggcatcattttccggggatcgatacatcgaaggtcgtgccgtgggcgggcctgcgcccgatgatgccgaacatgatgccggtggtgcgctcgggacggattcctggcgtgttctacaacaccggccacggtcatctcggctggacactctcggccgcgacggcacagatgatcgcgggtgcgatcgatgactggcgcgacctcgacacgccttcaatggtgccatcgcaggccgatgcgatcgagcctgcccgcgcagctttcccctaatcatccgaccggagaggaagaatatgtgcgtatttgcgtgtgtccaagtcgggattcgctgggaatcgccgcgtgacaacgattagcgtcgtaatggggaaaagcgcttcagcgcgggaggggacaatgcgcattggggtcacgggcacgcatggcattgcggcccggagcggcattccggccggcacgcgtgtcgttggcaatcgcttcggcggaccgatacgcaatctcgccatcggcacgcgcatcggttgcgcgcgccatctttccgaaacgctcattgctcaaggctccacgaaaggcgcgacatgacaaccgggacgttgaccaaggcggatcagattgccgccgagttgtgcgcggccgtcgatcgaaacttcgacgatcagatcgcgttcctgtcgcgcatggtgcaattccgcagcctgcgtggacaggaggcgccacagcaacattggctggccgagcaattcgccaagcgccgctacgacgtcgatgcattcagccttgcggacgtcaacctgatgagccatccgaaagcagcaccgatggacggcatcgatcttgccggatcgcagcaggtcgttgcgacgctcaacagcaagggcagcgggcgcagcctgatcctgcaaggtcatatcgacgtggtgcctgaagggcctgctgacctttgggaccagccgccgttctcgggcgccgtgcaggacggctggatgttcgggcgtggcgcgcaagacatgaaggccggcgtctcggcaatgatcttcgcgctcgatgcgatccgcgacgccggctatgttccgggcggacgcatccatctgcagaccgtgaccgaggaagagagcaccggcaacggcgcattgtcgacgttgatccgcggctatcgcgccgacgcctgcctcattcccgaaccaaccggacacacgctgacgcgtgcccaggtcggcgccgtctggttccgcctgcgcgtccgcggcacgccggtgcatgtcgcctattcggaaaccgggacaagcgccatcctgtcggcgatgcatctggtgcgcgcgtttcaggattacaccaaggcgctcaatgcccgggcgctcgacaacagctggttccgcagcgtcaagaacccgatcaagttcaacgtcgggatcatcaagggcggcgattgggccagttcgaccgcggcctggtgcgaactggattgccgtctcggcctgctgccgggcgaaacgccgcagcaggcgatgcagggcatcgaggagtgcctggccgacgcgcacaaggccgacgagttcctgtccggcaatccggctgaactggtgtggagcggctttcaggccgacgcagcggtctgcgagcccggcagcgaagcggaagcagccctgtcggctgcccatcattgcgtcttccaggctccgatgcaggagcgcctgtcgacggccgtcaacgacacccgctactattgtgtcgattacggcatccctgcactttgctatggtccttacggtgtcggcccacatgcgttcaacgaacgtgtcgagctcgacagccttcgcaagacaacgcagagcatcgcactgttcgccgccaactggtgcggcgtgatgagagcgtgaatgaacgtgtcgcttcagctcggtggcacacgacgacaagtgcaattcgaaatagcagcatcagaccagggaaggccgccaacggcacgaccctcgccttgatataacgtcgccattggcacagtatttgcctgcaaattcatcacgttcgcgctggctttgacacaagacgcagaagcgcatgagacacatcacggggacaccatgagtatgatgcggcccagccttcgcttcacaccatctgacggcaggagatagcagcgatgatcggatatctgcttcgccgcatcctcgctgccattcccgtgatgggcgtggtggccctgttcgtgttcctgttgctgcggctgacgccgggcgaccccgccgcaatcctcgccggcgacaatgcgacgccggaacagctcgagcgcatccgtacctcgcttggtctgaacgagccgatctacatccagttctacacctgggtcgcgaagctcctgcacggcgacctcggcgtctccctgatctcgaacaagccgatcctcgagatgatcggcccgcgcctcgagccgtcgatctcggtcgcgctcgccaccatcgtcctctcgatcctggtcgcggtgccgctcggcgtcatcgcggcgtggaagcacggcacctggatcgaccgctgcgtgatggggctgtcggtgctcggcttctcggtgccggtgttcgtgatcggctatgtgctgatccaggtgttcgcgatcgatctgcgctgggtgccggtgcagggcttcaagagcatctcggccggcttcggtccgttcttcgagcgcatcatcctgccgacctgcaccctctccttcatctatgtggcactgatcgcgcgcatgacccgggcctcgatgctcgatgtgctgggtgaagattacgtccgcaccgcgcgcgccaagggcatcggcgagaccggcgtgctgctgcgccacgcactgcgcaacgccgcggtgccggtgatcaccgtgatcggctccggcttcgcactgctgatctccggcgtcgtcgtcaccgaaagcgtgttcaacctgcccggcatcggccgcctcaccgtcgatgcggtgctggcgcgcgactatccggtgatccaggccatgatccttctgacgtcgggcatctatgtcggcgtcaatctgttgatcgacgtggcgtacaccctgctcgatcctcgtatccggtactgagcaatggcgatcgaaacccttcccgaagcctctctccccgtcacccggccgttccgcgtcaagttcggcttcctgacctcgacgccgatcatcgcggtcgcaacgatctgtctcgtcctcatcatcctgatggcgatcttcgcgccgctccttgcgcctcgtgatccactcttgctgacgccgtcgctgcggctgaagccgtcgagcgcgcaatatttgctcggcaccgacgcctatggacgcgacctgttgtcgcgcatcatctacggcgcgcggatctcgctggtaatcgggctcggcgccgccgtctgctcgatcgccatcgggctcctgatcggcctcgtcgccggcttcttccgctgggtcgatgcggtgatgatgcgcgtgatggacggcttgatggcgatcccggccattctgctcgcaatcgccgtggtctcgctgtctggcgccagcatctggaccgtgatggtcgcgatcaccatccccgagatcccgcgcgtagcacgcctggtgcgctcggtggtgctgaccgcgcgcgaggagccctatgtcgaggccgcgatctcgctcggctcgagcctgccgaagatcatgtggcggcatttgatgccgaacacgatcgcgccgctgatcgtgcaaggcacttatgtctgcgcgtccgcgatcctgaccgaggcgatcctgtcgttcctcggcgccggcatctcgccggagacgccgacctggggcaacatcatggccgagggccgcgcgttcttccaggtcaagccgtcgctgatcttctggccgggacttctgctctcgatcgccattctcagcatcaacctgatcggcgacgccgcgcgcgatgcgctcgatccccgcatgaagcagcgtgagggcaagtgacggcttcgatgcaatcgaagccgtcatcccggggcgcgcagcgaacccgggatctcgagattccgggtctggtcctggcgcaccatcccggaatgacagtgggtaaattccttcgcagccgcgccaagagagcctgacatgaccaacgtcgtcctcgacatcaacaacctcgtcgtcggcctcggccgcaaggcggacgcgcatcgcatcatcgacgacctctccctccaggtgcatgagggcgagacgctgtgcctggtcggcgaaagcggctcgggcaagtcggtgacctcgctaaccacgatgggcctgttgcagaagggcacgctggtgccgtcgggcggcagcgtcaagctggtcggcgaggagctgctcactgccactgaccgccggctgcgccagctgcgcgccacgcgaatggcgatgatcttccaggagccgatgaccgcgctcaatccggtggtcccggtcggccgccagatcgacgaggtgctgcgcgcccataccgatctcgactcccgcgcgcggcgccagaagatcctggcgatgatggagcatgtgcggctgccggacgtgcagcgcatcttctcttcctacccgcaccgcctctccggcggacagcgccagcgcatcatgatcgcgatggctctggtgctggagccgaagctcctgatcgcggacgagccgaccacggcgctcgacgtcaccacccagaagcagatcctcgccctgatccgtgatctgcaacgcgatcacggcaccgccgtcctcttcatcacccacgacatgggcgtggtggccgagatcgccgaccgcgtcgcggtgatgcggcacggccggctggtcgaaaccggcccgctgcaggatgtgctgcgcaatccgaagatggagtacacccgcaacctgctgtcctcggtccccagcctcgtgccgcgcgcgccgcgcccggagacgaaagagccggtggtgctggaagccaacgagctcagcaaggtctaccgggagcggtcgctgtacggcaaagcccgcgaggtcgccgccgccagcaacgtcacgctcaccttgcgcaagggccgcacgctcggcatcgtcggcgaaagcggctccggcaaatcgacggtggcgcgctgcatcgtccggctgatcgatccgacctcgggcggggtgcgcctcgccggccgcgagatctccgatttgtcgcgccggctgttgcagccgcatcgccagaagatccagatcatcttccaggacccctaccgctcgctcaatccgcgcgtcacggtcggcgagagcatcgcggagggcccgatcaattacggcatgccgcgcaaggacgcgctggcgcgggcccgcgagttgctcgagctggtgcatttgccgcccgacgcgatctcgcgctatccgcaccagttctccggcggccagcgtcagcgcatcgcgatcgcgcgcgcgctggcgctcgatcccgacgtgctggtggcggacgaggcggtatccgcgctcgacgtctcggtgcaggcgcaggttctgcagctgcttgacgaaatccagcggcggctcggcatcgcgctgctgttcatcacgcatgatttgcgcgtcgccgcccagatctgcgacgacgtcgccgtgatgcagcgtggacgggtcgtggaacagggaccggcggcggaggtgctgaccaatccgcagcaggcctatacccgcgcactgctcgaggcggcgcccgggcgcggctgggacttcgccaacttccgccccgtttcggaaggcattgtggcgacggcctaggtctttagcctcaagcctttacgcccacagggcatgcaaatccggtggtgctccccggcttgcgcttggcgcgacgacacgcttaacgtcgcccgccagagcgcgatccggagaggcgaaccggccttcgaagatcatgctgatattgaaaaggcgagatgatgcgattgcttccaaatcgcatcacaagcgaagaaacgtgtcgagacctacttgatgacccgtattgccgttggcggcttcctgcacgagaccaacaccttcgcaccgacgaaggcaacttacgacgacttcgtgcatggcggcggctggccgtcgatgacgcgcggcgccgaggtgctcaaggtcatgcgcaagatcaatgccggccttgccggttttgtcgaggcggcggaagccaatggttgggagctggtgccgacgatcgcgaccggggcgaccccgtcggcacatgtgacgaaggacgccttcgagcggatcgtcaaggacatggtcgacggcatcgccgcggccgggccgatcgatggcgtctatctcgacctgcacggcgccatggtgaccgagcattatgacgacggcgaaggcgaaatcctcgcccgcgtgcgcaaggcgatcggcaaggacattccgctggtagcgagcctcgatctgcatgcgaacgtctcacccgagatgatcgaacatgccgacgcgctgatcgcctaccgcacctatccgcatgtcgacatggccgacaccggccgcgcctgcgcgaggcatctggccttgctgctcaaatccagacaacgtctcgcaaaagcgttccggcagctgccgttcctgatcgcgatcagttggcaatgcaccaacgaccagccggccaagggcatctatcagaaacttgcggcgctggagagcgacgcggttccgacgctgtcgtttgcgttcggcttcccggccgccgatatcagggactgcggcccgagcgtattcgcctatggccggacccaggccgacgccgacgctgccgccgacagcatcgccgcgctggtcgaacgccacgagaacgatttcgacggcccgatccatacgcccgacgagggcgtgctgcttgcgatgaagctcgcggcgacggcgtcgaagccgatcgtgatcgccgacacccaggacaatcccggtgccggcggcaattccgacaccacgggcatgctgcgtgcgctggtacgcaacggagcaagcgcggccaccggcgtgatctgcgacccgcaatccgcgcgcgctgcgcacgcggccggcgtcggtgcgaccgtcacgctcgatctcggcggcaagtccggcattcccggtgatgcgccctacagggaaacgttcgtcgtcgagcagctctcggacggccggttcgtcgcgccgggaccattttacggcggccgcgatatggatatgggaccctcggcctgcctgcggatcggcgacgtccgcgtcgtcgtcggctcctacaaggcgcagctcgcggaccaggcgatgtaccgctatgtcggcatcgagccgaccgcgcagaagatcctggtcaacaagagctcggtgcatttccgcgccgatttcgagccgattgccgagaaactgctgatctgcgccgcgcccgggccgatgcccgccgatcccgccacgctgccgtggaaacatttgcggccgggcattcgtatcaagcccaacggcccgactttcaccccctcctccccatcacgcacagacggatagagaccatgccgaccatcgagcgcatcgacagttttgccgacgaactcaccgccatcagacgggatctgcatgcgcatcccgaaatcggcttcgaggaggtgcggacatcgggcatcgtggccgagaagctgacgagctggggcatcgaggtgcatcgcggcctcggcggcaccggcgtggtcggcgtgctcaagggcaagggcagcggcaccaggaagatcggcctgcgcgccgacatggacgcgctgccgatggaggagaacaccaatctgaaatggcgttcgaccattcccggccggttccacggctgcggccatgacggccacaccacgatgctgctcggctcggcgcgctatctcgccgagacccgcaatttcgacggcaccgtgcacttcatcttccagccggccgaggaaggcctcggcggcgcccgcgccatgatcaaggacggcctgttcaagcaattcccctgcgacgaggtctacggcctgcacaacgcccccgacctcaaccatggcgagatcgcgatcctgccgggcccggcgatggccgcggccgacttcttcgacatcaggatccagggctatggcgcacatggcgcgatgccggaacgctccaaggacgcggtcgtgatcgcaatgacgctcggacaggcgctgcagtccatcgtcagccgcaacgtcgatccgctgcaggcagcggtgctgtcgatcacccagatccattccggttcggcctacaacgttattccaggcgatgcctggatgtgcggcacggtgcgctgcttctccgaggagatccgcgcgctgatccgcacgcgcatgcgcgagatctgcgccggctttgccgccgcatatggcgccgaaatctcggtcgaggtccgcgacggtttcagcgtgctggtcaatcaggaagagcagtcccgcgttgtcgaggaagtcgcgcgcaccgtggttgatccggccaaggtgatcacgcgctcgacgcccaagatgggcagcgaggatttcgccgacatgatgcaggccgttcccggcgcgtatttctgggtcggccatgacggttcagtgcccgtgcacaatcccggttacgttctcgacgacaagatcctgccgatcggcgccagcatgttcgcccgcatcatcgagaaacgtatgccggcaggtgcgcatgcataggccgaaagcggacgccatcacgtcgctgcacgatctctcggccgtcgacctgctcgccggctatcgtgccaagcagttctcgccgtccgaggtgctcgaggaaatcatctcccaggtcgcgacctgggagccgcacatcaaggcgctgtatctgtacgaccccgacggggcgcggaaggtcgccaaggccgcgaccgagcgctggcagcaggccgagccggccggcacgctcgacggcgtgcccgtcaccattaaggacaatgtcgcgaccaagggccagccggtgccgctcggcagcgccagtgtcaagctcgcgccggcggagaaggatgcgccgcctgccgcgcggctgcgcgaagccggctgcgtgatcttctccaagaccacgatgccggactacggcatgctgtcgtcgggactgtcgtcgttccatcccctcacccgcaatccctgggatgtcagcaaaaaccccggcggctcgagctccggcgcgggcgccgccggtgctgccggttacggcccgctgcatctcggcaccgatatcggcggctcggtgcggctgccggcctcctggtgcggcctcgtcgcgctgaagccgagcctcggccgcgtgccgatcgacccgccctatgtcggccgcgtcgcggggccgatgacccgcaccgtcgacgacgccgcgctgatgatgagcgtgctgtcgcgcccggatcgccgcgacggcatgagcctgccggcgcttgaggtgaactggaaggcgctggagaaatcgccgcgcaagctgcgtatcgggctgatgctcgatgccggctccggccagaaggtcgagaaggacgttcgcgaaatcgccgtcaaggcggcgaaggcgttcgaatccgccggcgccgtcatcaccgagatcgacggcatcctgacgcccgagatgctcgaagggctcgacaatttctggcgcgcgcggacctgggacgagctgtcgaaattgtctgaggccgatcgcggcaagacgctgccctatatcctcaactgggccgaggccggcgcaaaactctctggcgtcgacgtggtgcgcggattcaaccagacgatggcgatccgcgcagccgccgcaaaattgttctgcgaggtcgactacgtgatctcgccggtgtcgccggtggtgaacttcccggcggaattcgcatcaccgctcaacgatccggcaaagccgttcgagcacatctgctttaccgtgccgtggaatatgtcggagaatcctgcgttgtcgatcaacggcggctatgacaagaagggctttccgatcggcgtccagatcatcggccgccgcttcgacgatatcggggtgctcggcatgggcaaggcgttcgaaggcctgcgtggcccgcagaagccgtggccgacgccgccgaagaagtagatacctccacttgtcattccaggatggcccgaagggctgggcccggaatccatttccccgcaggtccggctgtgatttgtggagcaatggattccgggctcgcgcttcgcgcgccccggaatgacgtgctagagatcaatcagaaacgaacgaaggaaggaaatcatccccatggcgtatgagacgatcaagtacgaggtcgccgagcagatcctgaccatcacgctgaaccggcccgacaagctcaacgccttcaacgccacgatgcagcaggagctgatcgacgcgtttgacaaggccgacaaggacgacgacgtcagggcgatcatcgtgaccggcgaaggccgcggcttctgcgccggcgccgacctctcctccggcgcgaacacattcgaccgcgatgcgcggcgcggtccggtcaagcgcaatgccgacggcagcgtcgactacagcgatccgcaggtgcgcgacggcggcggccaggtgacgctgcgcatcttcaaatgtctgaagccggtgatcgccgcggtgaatggtcccgcggtcggcatcggcgtcaccatgcagctcgcgatggatatccgcatcgcctccgaggccgcgcgcttcggcttcgtgttctcccagcgcggcatcgtgccggaagccgcctcgagctggttcctgccgcgcatcgtcggcatctcgcaggcgctggaatggtgctattcgggccgcgtcttcccggcgcaggaagcgctcgccggccggctggtcagcaaggtggtgccgccggaggacctgttgccgaccgcgcgtgcgctcgccaaggagttcgcggccaagaccgcgccggtgtcggtggcgctgatccgccagatgatgtggcgcatgctgggcgccgacgatccgatggaggcgcacaaggtcgacagccgcggcatctatgcccgcggccgctccgaggacgtcaaggaaggcgtggtgtcgttcctggagaagcgtcccgcgcagttcaagaacaaggtctcgtccgacatgcccgactatttcccatggtggcaagagcgcgactataagtgagcgaacggcgtcccacgacgtccacttccgacggcgtcgtcctgctgcacggcatcagcaggacggcgcgctcgtttcgcaggatggagctggcgctcggcgatgccggctttgccaccctcaacctcgactatgacagccggcgcaaggcgctcgatgcgctggccgaggatattcatccggcgatcgatcgtttcgccgaagggctcgacggctcggtgcatttcgtctgtcattcgatgggcggcctgctggcccgcgcgtacctcgcacgacaccgccccgcgcaactcggtcgcgtcgtgatgctgggcacgccgaacggcggtagcgagatcgccgaccgcctgaagaacctcgccgcgtatcgtgcgttcttcggctcggccggccagcagctcgttacccgccgcgatgctgcgaccagcgcgctgttgcccgcaatcgattatgaggccggcatcatcgccggcaaccgctcggtctatccgatcacctcgatggccctgccccgtccgcatgacggacgggtgtcggtcgccaacaccaggctcgacggcatggcggatcacatcgtgatccgcacctcgcatccctggctggtacgcaacagggaggcgatcgcgcagacgatcgcgttcttgcgggagggacgattcaacacaccatagcggtcattgcgaggagcaaagcgacgaagcaatccatcgctccgcatatccggcagcatggattgcttcgcttcgttcgcaatgccgaattattgcatcatcagcgccacccgcccgatcgccttgcgctcgatcaacagccgcatcgccttcgcgtagtcctccagcggcagccggtgtgagatgttcggccgcacccggccggcctccgcccattcgctcagcgccttgaacctgacctcgccgagcgcggggtccttgcgcaccgcctcgccggcgcgaacgccgagcacgctcgcgcccttgatcatcaacagattggtgcgggccagcccgatgccgccggtgaagccgacgacgagaatccgcgcgccccagttgatgcagcgcatcgagttttcgaacacctctccgccgacaggatcgaacaccacgtcggcgccgcggccgtcggtgaggcgcttgaccgcatcgcggaacggctcacgcgcgtagagcacgagatgatccgcgccgcgttccctggcgatcgcaagcttctcctcggatgaggccgccgcgatcaccgtggcgccgagcagcttgccgatctcgaccgcggccagcccgacaccgccgccggcgccgtgcaccagcagcacctcgcccggcctgatctgcccgcggtcgatcagcgcgtgataggccgtaccgtgcgcggccaggaaagtcgcgccctcggcatagtcgaaggtcgacggcaccggcacgagctgcgccggcacagcaaccgtctcgtcgcaataggcgccgaagcgcatcttgacgatcaccttgtcgccgactgcgacaccggcagcttcattgacctcgacgacatcgccggctgcttccgagcccggcgtgaacggcagcggcggcttgagctgatactcgccggcagccatcaggatgtcggggaaattgatcccggcggcacggatcgccacgcgcgcctcgcccggcttcagcggcaccgacgcaaagctctccaattgcaggcgctcgggcgggccgagctcgcggcagacaacggctttcggcatcaggcggctcgcgccttgagacgcgccagggcctcgcggatcagcggcaggcggtcattgccgaaataaatgtcggttttgtcgagatagatcgtgggtgagccgaatgcgccgcgcgccacggcctcttcggtgttggccttgagctggtccttgatggcttgatcgccgatgccggcaaaaaactttgcgggatcgatcccgaccttgccgcagatctcggtcagcaccgcatcctgcgaaatgtccttgtcgtcgccccaataggcctcgaatacggcgcgggcaaagggtaccatcttctcgttgccgagccagatgcagccgcgcatcgccttgacgctgttcaccggaaacaccgtcggcggcatcttgatcgcaagaccggccgaacgcgcccagtcggcgagatccttcttcatgtagcgcgccttcagcggcaccggcgtttcacgctgcgcatagaccgagggattgacggtgttgaagatgccgccgaccaggatcggccgccaggtgatgtcagcgtcgaactccttcgccagcggctggatgttgtgccacgcgagataggtccacggactggaacagtcgaagaagaattcgatcatggcgtttccctttgtcttttccgcatccattgtcgtcattccgcgatgcgccgcaaggcgcgggcatcgcgaccgtgtcgcgccgcggaataacggacgttattttttctcgaccagctcctttgcacgctggccgaacatgttcttgcgcgattcctcgtcgaacggctccttgacgaatttgccgatcgcaagtcccgcctgcacctgcggccgggcgcgcaccgtcgcgtaccagcgcttgatgttcgggtagtcgtcgagggtgaagccctgcgccttgtgggtcatggtccagggaaagcaggctatgtcggcaatcgaataatcgtcgccggcgacataggcgccggtcttgccgagctgccggtcgagcacgccatagagccgcgctgtttcgtcgcggtagcgctcgatcgcatagggaattttctcggccgcatagagcgcaaaatggccgtgctgaccgagcatcggcccgaggccgcccatctgccacatcacccattggatgacgttcgaccgcgcacgcagctccctcggcaggaagcggccggtcttgtcggcgagatagatcaggatcgcgccggtctcgaacaccgagaacggaccgccgccgtcggatggctcatggtcgacgatcgcggggatccggttgttcgggctgatcgccaggaattccgcccgaaactgctcgccggcgcggatgttcaccgggatcaccgtgtacgggagccccagttcctccagcatgatcgaaatcttccagccgttcggcgtcggcgcgtagtgcaggtcgatcatcggcgtccacttccccatcacaaggacttttgttgttctgtacctccactctaggacatggcaaacaggcgctcaatcagaacccatcgggaggcacccatgctgtttccaaccacgatcgcaggctcgctgccgaagccggaatggctcgcggagccgaacatgctgtgggccccctggaagtctgatggcgccgagctcgcccgcgccaagcgcgacgccacggtgctcgcggtcaagctgcaggaggatgccggcgtcgacatcgtcaccgagggcgagcaggcgcgtcagcacttcgtgcatggtttcctggagcggatcgagggtatcgacttcgcccacaaggtcgagatgggcatccgcaaggatcgctacaaagccatggtgccgcaggtggtcgcgccgctgcagctcaagggccgcgtccatgagaacgaggcgcgagcggcgcgcgcccacacccgaaaccggctgaaattcacgttgcccggcccgatgacgatcatcgacaccatcgccgaccaatattacggcgaccgcgtcaagatggcgttcgccttcgcggagctgttgaaccaggaagccaaggcgttgcaggccgacggcgtcgacatgatccagttcgacgagccggccttcaatgtctacatggaccaggtgcgcgactggggcatcaaggcgctggagcacgccgccgagggcctcacctgcgccaccgccgtgcacatctgctacggctacggcatcaaggccaacaccgattggaaagaaaccctcggcggcgaatggcggcagtatgaggagaccttcccggtcatcgacaagagcacgatccagcaggtcgcgatcgagtgccgcaactcgaaggtgccgatcgagctgctcgcggcgctccccggcaagatcgtgcaggccggcgtgatcgacgtcgccagcgacgagattgaaacccctgaggatgtcgtcaaggtgatcgaggcggtcgccaagcatgtgccgaaaggcaacatcatcgcgaccaccaattgcggcatggcgccgatgcggcgggacatcgccgaagccaagctgatcgcgctcggtgccggcgccaaactggcacggcaacggctcgcgtagggatgccggcggttcagccgagcgcgaccgccgcgctcggatgcaacgccggccgatagccggcctgaaatgcacggacggtcgacggcggcgtcagcagcatcgcgggcgcagccccctcggcgcgctcgtaaccggcaaaggaccaccgcagcacttttcccttggagacgagatagctctccccgttcgcttgcaccatcgtgccatcaggcagttcgttcaccggcaccggcaacggatgcagccgcttcttccggcgatccagccgctcggaatgcagcaccgcatccatcgccttggcgctgagatcactcgccccgttgccctgctcccaggcggcgcgaaaccggtcggcgtcgtcacggcggcagtaaaagcagggccggtgcccggccgcgaacgaggtggcttcgtcaaggaagaacagctcggtccagctctgccggcgcatcacctcgcgccgccgtcccctgaactcgcagacgcaagtgagccacgccggcgacgaccaccgcttgttcagaagcgtccgtgtcgcggggtcgtggatgatgccgcgattgccggtgaaggtgccgcgatgctctgacgcgacgatctcgcctgtcggtgtgacgcggttttgcaggggcattttcttctccttctccccgcttgcggggagaaggtcgggatgaggggggcgttccgcaaggtcggtgagaattggactcgtggtgggtccccctcacccggattgcattccgctgcgctgcatgcaatccgacctctccccgcgcgcggggcgaggtgactcgctaggccgccccatccttgatcggcggctggaacgacagcgcggtgtcccaggggaagaaaatccaggtgtcctgcgacacctcggtgatgtaggtgtcgaccaacggccgccccttcggcttggcgtagaccgtggcgaaatgcgcgtcgggcagcatctcgcgcaccatcctgccggtcttgccggtgtcgacaaggtcgtcgacgatcaacagtcccttgccggtgccgccgccgagcttggcggtctgctccgaaatgcccttgagcacttgcaggtcgccttgcttgtcatggtcgtagctcgcgatgcagaccgtatcgatgatccgcaagccgagctcgcgcgccacgatcgccgccggcaccagcccgccgcgggtgatcgcgatcaccgcatggaacggtccgacttcattgagccgccaggtcaacgcccggcaatcccggtggaattgatcccacgagaccgggaacggcctgccggcccgatcctgcgcattcggttcagaaattttctcgaccatatcgtctcaacccgccggcttcttctgcgcggcctgtacctgcttcaacatctcttttactgcggccatcgcggccgcaagcttgtccggatcgcgcgagcgcaccaccagattggtgttcggcttctggttctcgtcctggaacggatagctgccgatgatggtgtcgggattggcttccgcgatcgcccgcagcgggccgccgatgtcgccttcccgcgcgtcggcgcggaccgaatccgacagcatccgcacgccggatttcagggtcggcgccacgatgtccatcatcgcctgcatgatggtggggatgccggccatcacgatgacattgccgagcttgaagcccggcgccaggatggtcgcgctctgaatcagctcggcgccgtcgggcacccgggccatccgcagccgcgcctcgttgaggtcctgttcgctccagcgctccctgaaccgcgccaccacctcagggtgatggtggatatcgaccccgaacgccttcgccacgctgtcggcggtgatgtcgtcatgggtcggcccgatgccgccggtcgtgaacacgtaggtgtacctgtgccgcagcgcatcaagggcggagatgatgtcggcctcgtcgtcggcgacgacgcggacctccttcaggtcgatgccgatattggtcaggtattcggcgatgaagccgatgttcttgtccttggtccggccggacaggatctcgtcgccgatcaccaatatccccgccgtgacgatctcgctcatggtctcattccctaacacttgccctaacttgatcccctgacattgccgatccaatgccttgatgtcacggggttttgccgccgaattaagcagacctcagccggtttttcgggcaggcctcctggctatccctagcaaatgccacacgccaatgcatatcgcgctggcccgccccttgctaccatcccatcaagtcatgcactgtgtcacatggcttgggagggcagtcgggatatatggcagtcgcgttcgatgagatgaacggcctcggcgaggatctccgcccggcctaccaggagctctcccgctggctcaacgagacgccgccggacgcgctcgaatatcggcgccaggaagcggagctcttgttccgccggatcggcatcaccttcgcggtctacggcgattccgaggcccaggaacggctgatcccgttcgacgtcattccccgcatcatatcggcgaacgagtggacgctgctggagaagggcctgaaacagcgcgtgctcgcgctcaacatgttcctgaaggacatctatcacggccgcgacatcctgcgcgccaacatcatccccgaggacctgatcttccagaacccggtgttccggccggagatgaacggccaggacgtgccgcacgacatctacgtccacatcgccggcatcgacatcatccgcaccgatcccgacaatttcatcgtgctggaggacaatgcgcgcacgccgtccggcgtctcttacatgctggaaaaccgcgagatcatgatgcggctgtttccggacctgttcgcgcgccaccgcgtcgctcccgttgagcgctatccagacgagctgctgtcggcgctgcgctcggtcgccccgcacagcgcctcggctgaaccgacggtcgcactgatgacgcccggcgtctacaactcggcctattacgagcactcgttcctggccgacaagctcggcatcgagctggtcgaggggcgcgacctcatcgtcaagaacgacgaggtgttcatgcgcaccaccgaggggctgaagcgggtcgacgtgatctatcgccgcgtcgacgacgatttcctcgatcccctcaccttccggccggattccgcgctcggcgtgcccggactgatgtcggcctatgccgccggcaacatcacgctcgccaacgcagtcggcaccggcatcgccgacgacaaggcgatctattcctacatgcctgacatcgtgaagttctatctcagcgaggagccgatcctgaagaacgtgcagacctggcgctgccgcgaaccgcaggatctgtcctacgtgctcgacaacctcgccgacctcgtcgtcaaggaggtgcacggctcgggcggctacggcatgctgatcggcccggccgccaccaaggcgaccatcgaggcgttccgcgacaagctgaagcgcgagccggagggctttatcgcccagcccacattggcgctgtcgacctgcccgacctgcaccgacaagggcctcgcgccgcgccatgtcgaccttcgtcccttcgtgctgaccggctccagccacaccaccatcgtgcccggcgggctgacccgcgtcgcgctgaaggaaggctcgctggtggtcaattcgagccagggcggcggcaccaaggacacctggatactgagcgagtagttgaacgcatgctgtcgcgcaccgctgaaaacctgttctggctggcccgttacgtcgaacgcgccgagtacctcgcgcgcacgatcgacgccacgctccgcgtcaccgcgctgcctgcggcctatgtcggcaagaccaatgagtgggactccgcgctgctcacggcaggcgtcggcgcgagcttctacgatcactaccaggaagccaaccagcagaacgtcgtcgagtatctgtcgttctcctcggagaacccctcctcgatcaagaactgcatcgaggcggcgcggctcaactcgcgctcggtacgaaccgcgctgacctcggagatgtgggacaccatcaactcctcctggatcgagctgcaggcggtctggagcaagggcggcaccggcagccgcgaggagctggcaaaattcctgcgcttcgtgcaggagacctcattgcgcttcgatggctcggcctaccgcaccatgctgcgcaacgacgcctactggttctcgcggctcggcgtccacctcgagcgcgccgacaacaccgcacggattctcgacgtcaaatatcacgtgctgctgccggaggaagaacacgtcggcggcccgctggattactaccagtggacctcgatcctgcgctcggtgtcggcaacgacagcctatcactgggtctaccgggaaaccctcaaaccctggctgatcgccgacctcctgatcctcaacgacacgctgccgcggtcgcttgcgagctgctacagcaatctggtgcgcaatctggaccagatcggcgtcgcctatggccgccagggcgcctcccagcgccacgcccgcggcatccggaaccggctcgagcacagcaacatggatgatatcttccagcacggcgtgcacgaattcatccaggagttcatcgcggacaactcacggctgggtgagatcatcaccaagcagtatctgatctgaccgatacggccggaaaactgctcaaattgtcgtcatggcggacctgatcccggccatcgacgtcttgctttcgcggccgattaggaagaaagacgggagtgcccgggaaagcaccgggcatcacgcccctgccctcaaaaccgactgaactccggttgagccatgcgcctgcggatagcccataccaccacctatcgctacgagccggcggcctcgggcgtgatccagattctgcggatgacgccgggcagccatgacggccagtatgtcgcggattggcagatcgacgtctcgaccgattcacggctcgacacccacgaagacgctttcggcaacgtcacccatgtgctgacacatgggtcgatcagcgacctcaccatccattgcgagggcctggtcgagacccatgacaccggcggcgtgctcaagggcaccgacgagcggtttccgccgagcctgttcctgcgcccgacgccactgaccgacctcaacccggcgatgacggccttcgtgcgcgaaatgcgcgcggaagccggcagcgacgtgctcggcttcctgcacgcgctcatggtgcaggtctacgagcacatgaccttcgacgaggacccgaccaacagcaccacgtcggcgtcggaggcgttcgcgctgaagcgcggcgtctgtcaggactacgcgcacatcctgatcgcctgcgcgcgtgccggcggcgttccggcgcggttcgtgtccggccacttcctgcgctccgacggcatggtgaaccagcaggccggccacgcctgggccgaggccttcgtgcccgacctcggctggatcggcttcgacgccgccaacggcatctgcaccaccgacgcccatgcccgtgtcgccatcggtctcgactatctcggcgccgcgccggtccgcggcacccgttatggcggcggcaacgaaacgctgacggtcgcggtcaaggtcgaccaggccggccgccccgggcagtggcagagccagacgcagtcgtaaggtcccacactttctccgtcatttcggggctcacgcagcgagagcccggaatccatgatgccaccaactatgcggagaaatggattccgggctcgcgccaagaggcgcgccccggaatgacgatcgtaagatacgagcatgctatcattgctgccgcttcatccgaaccatcgggacacaccatggcaaccgtcaaactgctctccgacgacgaactctcgcccgaggcacgcgccgtgttcgacgacatccgtgcggcgcggaagtcggacttcgtcaacaatttctggcgcgcgctcgcgcatgatccgaagaccttgcggcggacctgggagagcatcaaggaagtgatggcccccggcgcgctcgacccgaaggtcaaggagatgctctatgtcgcggtctcggtggctcacggctgcagctactgcatccattcgcacaccgcggctgcccgcgccaagggcatgaccgacgccgagtaccaggaaatgctggcgatcgtcggcatggccgccgagaccaaccgactggtcaccgcgctcggcgtgccggtggatgaagcgttcctcgtcgatgcaccggcaggacgaagccaggagacgtaacggcccagcactgcgtcacttgtccagccagacatcctcgaagcgcagattgttgtactggctgttgtcgtgcggatgaaagttcttcacgtaaggctgccagcaattgccggccgatgagtgcaggatgaccggccgcgcggcatcgtcgaccaagaggtgctcgatgtcgaacacgatcttgcgccgcttgtccttgtcgacctcacgcgactgcgcggcgagcagcttgtcgacctcggcgttgcagtactgggtgtagttgcgctccgagttgcaggaatagttctcgaccaggttaccgtcgggatcgtcgacgctgacgccggtgacgttgaggccgatggtgtagtccttgcgctgtagccgcgagtaccagcgcggcgtatccaggatatcgagctcggcgacgatgtagatcttcttgagctggtcggcgaggatcacggccgggtcccgataggtcggcaaattgcgggtctggatcttgatcgacagcggcttggcgtcgctgtagccgagcttctgcatgatcacctgcgcgtcggcaagattcttctcggtatcggggccatagcccatcagcgtcgacaatatctcctgcggcatgccccactcgccttcgggcttggcctgcatcgcgccgccgagccgcccgctgccctcgaacaggatggagttgaaggccttgcgatcgagcgccagcgacatcgccttgcggatctccggatcgtcgaacggcggattgacccggttgaccagaagattgatctgcagattggtcgaggtcatctcgcagatcgcgttcggcgcccgcgccttgacgtccttcatcaggggaatgctgacgtcggacggaaaggtgatgtcgtaatcgccggtcgcaaacgccagcatgcgggtggcgcggctgtcgatcgagcgcaccgtgatctcgtcgagatacggcctgtccttcttgaagtagtcggggttacgcaccaaacggatggagtctccgcgccggaactcgacgaacctgaacggtccggtgccgacaggcttggtacgcatcacctgctgcggcacgtggcagggatagaccaccgagaaggcgctggcgagcagcgccaacaggccgggctgcggttcggtcagctcgaaggtcgcctcatcctcgccgttgacgctgacatccctgagcttcgagtaccagaccttgcgcggattgcgcttgaagtcctgagtttcgctcttgccggtcagcatccgccaggtgcattgcacatccttggccgtgaacggttggccgtcatgccatttcacgccctgacgcagcttgaaggtgagcttggtgttggtctggtcccacgaccagctctcggcgagatcggggatcacggtgtcgatcgattcgtgcaccttggccggatcgaacaccacgaggttgttgaacacggccgcgaacggcagcaccgaggcgatggtggattcctcgagcagcgaagtcgagggtgggttgtcgttgtgatagagccgcagcgtgccgcccttcttctgcgccgacgcagggcttgcggcgattgccgcgacgcccaacgccatgatgcacgcggccaatttgaacgacattctcgcctcccggaattcttgttgttgtcggttgcgggcagtcgaccacaaggtcaggtgcctcgcaatgacagcgaatccggatcattgccggctgcgcacagcgcagagcgatagcgctccaaactccgaaccgtggtcacaggaacaggcccctgcgggccgtctccgcgatccggacccgccactttgaccggccgcagcaatgtccgtcacggggaattggggttggatgcgacctcgaaattggctacacgtttggcgccgataaactcggaccgtttggggactggaaatgacctattgctgcggaattctggtgcgcgacggcctcgtcatgatcgccgatacccgcaccaatgccggcctcgacaacgtctcgacgttccgcaagctgcacatcttcgaaaagcccggcgagcgcatcatggcgatcgccagcgccggcaatctggcgatcagccagtcggtgctgtcgaccctgaccgagggtatggaagacccgcacaccggcgagctcgagacgctgatgaatgcgccgaccatgttccaggcggcgcagcggatcggccgcgccatccgctcagtgcatgccaccgagggcgaggcgctgcgttcggaggatatctcgttcgacgtctcgttcctgttcggtggccagatcaagggctcgcggatgcgcctgttcatggtctacaccgcgggcaacttcatcgaatgcaccaccgacacgccctatttgcaaatcggcgagcacaaatacggcaagccggtgctcgaccgcgccatgcattacgatgtcgagctctatgaggcgctcaagaccggcctgatctcgatggattcgacgatgcgctccaacctcggcgtcggcctgccgatcgacgtgctggtggtgcgcaccgacgtctgcgaggccgacctcaaccaccgtatcgaggccggcgagccctatttccacgatctgcgctcgcgctggtcggcggcgctccgcgcggcgcaccagaacattccacgcccgccctacaagaacgaaaccgaagcaaaaaccaagtaagaggaaactcggagatgaccgaagcaaccagcaagatcgcactcgtcaccggcgccggcaccggcgtcggacgcgcggcatcgctcgctttgatggacaagggctacaccgtggtgctcgccggccgccgcatcgagatgctggaagagaccgccaagctcggccccgccggcaagagcctgtgcgtctcggccgacatggccaacccggccgcgatcgccgcgctgttcgataaggtgaaggcgacctacggccggctcgacgtgctgttcaacaacgccggcatgggcgcgcccccggtcaatttcgaggacctgccgctcgagcagtggcaggccgtcgtcaacaccaacctcaccgcgccattcctgtgcacccagcacgccttccgcatcatgaaggaccagacgccgcgcggcggccgcatcatcaataacggctcgatctcggcgcatgcgccgcggccgttctcggcggcctacacctcgaccaagcacgccatcaccggcctgaccaaggcctccaacctcgacggccggatgtacgacatcgcggtcggccaggtcgacatcggcaatgccgcgaccccgatgaccgaccgcatggtcaacggccccggcgtgctgcagccggacggcaccaccaagcacgagccgcgcatggacgccaaggctgtcggcgatgccgtcgcctacatggccggcctgccgctcgacgccaacgtgctgttcatgacggtcatggcgaccaagatgccgttcgtggggcggggctgatcgtcccctgctccccgcgtgcggcaggccatggccgggcaggtcccggctatggcctcgcaggggcgcgctgtcaaaatatcgaaaacaaccccatgcaaaggagccggcggctgccggcgtccgaccgggcgccttgacacgtcgggcaaatcagcggtagttttccattattccgaaatagtcttccccgatcgggatccagggaagcctccaagcggacggtgaaagacgaattcgcggagagtgcccctcacccgccgcttcgcgtcgacctctccccgcaggcggggcgaggtaaggcccctactccagcttctccacatcccgcagcgtcgggaacagcttcatccagagcagcgcgactgcgaccgtggcgacgccgcctagcacggctgacggcacggcgccgagcagcgccgcggtgacgccgctctcgaactggccgagctggttcgaggcgttgatgaacaggaaattgaccgcgccgacgcggccgcgcatctcgtcgggggtggcgagctgcaccagcgagaagcggatcacgacgctgatcgtgtcggccgcgccgagcaccgcgagcgccagcgccgacagccacatccagtgcgacagcccgaacaccaccgtcgcgacgccgaacacgatcacggactggaacatccttaatccgacgcgacggttgatggtgtgccgcgccagcaccatggtcatcagcagcgcgcccaccgcgggcgcggcgcgcaatacaccgaggcccagcggaccggtttgcaggatgtcgcgtgcatagatcggcaacagcgcggtgacgccgccgaacagcaccgcgaacaggtcgagcgagatggtgccgaggatcgccggattgctgcgcacgaaggtgacgccggcaaacagatcgtccgacgatccgccgttcttcaccggcgcctgctgcagccggccgataccgccggtcagcaacgcgccgaacagccagaacaccatcatgatgccgtaaggcgcgctcggcatcagcgcataggcgaagccgccgagcgcagggccggtgatggtcgcgacctgcgccgcgccgctcgatatcgcggtcgcccgctgtagcgaaccctgcggcgcgatcagcggcaacaccgcggcggtcgccgggctctcgaacgcaccggcgattcccagcacgaaagtcgcaacgaagatctggatttcggagatggtgccggcaaaggtgcttccggcgagaaacaatgcggtcagcgcttccgcgaactggcaggcctgcaccacgcgcttgcgctcgaaacgatcggcggcatgaccggcgacgaacaccagcaatgcggtcggcaggaactgcaccagtccgaccatgccgaggtcgaatgcgctgccggtgagatcatagatctgccagccgatcgccaccgcgccgatctggctggagaagcgcgacaggctgcgcgacaacaggaagaacaggaatggtcggtggccgagcagatcgcgggcgccggccggcgtggcggaggacatggatgattgcgtggccgagcgcctgcaacttgtcaatggagaggatggtcagagccccgttccgaaaagtcggaacggggctctggactcctgatttgacgcgttttcttcacgcgaaccggtaatccacttcgctggaaaacgctctaatgcgcaacagcattgcgctgcgcgaggcccctgcccataatcgcatgcgggttcttgggggcgtgatgctgcagttgcaatcggcgttcggcgtggtggcgttgctcgtgatcgcctgggtgttgagcgagaaccgcaggatggtgtcgctgcggcaggcggcgatcgggctcgcggtgacagtcgtgaccgcgctggtgttgatcaaggtgccgctggtgacgcaggccttcggcgtgatcaacgatgccgtcggcaccatcgccgccgcgacgcgcgccggcaccgccttcgtgttcggctatgtcggcggcggcccggcgccgttcgatccgaaggcacccggctcggatttcatcctcgccttccaggcgctaccgatcgtgctggtcatgagcgtgctgacgacgctgctgttctattggcgcgtgctgccgccgatcgtgcgcggcatggcctggctgctggagcgcacgctcggcgtcggcggcgcggtcgggctctcgaccgcagccaacatcttcctcggcatggtggaagcgccgctgttcatccgcccctatctggcgcagctcagccgcagcgaattgtttctggtgatgaccggcggcatggccgggatcgccggcaccgtgctggtgctgtacgcgacgctgctggcgccgctgatccccgatgcggccgcgcatttcgtcatcgcctcggtgctcggcgcgccggccgccattctggtcagcctgatcatggtgccggaaacctcggacacgcgcaccggcggatcgctcgacgatcccgatatccaggtgtcatcgacgatggatgccatcgtcaagggcacggccgccgggctcgagctcctgatgaacatcatcgcgatgctgctggtgctggtcgcactggtgtatctcgccaacaagatcgtcggcctgctgccggaaatcggcggcgcgaagatctcactgcaacgcctgctcggctacgtcatggcgccggtgtgctggctgatgggcctgccctggccgcaggcgatcacggcgggcagcctgatgggcaccaagaccgtgctgaacgagctgattgcctatgtcgatttgtcgaagctcggccccgacgcgctcgatccgcgctcgcgcctgatcatgctctacgcgatgtgcggttttgccaactttgcgagcctcggcatcatgatcggcggcctcggcatcatggcgccgacccggcgcgacgagatcaacgcgctcgggctgaagtcgatcgtctcggggacgctgacgacgtgcttgatgggggcgatcgtgggggcgatgacgtgacgacgtagtcgtcattccggggcgatgcgaagcatcgagcccggaatgacatcgagactacgccttcagctccaccgtcttgaactccgccggcaggatcacctccagcagttcgacgtcgtcggaatagtccaggatcatgtgccggatgcgcggcggctgggtccaggcgctgccttgcttcatcagcgtctcaccctcgccttccatgtaggtcttcacccagcccttgagcacatagaccatctggaagtcgacgtcgtggaagtgcagcttcgacacctcatccggattgcacgggccctgcagccggatcacatgcgcctgggcgaggccatgcgaggcggctgatatgccgaggtcgcggtacttggcgtaggcgcgcagcccatcggccttgaagtcctcttcgcggtgatggctgatggcgatgcgctgtttgggccgtgccttcgtcgctgccttcggtgtgctcttcttggccgccgagacgcggcccttggacttgatcgtcttgcgcgcggacgtcttcttggcgccgccgccaagccccgaccatttcttcttcaccgcggtcttggctgcggatctcgatgccgtcttcttggccattgttcgcctcccgtcttgttctggcggacgggaagctaacacaagtcgcgccgcgcgcggtgggcaaaggcgcgcaccgcgccttcccccttgccttgccccctcagcggatcaattcagccggaacacgccgtccaccgcgcgcagctcggccggcttgaccagcttggaatgcgccaccgtcaccgcgaacagcgggccctcgagcttctgctgccagaaagagaggaaatcctgcagcgccggaaatttcggaaacaggtcgtagttctgccagacataggtctgcagcaacgagggatgatccggcatccgataaaggatttgcgccgtcgtcagcccataccccaacaactgcttccggaaatcgtcggaaacaaccccaccaactcgcgagaccatgccaacctcctgtgacggagcgcattcacatggtggccgaccttccccgccggaccaccggcaatggatgcgctcacatgagagaaatgtgacgcacgcgactaacccatctcaagcccaaatgtttaataggttgttgaaatttcttgcgttagcagcaacttaccgcaactgctaatagcaacgacgagattcgcgccgccattaaggatgccgaaatgatcctggcagcgaccatctgcgagtgccaaaatttctgctagaggctcttgcccgccgccacggcttggcctatctcctgcgcagccggtctggcactcgctgggctggactgctaacactccaaaattctacagcatccgcaaatatttaggaggactgcatgaaattccgtccgcttcacgaccgcgtcgtggtcaagcgcatcgacgccgaagagaagactgctggcggcatcatcattccggacagtgccaaggaaaagccctcgcagggtgaagtcatcgccgttggcccgggtggccgcgatgaagctggcaagctgatccccatcgacgtcaaggtcggcgatcgcgtcctgttcggcaagtggtcgggcaccgaggtcaagatcgacggcgaagacctgctgatcatgaaggaaagcgacatcatgggcgtgctcgacgtccccgcttccaagaagaaggcggcctaagcgccccctccctccctggtaaacctctcaaggaaaaactcagatggcagctaaagaagtcaaattctccgtcgaggcgcgcgacaagatgctgcgcggcgtcgacatcctcgccaacgcggtgaaggtcacgctcggcccgaagggccgcaacgtcgtgctcgagaagtcgttcggcgctccccgcatcaccaaggacggcgtcaccgtcgccaaggagatcgagctcgaggacaagttcgagaacatgggcgcccagatggtgcgcgaagtcgcctccaagtccgctgacgcggccggcgacggcaccaccacggcgaccgtgctcgcccaggcgatcgtgaaggaaggcgccaagtcggtcgccgccggcatgaacccgatggacctgaagcgcggtatcgacctcgcggtcgaagccgtcgttgcggacttgcagaagaactcgaagaaggtcacctcgaacgaggagatcgcccaggtcggcaccatttcggccaacggcgatgccgagatcggcaagtttctcgcagacgccatgaagaaggtcggcaacgagggcgtgatcacggtcgaggaagccaagtcgctcgagaccgagctcgacgtcgtcgagggcatgcagttcgaccgcggctacatctcgccctacttcgtcaccaacgccgacaagatgcgcgttgagatggacgacgcctacatcctgatcaacgagaagaagctctcctcgctgaacgagctgctgccgctgctcgaggccgtggtgcagaccggcaagccgctggtcatcgtcgctgaagacgtcgaaggcgaagcgctcgccaccctcgtcgtcaaccgcctgcgtggcggcttgaaggtcgcggccgtcaaggctccgggcttcggcgatcgccgcaaggccatgctgcaggacatcgcgatcctgaccggcggtcaggccatctcggaagacctcggcatcaagctcgagaacgtcacgctgcagatgctcggtcgcgccaagaaggtgatgatcgacaaggagaacaccacgatcgtcaacggcgccggcaagaaggccgacatcgacgcccgcgtcgcccagatcaaggcgcagatcgaggaaaccacctcggactacgaccgtgagaagctgcaggagcgtctcgccaagctcgcaggcggcgtcgcggtgatccgcgtcggcggcgcgaccgaagtcgaggtgaaggagcgcaaggatcgcgttgatgacgcgatgcatgcgacccgcgcggctgtcgaggaaggcatcgtcccgggcggcggcgtcgccctgctccgtgcctccgagcagctcaagggcctgcgcaccaagaacgacgaccagaagaccggcgtcgagatcgtgcgcaaggcgctgtcggctccggctcgccagatcgcgatcaacgccggtgaagacggttcggtgatcgtcggcaagatcctggagaacaaggcctacaatcacggcttcgactcccagaccggcgactatgccgacctcgtcaagaagggcatcatcgacccgaccaaggtcgtccgcaccgcgatccagaacgctgcctcggttgccgcgctgctgatcaccacggaagcgatggttgccgagctgccgaagaagaacgccggcggccccgcgatgcctccgggcggcggcatgggcggcatggacttctaagtccagccactcaaggcaatccacgaaatgcaaaaccccggcagcgatgccggggtttttgttttggggtctccgtcattccggggcacgcgaagcgtgagcccggaatccattggtccgcttgctcatggcctactacgtctacctgctcgcaagcgacaaatatggcacgctctatctcggcgtgaccaacgatgtcgtgcgccgcgtccacgagcacaagagcaagacggtcaagggcttcaccaagcgatacgccgtcgacaaacttgtctggttcgagatctacgatgatgtactgacggcgatcgcgcgtgagaaggaattgaagaagtcgcggcgcgactggaagatcaggttgatcgaagagaagaacccacagtggatcgatctgtatccggaaattgccgccggacatcttggatgaatggattccgggctcgcgctacgcgcgccccggaatgacagtgtttccacctcacccgctgcgcgcgacatcctgaaagcaaccgcgcagccagtcgatggtgacgcgcgttgccgcatcgcgcttgagatggctctgcaccagcagccagacgtcgcgccgcttcggtagcagcgtggcgcgcagacggcgatcggtcaaaaggtccgcgcaactatgctccggcagcacgccgaccgcctgatgcgactggatgatcttgtggatgatgcggacattgtcggtgacgcagcgcgcgcgaagccgcttggcgcgcaggaactgcatctcgggaattgcgccgagttcgtccggataggcgcaagtcaccgcgtctgccgccgacgtcgcggccggctcgaagaaatacagcctgacttcgccaagcttcgagatcgcgaaatcgcccttgtcgggcttgcgcaggcggatggcgagatcggcctcccagcgcgagaatttgacgttgtcgctcgaagtcaggaattgcagcgtgaggcccggattggcgcgcagcaatgcgccggtgcgcggcgccagcacttcctccgcgatcgcgttggtggaggcgacgcgcagccggccgaccgggcccggcaggctgtcgccgacccggccgatctcctcggcatgcacggccatcgcctggatatgtgcgagcacgacgtcgcactgccgggtcggcttgcggacgccgtcggccgcctcgaacaggcggagcccaagcgcgcgctcgatccgcgccaggcggcggccgaccgtggtctcgtcgatgcgcagccgcgcgctggcgccggcataggtgccctcgtccctgaccgccgcgatgatccgaaggtcgtcccagttcatttcggcaggctacatccggccttgaccacctgcaataacgcagccaccggctgcaaactccctgcataacggcaggccggtccacggctatatttcacgcgacccatttcatggagacctggaccatgtcgtcagccaagaccttgatgcagctcgccggtatcgacctcaccccgccgcgcctcggcgatgcctgcctggtgttgatcgacatccagaacgaatatctcgcaggtcccttggccctgcccgacgccagcccggcgattgcgcgcgccaccgcattgctcggtcgcgcacgggaaagcggcgccaagatcatccacatcgcgcacaagggagcgccgggcagcctgttcgatcgcgacgcggagcgcggcgcgatcgtggcgcagctcgagccgcggcccggcgagatcgtgatcgagaagcaattgccgaacgccttcgccggcaccgagctcaatgtgcagctggccgcgaccggccgcaaggagttggtgctcgccggcttcatgacccatatgtgcgtgagctcgaccgcgcgcgccgcgctcgatctcggcttccgcaccacgatcgacgccgagagctgcgccacccgcgacctgcccgacggcaagggcggcacgattgcggcgaggctgattcacgacgtcgcgctcgccgaattgtccgaccgcttcgcgatcatcgcccgcggcaacgcgctcgcctgagaccaccatcatgctcgagctctatttctcgccgatggcctgctccctcgccagccgcatcgcattgatggaggccggcatcgaggcgcgctatcgcatggtgcagctctggaccaagaaggtgctcgaggacgatggcgacttccgcgccgtcgcaccgaagggcgcagtgccggtgctggtgctcgagaacggcgaacggctgaccgagagcgcggcggtgctgcaatacatcgccgaccgcaagcccgaactcggcctggcgcctccgccgggcgatccggatcgctaccgcctgcaggaatggctgagtttcaccggcacggagatccacaagggattcctgtttccgaccttctggtacaaggacgacgcatcgcttgccaaaccgcgcgcccggatcgggccgaccttgtcggtgccagcagcgcatctggcgcaccgcgaattcctggttgggaaccgcttcacggttgctgacgcgcacctcgcctgggccctgctgctgctccgcgccgccggcgtcgacgtcgcgcaatggccgtcactggcagactatctctcgcgcatccaggcacggccgcaggtcaaggccgcggtcggcatcgagatgcagttgtggaagacggtcgcggcgtgagcgtcgcgtctgctaagactttggcagaccaactatgccgcttaaagcgatgacgccagagatagcccgaggcgccttattgaacgctcagaacccggcatatccacgagtcctgtgacaattaaccaccttcatttgctcgccgtgcactttgagcctcacatcatccaaccatgccttgttagcacatgttgcgactgaattggaacgtcgccgccgttcgagatgacaaacttataaagcgtcgctggatatatttctcccacactcaacagcctgccatgagcaaaagcgtcgcgaacatcgactacactcctgtcaactctaaactttccctcggcctcgctgaggagcccgttgtattcgtcaatgagagagcctatcgaacggaagttcgtaagatacgtctccgttgctgtttagtcgcctaaaccgggtaacttgagccgctggttgtgcacagccgcgagaaataatctcacgaccgtctccagcgcttgaaggtttgttacgatggcgccgacgccttgaatatgatcttgcgcagttgttttgctttccatagttccgctcttacttactcagcagcgccgaaagctcaattccgttaactgccatgaattcgacaccagtgaacttagttgaaccaccaaagccaaccgcggcaatgccaattacttgatagccgtcattcaagaccggaccaccactgtttccgccgataatcttgggcgatatctccaaataggaaactgcgctcttcacaaacgagcgaatgagcttgccacgttccatacgtatgggagtagcagcaaaatggtttgggtatccccacaggctgacatcggcaccgttcgccagagcgacgcccttgtatgccgagagcgggacaacattctccaattcgactggaacataaagaatagcaaggtcccgatgcttatcctccgccctaacctttaatttgaagcgcttagtatgatcggaaggatggtaaatgaaaggattctcaccgaggcagtgggcacatgtaacgatacctacgccgtccaggaagaaagcggttccctgagaatcgccgtcatgctcgataacccatatggcctgtgcagcaatctcggacctgctaagcgcagttcgaatctttccgttggcagtcagcttattgaactccagcgcaagcttcttgaatgactcgtcgggtcgacctcggatctgtccaataaagccaatcttaccacgaactaccgcctcgaagtctcgtcccgctcccccgaatttttcgttgaagacgctgctcgcttttacaaggccaaatttcctccaagcgtgaagcaacgctcgagcttcccggatcgcgctgcgccgtacgttgacgcgctcatttacgacaaggcccgtaacgacctgacgacgacctcgagtcgacaaccgaactttgcgctcattgatgacgaagccattagcttcgattatttcgcgaagaggtcttgccagttcagtgatcggtgtcccgtccgagttgaggttcagcgcggccatcggcatgaattgtcgattagtcgaaaacgtcaaatcatcagcgtagcgggtgtaaatgcacttgttagcaagagcatatcgactcagctctgcgtccatttttgcgcaaatgaggttcgagaggatcggtgaagttggggcaccctggggaagagcattatcgagcgtgcaagccttagcgatcgccgccgcgacttttggtgctatcccgtagggcttcttggtcaacaagccatagacgcgaccgtagttgatagtattgaaaaagtcttgaagatcgacgttcagtacatgacgctgacctacatggagcacagcattccgctttatgtcgcgccccttcacaaagccggtaacgcatggcttgaagcgaacaagcctctcgagttcacgcacaatgcttcgctggattatcttgagattcgtggcaggcgccttgataattctagcgcctccgctcctctttttgatttgaaactgcttgtattgcgtagcgaggtcgcgcttataaacgtagtatccaagctgcttcgcggaacaatcaagaaggatcgctaatgatgtgaggtcgtaagccttagaaaggtccatggcgctgctgaaagagggagatgatggacgcgatcgcgagacttctcacttaccaaacgcatgcgccacgtgagccattgggccgcacgccgcgccgcgctgcttctgcagtaacgtttttagcaaggtcgcagtatcaacgaccagaacaaatgccacgatcgcgccaattcgcttttaacgagagtctgatggaatagtcaatcccaagctgccaaggccccatccaactcacccgttattccggaccggctcaaccattggatttgtcggcttcaggccgtctgcgaagttacggcacgttgtagagccgcctcgtcttctacgcgcaactatgccatcaggtcacctgcaccctgccgctctactgaaacgcgacctcggcgaagctgcgcagcttgcgcgaatgcagccgctcggattcctgctgcttgagccgctccagcgccttgaggccgatctggagatgctggccgacgcgctggcgatagaactcgctggccatgcccgcgagcttgatctcgccatgcagcggcttgtcggagacgcacagcagcgtaccgtagggcacccggaagcgatagccgttggcggcgatcgtcgccgattccatgtcgagcgcgatggagcgcgactgtgacatccgccggatcacctgcggtccgctgatctcccagttgcggttgtcgacgctggcgaccgtgcccgtccgcatcagccgcttgagctcgaaaccggtgagcccggtcacctcgccgaccgcctcctcgagcgcgacctgcatttccgccaatgcggggatcggcacccagagcggcagctcgtgatcgagcacgtgatcctcgcggacatagccatgagccagcacgtagtcgccgagccgctgcgtgttgcggaggcccgcgcaatgcccgatcatcagccaggcatgcggccgcagcaccgcaacgtgatcggtgatgttgcgcgcgttcgacggaccgatcccgatattgatcagggtgatgccgcgatagccggactcgacgagatgaaacgccggcatctgcggggtgcgctccgatgccgcccccgtagtgccgccgccggccagcgcgttgcgcgtgatcacattgccgggcgcgacgaaggcttcgatcccttcctcgcccgccgcgagccgttgcaggctcgattgcgcgaaggcgtcgacatagaactggtagttggtgaagatcacgaaattctggaaatgctcggggtcggtgccggtgtagtggtagagccggcgcagcgagtaatcgacccgcgcggcgcggaacagggccagcggctcgggcgtccccggcgtcagctcgaacgtgccgtcggcgatcgcatcgtccatcgccgcgagatcaggcgtatcgaagatgtcgcgcagcgatcgcgtgaacgccgagctgtcggcaacggtcagcgccgcctcgatattgatgtcgcgccggtaggcgaaatgaatcgggatcggctcgccggactcgccgatctcgaccgccacgccatggttcttgatcagcagcccgatctgctcggtgaggtaggtccggaagatgtccggccgcgtgatgctggtctcatggatgccgggccccgcgacgaagccgtaggcaagccgcgaatcgagcctcgcatgcgacgaggtcgtgatgcggacgaagggataatgcgcgcggacccgcgtcgtgaagggcacgccgttgacataggcctcgaagcgattgcgcaggaagccggtgttgcgctcgtagatctcttcgagacgggcaaccgcggctgccccatcgccgaacgcttgggtcgtgatcggcggcggggtttcgatgagcggagcaggatgcattgcgttttcgaccggtgatctggtcgccgcagtatagcaacaatcgacaggccagttccagcgacgcggaatttgatgcatgctatcggaggcgatcgaggcgcgctttggcctgaccacgccgatcgatccggtcgcttggaattccacgctcgacgcgctgatacgctgccgaggatagttggccgcgagcggacaagccaaggggcaagccccctggcgcagaatgcgcctactggatccgcgcgagcaccgcgaggcggcggatgcccttgttgcggtaggcgtcgaggaacgcgtagtagtccttgaacgagacgcaaccgttggagtcgccgttcggaccgagcatgaaggtgtgcgcgagcaggccgtcgcggttgaagatcttgccctcgccgccgatcggattgagccgcagtgccggcacgccgtggaacagcgcctcgcgcggcttgagttcgtaaatgtgcggcggcgtcacgccgaccatcttcagatgcgaggatcggggatcgtcgagccgcgagccgagacccgaatgcgcctcgaggcgcgtgccgtcgggcagatacacggtcttcgccgagatgtcgtacaccgcggtctggcggtcatagggcggcgagccgccgagcatcgggttctggtccagcgtcgagggaatgctgccggtgacgttggcatcggcggaggcaaacgacagcagcccgccgctcgactcgcgtttgccccacagcttctcgaccatggtctgccgctcgctcgatgcgatcgacatcaccgcggccttggcgcgcgcggccatgtcgcggacgccgccggatttcgcggcctgcttggcttcggccggcttcgcctcaacgcccttgggctgaacgttgacggtgggatcgttgagcgccacctgcagattggcggcggcttgcttcttggcggtctcgaccgatttcggggctggcagcggcttcgatgtctcggcgagctccgcggtcgccaccgccctcgccgtcgcaacgaccttgggtgcagcggcctgcttgatcgggtcgatctgcggagcggcgtcagccaccacgctggatgcgacgccctccggcgtggcggccgcaaaccgatcgttaaacatgagtgacggggccagggcttccgacgtcgcgacctcggtctttgcaacctcagtcttggcaacctcagtctttgcgggcgccgccggtgccggcgtcagggacgcgaacacctcgttaaacgccggtgccggccgcgcggcagcggcgaccggccgcttcacgacaggcgcatcgaacgacgcattgccaaccgacggatagacgttcgcggcaaagatgttggcgtagaccgtccaggcgcagccaagcaccagccccgccaccgcggcgctgccgaggaaatgctgagggaggatttttttggaggatttcttgcggcttggcgcctcaagaacatacgcactcgcactcgtacccatacacccggcgctcaaaacaggtccacctttgtccctcactcgacgcgtggtcgaacggagttcggctcaacgtcgcgcgggggcacagacggccattaaggcgccttttagttaaatgcgacttaaccggatgtgatcccctgcagcgcgggaagtgcctgtggcgtagggcttttttaagatgacattggaccgctaaagcggcttttctgtcccatgatgggacatttcggcaccctgctccagcgcagctcagcggaataaattcaagagagaatttccttgccgatcaccccgtgaagacgcggggatcggacaaaaaccatctctcactgcagttccggcggcggcgagcggtcaaagacctcgcccttggcgccatcaagcagatcgagcgcataggtctcgatcaccaagggcccgcgtaagcgcttgacctcggccaccgtttcgacatgagcgaaattgtcgcgcaccgaggccggcatctcctgctcgacctcgtgcacatagagcagcttgccggacagctgcgccgggctcggctcgcccatgttgatccagcgaatgcgctggccctgctgggcgacgcaggtgcccttggggagatagaaggccagccagccggtggtgccgtagtccggcgccagcacgcaggtcgcgcccgcccgcacccgcgccgcctcgatttcatccgcgagctcccgccagccgacgccgacgctgcgcacggtggcgtcgcgacggtaacccgagagcatgccggtgttggcctgcacgatcagcagcgcgaacagcaccacgccggtgggcgcagcccagcgacggcagaaatcgatcgtgcgctgctcgcgcggcgcccactgcacctggatcgcggcgaccgcggccgctaccgcgaaggccggatagaccggcgcgaaccagttggcttcgacccgcgcatgcagcgcgtgccaggtgaagtagacgacgatggtccagaacatggtgttgaccagcacgcgtgccggcatcgcgccggcgcggcgccggtacaatgcatagaggcccatcacgccgaggatgaacaccagcggcgtcgcgaacgcaaactgcgtcgggatcagctcggcgatgtagttcggccggaaatcctcgatccgggcgcggcccatctgcttgatgaacgacacccattgatgatcggcattccagaggatgaccggcgcgaacaggccggccgcgaccaggccgccaagatagagccaaagcgagagataccagcgccgcagcttcggcacgacggcaagccagatcaggatcgcgggaccgaaaaacagcgcggtgtatttcgacagcagcgccatgccggcgctggcgccgaccgcaagccaccaggcgccgcggccgctctccagcaccttcgcaagcgcgtacagcaggaagctggacgcaaccagcagcggcgcatccggcgtcacgatcagcgtgccgacggcggccatcagcgtgacgttgagcaggatcgtcgcgctcgcagcgatgcgctggccaccgaacaggatcgcggccgcgcggtagatcgcccagctcatcggcaatgcgagcaggatcgacaccaggcgcacgccgaacggcgtatcgccggcgatcatggtgccgagccggatcaccaccgcaaccatcggcggatggtcgtaatagccgccggcgagcaacttcgaccacatccagtaataggcttcgtcgaaggtcagcggcgtccatgccgcggcggccagccgcaacaccaccagcgcgcacaccgcgagcgcggtgttccgggccggccgcgcctcgttcgcgttcatgccgccgtcatcgcttgcgccagacgaacagcccggacatcgcgtagttccacaccacgcccatcagcgcgccggccgcgcccgcaagccaccagatcggctcctggtcgtagaccgagaacgcgacgccgacattggcgagcaggccgacgctgcagaccagatagaacagcagcaggccgcgcaggatgccaatacccttcagccgctggtcgcggtaggtcaggaaattgttgaggatgaagttgctggtcatcgccacgatcgcaccggcggcctgggcctccgggaatggcgccttgaacagttccagcgcgatgaacagcaccgtgagatgcaccagcaggccgagcccgccgaccgcggcgaacaggatgaagcgcagcgagatcaggtcgttggtcagtttcgccagcacgaggccgaggaagtcgagcgcaaccatcgagtcgagcttgctctcgccatgctggcgggcgccgaaagtgtagggaatctcgacggtgcgcagcttgccctccgccgtcgcgacgacgtcgagcaggatcttgaagccctgggtcgagagctgcggcgcgagctgctcgaagcggtcccggcggatcatgaagaagccgctcatgggatcggcgacctcgaccttcagcgcgcggcgcgcgatctcggtggcgaaggcgctggcgccggcgcgctgcttgttgaagccgtcggccttgtagccctcgatgtagcggctgccgaccacgagctcggcctcgccgctctgcagcagtcccagcatcttcgggagctgggtctcgtcatgctgcaggtccgcgtccatgacggcggcgtaaggcgcgctcgatgccaggatgccctcaatgcaggcacccgacaggccacgccggccgattcggcggatgcagcgcacgcgcgaatccttccgcgccagcgcgcgcaccacgtcccaggttccgtcaggcgaattgtcgtcgacgaagatgacttcccaggacacgtccttcaggatcgcgtccagccggcggtacaacaccgtgacattgtcgcgttcgttgaaggtcgggaccaccaccgaaagctgcggcagactggccgcttgcgacgaggtttcggggctgagcttgatggcgtcgttcatgagcgccagcgtatagcggcagcctcccccgctgccaaggcgggccggcccaaacgcggtctcggaaagcgggaaaacggggcagaatacccccgaaaatgccaacgaccacgaacaaaggggcgcgcgtacatccggcgcagccgacattgccgtggtcgtcccagcgccggagcccttaagctgcaacgtcgccgttatgatccagataggaagcccccatgcggttcgcaaggggcagtctgcacaaaggctagttgttcgggacttcccggatcaccgggccgcgcggcgccggggccgcctgcgcagcctccgcggcgggagccgcctgcggctgcatcgcggcgggcttggtcgggttacggagctggctcggcgacggcccgtagatgaacgccgccgccagcgcgatggctgcgaccactgcgcccaagaagcctgccgtcgatcgtgagttcatcccgtcatccccttagcctgcgcggattgatatcaaaaatcggccggccgcaacaggattcgggaacctatttcgccgctgccctgcgcctgacgaaggcgatcacgatgtccttctgcgccagctcgatcgcgcggttcgcggtggacaggttggcgtcggcatcctgcttcggaaattgcagcgacaggaagtcgatcagcgacacccggaagttctgccgctccgaaggacagacattggcgatcagcgcagtgaactcctggtcggacatcgccttgttgctgtcgcggggatattcgcgggcgagacaattccagtaggcgtcgcggccggtgatcgcgagcttgtgcgcatcgtcgacctcgtctgccattgcagtagacgatatggccgcggaagacgtgatcaagagggcggccgcaaccagcatgcgcattgttgttctcccgtttttcggcatcctagccaacgcttgcggtcacgataagcactgccacgccaatctggcaaactggccaatcacgattattttgactactctctattcccttccctcctcacgatgagtgcagtcgtggccaaagctcccaccaaggcgaccaagacagacacgaagacgaccaagacggacgcaggcaacatctatatcggcatcggcggctggaccttcgaaccgtggcgcggggtgttctatcccgagaagctgacgcaagcgaaggagctgtcctacgccgcctccaagctgacctcgatcgagatcaacggcacctattacggatcgcagaagccggagagctttcgcaaatgggccagcgaagtgcccgacggcttcatcttctcgctgaaggggccgcgcttcgccaccaaccgccgcgtgctcgccgaggccggcgattcggtgaagcggttctacgattcgggcgtgctcgagctgaaggaccggctcggcccggtgctgtggcagttcgcaccgaccaagaaattcgacggcgccgatttcggcaagttcctcgaattgctgccgcgcaagctcgacggtcgcgcgctgcgccatgtcgtcgaggtgcgtcacgacagcttttgcgtgcccgagttcatcgccctcattcgcgagcacgaggtgccggtggtgttcgccgagcacggcaaatatccggcgattgccgacgtcgccagcgacttcgtctatgctcggctgcagaagggcaatgacgagttgaagacctgctatccgccgaagcagctcgacgcctgggccaagcggtttcaggactgggctgccggcggcgaaccggacgacctgccgaaggtcgacaaatcagcgccgaagaaggcgccgcgcgacgtgttcgcctatgtgatccacgagggcaagatccgcgcgcccgccggcgcgatggagctgatcgaacgggtaaagtaagggacaatcgatggcaaaggcgaaacggctgttcaccatcggctacgagcagacgccgtcaaaggcggtgctcgacgagctcgagcaggccggcgtcaggctgctggtcgacgtccgcgcggtcgcctcctcacgccggccgggcttctccaagacccagctcgccgcaggcctcgacgagcgcggcatcggctacgtccatctgcgcggcctcggcacgccgaagagcggccgggaggcggcgcgcagcgggcaatatgcgctgctgcacaagatctactcggcgcatctcaagacagtgcaggccaaagaggagctcgacgagttgtcggcgctggtgaagaagtccggcccggtctgcatcctctgctacgagcgcgaccacgaacactgccaccgccgctggatcgccgagatcatcgaggagcgcgacggcgtcaagatcgagaacctcgcagcgccgcaggtggtctacgcaaaataaactcagatcgattcgcgttcgccgcgtgcttgcttcacctctccccattggggagaggtcgatttgcgaggcaaagcgggtgaggggccgcagcttcaatgagggaccgtcccccctcacccggcgctgcgcgccgacttctcccaagggagaggtgaacctccgctgccggtccagctcgagcgaatctcttcccgctctagccttctccctccaggcgcaacgtcccctgcatcatctgcacacaggcgccgccgacatgcgccgatatgttagcaccgtcctgcttgcgcacgcgggtcagcagcagactcggccggcccatatcgaagccctggccgaccgtcagcttcaggaccccgtcacgcagcggatcgagcgcagccagcaacgcggccgctgcaaccgtggcactgcctgtggccggatcctcgatcaggccgcttgatcccgagaagaacatccgcgcctgcagatcgcagggcgcctccgcggccgggacgtcgcgggtgtagaaatacgtggagaacgcaccgtcgcgcgggaagaagcggccgaacgccgccgcatccggctttgcccgccgcaccgcatcgcgcgatgcgacctcgaagaccaggaatggagttccgacaccaaccacctgcggtgcctgacgatccgtcctgacgtcgtctgccgtgagcgagatgaggctcgcgacctcccaggcggagaattgcgccagccgcgacagcggctgcggcgcggtcagctcggtggcaaccaccctgccgccgtctcgcgtgatgtcgaccggcaccagccccgccttctcctcgaacaccagacgcggcttcggctccttggcaagctgcgccagcacgaaggccgtaccgacgttgggatgcccggcgaacggcagctccctgaccggcgtgaagatgcgaacgttggcgtcgttggccttgtcctgcggcggcagcacgaaggtcgtctcggaatagttgaactcggttgcgatcgcctgcatctgtgcggtcgacagcccctcggcgtcgagcaccacggcgagcggattgccgccgaaggcgcggtcggtgaaaacgtcgacagtgatatagcgccgctgcatcttgcgtgtccttgtgctccggtcatctgcgaccgatggcgtcatcgtagcatagccgcaacgacgcccgtcagagcactcggtacaatcgcgcgcgccttgtttgagcatgatcctcttcggaaaaccgcttcgcacttttccggatcatgcctagaaccgaaacaattcccgcggcgatgcgagcacgcgcgcgcgttcatcggcatcggtgacgagctcgtcgaggaatttgcggttcttcgcgtaattctgtgttgactcgaattgcgtgtgcggccagtcgctgccccacagcagccgatcgacgccgtaggcgttgcgcagcagcggataggcctgcttcgcgaacgcctcgccggccgcgccgttgcgataaggcgccgatatcttgacccagacattgcgcgttgtgccgagcttgagcaccgactggaagccgggatcgtcgatgccgagcttcggatcgggcaaggcgaagtgatcgaacacgaccttcacgccctggtcgagcagcttcggcgccaacgttgcgagatcgctggcattgcgctggatctcgacctgccagtcgagcgtccggatctctccgagcagcgccgtccactcgcccgatgtcagatcgggcagcgtctggccgaccagattgagacggatgccggcgacaccggcacgatcgagctcacgaagcgcttccgccggaaccgtgggatcgaccacggcgatgccgcgcagccggccgttggtcgccttcaggcactccacaagataggaattgtcggtgccgagaaagctcggctgcaccagcacgccattggtgatgccgttctggtcgagctgctgcagatagagcgcgagcggcgcgtcgtagtcgggcgcgtaccggcggcccggcgcgagcttcagcccgcgatgaaagacgtgggcgtgggtatcgatcgccagtttcggcacctcagccctcaccttgctcgccaatccgccggccgacagcgcggcaatcatccccgcggcaaaccggcgccgcgtcaagccatgttcgtacgatgtcatgatcattccccatcatcacgcgcgcgcagcggtggcctgctcgaaaaccttgccgcgggtttccggcagcatcagcacggcgaccagcaccagcgaataggcgaaagccgcgtcgatcccgatcgcggcaccaaggccgatgtgatcgctgagatagccgaccaggaacggaaacgccgccgagacgatgcggccgaaattgtagcagaagccgacaccggtgccgcgcacgcctgccggataaagctcgctgaacagcgccgccatgctggccggaatgcccgccgagaagaagcccaagggaaagccgagcaccagcatctgcgaattggacaggggcgcgaagatgtagaccagcaccgtcacgacgcaggcggcggcgaacagcgtcacattggcgcgccggccgattcggtcgctgatgatcccggagaccacgcagccgcagaagaaggcgacgatgatcacggcgagataggcgctggagccgagcaccgatagatgccgcacttcgcgcaagtaagtcggcaggaatgtcgtcagcgccgcatagccgccatgggcgccgatgccgaacaggccgccgatcagggtcgagcgcagcacgtcgcggtggaagattccggcgagcgtcgcgaagaacggcggctcggctgtgcgcgatgcggcacgcggcggctccttcaatccgcggcggatatacaggatcaagagcgccgggatcaggccgaccgcaaacaggatgcgccaggcgatgtcggccggcgcataggtaaacaccagggccgagagcagcaccgccgcgccccagccgaccgcccacgcgctctgcacggcgccgagcgccttgccgcgatgctcggcgcggatgatctccgccatcagcaccgcgccgcaggcccactcggcgccgaagccgacgccctgaatggccttcagcaccacgagttggctgtagttcatcgcgaaggccgaggcgaaggtcgcgagcgcaaaggtcgcgaccgtgatctgcagcgccttcacccgcccgaagcgatcgccgagtgcgccgccgagccagccgccgaatgcgccgaagaacagcgtcaccgagccgagcaggcccgcgtcggccttgctgatggcgaatgcggtgatcagcgccggaatggcgaggctgaacatctggacgtcgagtgcgtcgaggccccagccgccaaagcttgcccagaaggtgcgccgctcgagcggcgaacattcgctataccagtttgccatcattcctccctgagatgtcttgtgttgtttttaattgatcgtcgcggtcatctgatctcggcgtggtagcggaaacgatccgccgggccgcgcgagcggcgccactcgatcggccgccgctccaggtcgaaggccaggcgctcgatcacgatcagcggcgcgttggcctccagtcgcagcaggcgcgattgcatctcggtcgcgatctcgacggtgaggacttcatcggccgagaccacgacctggccgcagcgatcctcgtagagcggatagagcaagtcgccgaattcagccgtgtcgagcgcgacgatcgcctcgaagcgcgatcgctgcagccagatctcttccgcgagcagcggcacgtcgtcgatcagccgcagccgcgacaggctgatcacgggctcgccgaccgagatacgcaacgccgaggccaccgccgtggtcgccggcatcgccttgcggcgcaggatgcggctctgcggcacgcggcgctcgccgctttcggactggaagcggaagaagcggaacagcgaggagttgaaccgcgcgcggcgcacgaaggtgccgcggccctgctgacgctccagcacgccatcgctgaccagctgatcgatcgccttgcgcacggtgccgatcgcgacgccgtaatacgcaccgagctcggcctcggaagggatcaggtccccgggacgccattcattgcggttgatgcgcgccgcgagatcgtcgcggagacgctggtagcgcggcagtcgatcgtcgagggctgaactcatatagtcatctatatgagtaaaggacatcgcgtcaatcactaccaatctacctttatgcgatcagatgcggtgccctaccccaattgccagaccggcaccggatgctcgtagccccgcaccgggatctcgccgcgcgagaccgcgtccctgcactcatcgccgagcgcttcgcgcaccgcggaagaaatcaggaattgcgagccgagctccttgttgagcgcctcgagccgcgcggcaaagttcacggtgtcgccgatgacggtgtattccttgcgccgcggcgagccgatattgccggcgacgacctcgccgatatggatgccgatgccgatgcgcagcggccagctcgagcccgcgttggtgcgctcattggcggccagcatctcgcgcgcggcggcgaccgcctgatgcgcggcatcgccggtttcgaacggcgcgccgaacagcgcgaggaagccgtcgccgagaaacttgttcacgatgccgccatggcgatcgagaatctcgaccaatacggcaaaggcgccatcgagccgatccaccacctcctgcggcgaccgcgagcgcgccccggccgtgaagctgcgaaaatcgacgaacatcactgccacacggcggatgtcgctcgcggtcgaggcgccctccgtcatcagacgctcgaccacctgcggcgagacgtgctggccgaacagattggtgatgcgatcgcgcgctgtggcagccgcgatgctggccgcgaactgccgccgcatctgcaggccgacagtccccgcaagcacgccggcaatcaggaccacggcgctgcgcgcgcagtggtagaaaaaatccggctcggggtcgagcgttccctctgggcgataatacatcgccatccagaacagctccgaggccgccacgaagccggtgaaggtcgacagccagaagtccagccgcagggtcgaggcgatgatgaaaatgaaatagaccatcggcgcgacccagccgagtgccgcaaccggccccatgctgtcgatatgcagggcgagcgcgacggttggcatcgacgtctcgatcagagcgccgacatagcgcctgatgatcggcaggtcgcgcccctgcctcctgtaccagctgatcgcgccatgcacccacaattcgaacaggatgaacggcgtaatgacggagtagagataggacggcttgaaattgccgtgccacacccggaccagcgcgtccggagccgtgaagtagatcacggatgtgagcgccgagaatgccagggcaatgccgatcagcaccttgatgcgaagcagctcggtggccatcacctcctgcatcagggcgtggtggaagtcggcagagaccgtcgtgtcctgcgttgtcttttcgccgctccaccagccagccatcgtcatcgctccggtcaccatgccagaatgactccttgcttatattagcctcaatcaagcgtgcggcggaagcgcgtcacggcgacggtcatggcgaacagcatcagggcagccagcgcgatggtgtcgtattgcaggttcggcatcgccgcgcctttcagcatgatggcacggacgatgcgaatgaaatgggtcagcggcaggacctcgccgatatattgcgcccacaccggcatgccggcgaacggaaacatgaagccggacagcaggatgctaggcaggaagaacatcatcgagagctgcatcgcttgcagctggttctgcacgatggtcgaaaacgtatagccgatcgacagattggtggtgatgaacagcgtggtgagcagccccagcaatgtgaggctgccgagcaccggtacgccgaacagcagcacgccgatgccgatgatcagcccggcctggatgaagccaaccatcacgtaggggatgatcttgccgaacatcacctcgaccggcttgatcggcatcgacagcaggctttccatggtgccgcgctcgatctcgcgtgtcaccgacagcgcggtgaagatcagcatggtcatggtgagaatggtcccgaccaggccgggcacgatgttgaggcgcgattccgccgccggattgtagcgggcatgggcgcggatctcgaacggcatttcgggcggatcaccgatgtgcaggtcgtgtgccagcgcgccctgcaccaacggcccgagcgcgccgagcgccgagcccgccgcgaccgggtcggtggcatcggccgcgaccaggagcgccggcttgtcgccgcgccgcaccgcgcgctcgaagccgcgcgggatctcgacgccgaacagcaccttgcccgactgcagcagctcgtcgagctgctcgacggtgtgcacctcgcgcgtgaagcggaaataggcggtgttctccatcgccttcaggatcgagcgtccgaggtcggtatcttcctgaagcagcaccgcggtcggcagatgccgcggcgtggtgttgatggcgtaaccgaacaacagcagctgcatcaccggaatgatgatgatcatggcgaaggacacgcgatcgcggcgaagctggatgaattccttgaccagcatcgcgtagctgcggcgccagaagccgaacgccggctccctctcttcgccaatccggatcgtatccgttgcactcatgacactatccctggaagttgtccttggagcgccccatcaggtcgatgaagacgtcctcgagcgacggctcgctcggctgccaacgccacttcgaactgtggcggtagggtgcgatcgcagcctcgagcgccgccttgtcccggccggagacatgcaggctggtgccgaacggcgccaccatgtcgacgccgggcttaccggtcagctcggccatcagcccgttgaaatcctcgcccgtcaccgtccaggtcgacagcgcggaggccgcgatcacctcgtccaccgtgccgtgggcaagcagatggccgtaggcgatgtaggcgatctcgtgacagcgctcggcctcgtccatgtaatgtgtcgagaccagcacggtgaggccttcggcggcgagcgcatggatctcgttccagaaatcgcgccgcgccttgggatcgacgccggcggtcggctcatccagcagcagcaattgcggattgggcagcgtgcaggcgccgagcgccagccgttgcttccagccgccggacaattcgccggcgagctgctcctcgcggcccttcagcccgatccgcgcgatcatgtcggccgcggcgccgcgcgggtccggcatgccatagagccgcgcgacgaactccagattctcgcgcaccgacagatcctggtagaggctgaagcgctgcgtcatgtagccgaccttgcgcttgatcttgtcggcatcgcgccggatgtcgtagccgaggcaggtgccctcgccgctgtcgggcgtcaagaggccgcacaggatgcggatggtcgtggtcttgccgctgccgttcggaccgaggaagccgtagatcgagccgcgcttgacctgcatcgacaggtcatggaccacttcgcgaccgccgaacgatttggtcaggcccttcacatctatggcaataccgggcgcactggtttggccgccgttcatctgcggtccgccacgggggtcttgggattgagatagacgctgatcggctggccaactctcagcacatcgggccggctcggccgcgcctggatcaaatagaccagcttgttgcgctcatcgaggctgtagatcaccggcggcgtgtattccgccgtggtggcgatgaagtagatcttcgcggtgagatcggcggcgcaattatcgcaggtcacccgcacctggtcgccgagcgcaagcttcggcaactcggtttccggcacgaagaagcgcagcttcatgttgccgggcggcatgatcgacagcaccgggcgttgcgcctgcaccatctcgccctcgcggaaatagatctgctggatcgagcccgcgatcggcgcaaaacccttgcggcggtcgagccgggtctgtgaggtgacgacgcgcgcctcggcgacgcgcagcgccgagaccgcggaatcgaggttggcctgggtgccggcgccggtgccgcgcagcgaggcggcgcggtcgtagctctgctgcgcgttggcgagcgtggcgttgttctggttgagatcggcgcgctgcagatcgtcgtcgaccgaataaagcagctcgcccggcttgacctcgtcgccttcgcgcacgttgagcttgatgacgcggccggattcgtcggggctgacgaagatcatgtcggcctcgacccagccctggaagcctggatcgcgcgtctccttgcatccggcgagcgccaccgccagggcggcgaccgtgatcagcttcatcatgcgcggcgcggtcatgtcttcctccgttcgccgaagatcaagtcgagatgaaccttgaacatcgcgagcccgtcgagcggcgcgtgccgggcgaacaggctctgccagatcaccgcgacgatcgcgggcgcaacgaccagctggggaaactcgccgagctcgcgctgcttgatctcgccgcgcgtgatcgcgagctggaccagcgccttcatgccggtcaggcccttcgacaccacctcgcggaaatagaaatcggcgatcgccggaaagcgcggcccttccgagacgatcagacggatgatgtcgccgcgcctggtcgacacgacctcgcggatgaaggtctcggcaaacccctccaccgcgtcgcgcaccggaccggtgatggtgggcagtgccgtcatgcggctgatcagcggcaccagcgcggtgcggatcagctcctcgaacatcgtctccttgtccttgaagtagagatagagcgtgcccttggcgacgccggcccgcttggcgacatcgtcgagccgcgtcgcggcgtaaccgcgcgcgatgaactcatccatcgccgcctcgacgatcgcagcgcgccgctccgccgatttctcggcgcggttcgccggcggcctcgcctcgggcagcttcgccgaagccactttcgggatcctcgccgcggcagcccggatcgtggccgggcgtttggcgggcttggtgcgggtcgttctttcggtgcgctttgccatgaccacattatgactgactggtcagtcattgtcaattcgctgaaggatagcgcgttcccttacgaaaggttgctgttcgccggcttgagcgcgatcaaatcaccgcacgttcttcgtcattccggggctcgcgaagcgagagcccggaatccattgagccgcagaactcctggatgaatggattccggggctcgacgctgcgcgtcgccccggaatgacggcgggaagcggtgtcgcgctatgtatgaaacttcagcccatcgaggatcttgtcggccaccttgcgctcggcgcggatggcgaggccgaccagattgagctcggtgcgcgccaccgccttcacgacctcgcggttggcggcgtcgtgcgtggtcttgaacatgtcctcggtgtagagcgcaggcttcacgtcgcgcgccagcgcgcgctccagggcgcgtgacagctgcgcacggtcggcgccgtagatcaggatcggctggccgatcagggagagatacctcgtccccgagccgtcctcataattctcgccgatacattcgggaaaggaagcggcgatgccaccggcgagaaacgacgccacgttgagcttctgccagacttccaggtcggtgcggatcacgaccgcgatcttggtgtcgaactgcatagcggtaaacctatccgcaggccgacggccaacaccagccctgacggcgcatccctcgcctgcccgtcaggcgccggcgttcgtttcctgcaaggcttacgcggccgaccgtcgccgccattcttgtagcccgcgctagcccttggcgtcgcaggcccaggcgcggatcacgcattccttgccgccaaactcgtagcacttcttggtcgcggcattgagcgagctcgagatcctgggcgccaccgcataaccatgggcgccgcagggattcttcatatcgatcgagagcgcggcgcaggcgcgcttcatggtgacggtggtgcaatcgcccttgcactgcttgagcgccgcggcgcgcgccgcgccttcggccgaatagtcgtaggcctggccataggcgccgcacttgccgaccgcgaacgcaccggccgcgtgcgctttgggcacgaaggtctccacggagaaacgcgcggcacccagcagcaatgtcaggacaagtatcgtcagcgcgcggcgctgcgcggcggcggtcgaaatgatcaagcggaaatcccccaaagtccggcgcggactgtacgcgggggtcgttgccagatggtgaatgacgggttgagggcgcgacgaagctctatccacgcgtcgtcccggcctagtgcgcaattgcgcacgggggccgggacccataaccacagggttgagttattgaaagaggctgcggctacaacgtcgtgcaacaatcgctttcggtggcaatgggtcccggccttcgccgggacgacggctgatagttcagcctcgccttgccgcttccagcgcctgcggcgtgtcgatgtcgaggaaggcgctgttgccttcgaccgggacctccgcgaccacttcggcgtgcttggcgatcaggtggcgggcgccgatgtcgccgtcgagcgtcatcagctccttgaagaagcggcgcgaccacagcaccggattgccgcggcggccctcgctgacggggaccgcgatcagatggccgcggtcgggcgcgaaggtctcgatcaagcgatcgatcagcgtggcatcgatcagcggcatgtcgccgaggcagacgatcgcgccgtcggcgcggtctgacaccgcggagatacccgccttcacggagctcgcaataccgccagcgaaatccggattgcgcacgaacttgaccttgagtccatcgagcgcctgctcgaccaggtcggcctgatgcccggtgacgacgatcacctccgaggccttcgaggccagcgcctgctcggcgacgatgcgcgcgagcttcttgccgtcgagctcggcgagcagcttgttggggccgcccatccgggtcgagcggccggcggcgagcacgatcgccgcgacgttgcggttgccttcggtgtccggcacggtgcgcggctgcggccgcgtcacgatctccatcagaagaccgccgacacccatgccggtgagatccgaccgcgtcaccttgatgccggcgagcagccgcatcagcacccagtcgaagccgttctcgaccggcgagcgcgcgcagcccggcgcgcccagcaccggcacgccgccggcgctgccgatcaagagcagattgccgggatcgaccggcatgccgaaatgctcgacggcgccgccgatctcggtgatcgcggccgggatcacgtcacggcggtcggcgattgcggatgcgccgaacacgatgacgagctcggcgccgagcccgagcaattccttgatcgaggcggcgagcacggtctcgtcatgcggcacgcggcgttcggcgatgatggtggcgccggccggcgcgagacgctcggcggtgacgcgcagcgtcttgtcgatcaccttcggtgcgaggcccggcagcaaggtcgagaccacgccgaccttcttgatcacatagggcgcgatccgcagcgtgtcgcggcccgccaccgcgacggcggcatcgcgcaagcgcccctcgacaccgaacgggatcagcttgacggttgcgatcatctcgccttcgaccaccggcttgtaggccgcgagcgtcgcgaaggtgatcgcctcgtcgacgccgttgatccgatcgaccgcggcgcggtcgaccaccagcaccccggggcgcgccgcgaacagattggcgcggccggtgaaggcgcgctcgacattgacgccctcgcccgccaccgcctgtgcgatgctggcggccgcgacgtcttccgagacgtcgccgtcctccagacgcaccacgacgacgtccttgacgccggccctggtcagcgcctcgacttcatccgggccgatggtggtgcccttcttgagcaccagcgcgccctggcggagcgtatgcacggtgacgccgccaatcgcgtcggccagactggcgggaccgaacttcatgccgcttcttctttttccttgggaggcagacgcagctgcgcggtgatctcggccatgatcgataccgcgatctccgacggcgacaccgcgccgatgtcgagcccgatcggcgcgtggatgcgcgcgatgtcgctgtccttggcgccctgcgcgcgcaagcgctcggcgcgcttggcgtgggttttgcgcgagccgagcgcgccgatatagaagcactcgcggtcgaaggcgtgcagcagcgccggatcgtcgatcttcggatcgtgcgtcaccgcgacgaacgctgtgtagtgatcgacgttgagcggcggcagcgcgacgtcgggccattcggcgaccagcggcacgtcggggaaacgctcggggcttgcaaacgccgtgcgcggatcgaccaccgtgacgtcatagtcgagcgaccgcgccagcggcgccagggcctggctgatatggaccgcgccgatgatcacgagctttgcggtcggcgcgtagacgttgaggaacagcttcttgcccgcaacctcgacattgccgctcttgcctatccgcagctgcttcgacagttcggcgcgcaacggatcgccggcgatgtccgcggctttgaccaggcgttgatcgccattggcggtgtcggtgacgatgatgaccggacggcgcgcagcacgctcggcattgagctctttcaatatctcgagtttcacggctaaccgaccttctcgacgaagacgcggatggtgccgccgcaggacaagccgacattccaggcggtctcgtcggcgacgccgaattcgagcatcttgggctggccgctcgcgatcacgtcgagcgcctcggtgacgacggcgccctcgacgcagccgccggagaccgagcccagaaacgtgccgtcgtcattgatgacgaggctggagccggccgggcgcggcgccgagccccaggtctcgaccacggtagcgagcgccacgccatggccctgcttctgccaggtctcggcggcctgaaggatgtcttcgtcgcggttgagcatggtggcctcctgctatcgggtcaggcttctaggctacggaacggatcaaactgcggtggtgcgccggcggcggggatgacagcgccccgatcaagcccttgatggacgtcaagttatgcaccgggcgaaattcgtcaacgtggggcagcatcattttgatgccctgcgccttggcctcgaagccggaatagcgcagcagcgggttgagccagatcaggcggcggcaggagcggtgcaaacggtccatttcgaaggccagtttggcatccgcctcccgttctagtccatcggatataaggaggacgatggcgccctgccctagcacccggcgggcccagagctggttgaaggtgtgcagcgaggtcgcgatccgggtcccgccggcccagtcctcgaccgaggacgagcagctcgccagcgcctcgtcggggtcacgcgcccgtaacgcgcgcgtcacattggtcaggcgggtgccgaacaggaacaccgagacccgcttgcgggcgtcggtgatggcatgcaggaagtgcaggaacagccgggtgtactcgctcatcgagccggagatatcgagcagcgccacgatcggcgccggcttctcgatccgaccgagcttcctgatatcgatgatctcaccgccggtgcgcagcgaattgcgcacggtccggcgcatgtcgagccgcaggccgcgcgcgttcggctggtaacggcgggtgacgagctcggcctgcggcaaccgcatcttggcgatctcgcgcgtcacctcggcgatctcggccgcggtcatctgcgcgaaatccttcttctgcagcacctccttgtcggagaccgatagcttcagctcctgctcctgggcctgcggccgctcctcggttttcgccggctgcgccatcgcctcctggacccggcgcgaggccggcggcggcttcttcctggcgtggtcgggcagcggcaccgaatccagcatgctcttccactcctcagcggctcggaagaacagcatgaaggcctggtggaagatcagcgcgtgctcatggcgcttgacgaagatcgcctccagcgtggcgtagaaatcggagcggttgccgacctcgatcaactgcaacgcattgagcgcatcgatcaccgagcccggcccgaccggcaaccccgccgcccgcagcgcgcgggcaaagccgatcacattgtcggccatgtggccggtcgggggattgaggtggttgatcggcatcgagctatccactcccgtcattccggggatcgcgaagcgagagcccggaatccattgttcagcgtcaaggcggcccgatggattccggctcgcgctgtgcgcgccccggaatgacggctagtcgctcgtcgcttccttcaatgtcttctgcaacgcatcgccctgcatgcgcgcgatgtcgtcctggtatttcagcagcgcgcccagcgtgtcgccgaccacctgcggcgtcagcgagcgggcgtcgagctcggacagtgcggtggcccagtcgatggtctcggcaacgcccggcgacttgtagaagtcctggttgcgcagcgcctgcacgaagcggacgacctgctgcgacagcttggcggagatgttcggcacccgcgatttgacgatcgcgagctctcgctcggctgtgggataatccacccagtgatagaggcagcgccgcttcagcgcgtcgtggatctcgcgggtgcgattcgaggtgatgatcacgatcggcggcgccggcgccttcacggtgccgagctcgggaatggtgacctggaagtcgctgaggatttccaagagataggcctcgaacgcctcgtcggcgcggtcgagctcgtcgatcaagagcaccggcggccccgcgacatccggctcgagcgcctgcaacagcggccgcttgatcaggaagcgctcggcgaagatgtcgctcgcgagctggtcgcgatcggtatcgccggaggcttcagcgaggcggatcgcgatcatctgcgccgcgctgctccactcatagacggcggaagcgacgtcgaggccctcatagcattgcaggcggatcagcttgcgcccgagcgccgccgacagcaccttggcgatctcggtcttgccgacgccggcctcaccttcgaggaacagcggccggcccatgcgcagcgcgagataggtgacggtcgctagcgaccgctcggccagatagccgcgcgaggtcaagagctcctcgagcgcatcgacggaagtgggtaacgccgatgcactcatggaacagccagtcttcgaacgggggtcagcgaggtcacgcgtgaaatctagtccctgggatccagttccgatctagtcccttggatctagtccttggatttagcccttggcattggcggcttccaccgcccggcgcgtcaaaacgccgatcaggtgggcgcggtattccgcactgccgtgcaggtcgctgttcagcccttcggcgggaaccgcgatgccgtcgagcaccttgtgcgagaagcgcttcttcaaggcctcctcgaacgcggtggcgcggaacacgccgtcggagcccgcacccgtgaccgcgacgcggacgtcggacggacgcttggccacgaacacaccgaccaacgcgtagcgcgaggcctggttgcggaacttgatgtaggccgccttcttcggcagcgggaacatcaccttggtgatgatctcgtcggcctccagcgcggtcgagaacaagccctggaaatactcctcggctttcaggcgacgcttgttggtgacgatggtcgcgcccagcgccagcaccgcggccgggtagtcggcggtcggatcgttgttggcgagcgagccgccgatggtgccgcgatggcgcaccgcgggatcgccgatcatgcctgcgagttcggcgagcgccgggatcgcttcgccaacgatcgcggagttcgccacttcggcgtgcttggcggtggcgccgatcaccagcgagcggcccttcatctcgatcgtgtcgagaccttcgatatgggagaggtcgaccagatgcggcgggcttgcgagccgctgcttcatgacaggcaccagcgtgtgaccgccggcgatcagcttcgcgtcctcgttcttcaccaggaggttggcggcctgccgcacggtgccggggcgatgatatttgaattcgtacattggcgaaattcctgggaatgtcctgatcgcagtcgcgacgaattgctgattaagcgggatccggcttgtcaggccaaatccgacttggccatcgccttggcgccggcggcgatcgaggcgacgatgttctggtagccggtgcagcggcacagattgccttccagctcctcacggatcacctcgtcggagaggtcgtggcccttgcgatggaccaggtcgacggcggtcatgatcatgcccggcgtgcaaaagccgcactgcaggccatgatgctcgcggaaggcctcctgcatcggatgcagcggcgcgccatcggcggccaacccctcgatggtcttgacctcatgaccgtcggccatcaccgcaagcgtcgtgcaggacttcaccgccttgccgtccaggtgcacgacgcaggcgccgcactgcgaggtgtcgcagccgacatgggtgcctgtcagccgcaggttttcgcgcaggaactggaccagaagggtacgggggtcgacattcgcgttaacgggattgccgttcacgatcattgaaatcttggccatcagcactctcttatctgccccgccgcatatcggcgaagcaggcggtttaaaatcattccagacggcataatatgggcgcgccccgcgatgggcaacctttggagccacccatccaggacatagcgggaagccttggccggacccagatagtccagccggaaggcagggctaaccctgcaccgcctttgcaaaatttgcaaagaattcgtcggccagcttcttggcggcgccgttgatcaggcgctggccgagctgggcgagcttgccgccgatctgcgcctccacgttgtagctcagaagcgtgccgccgtccttgtcggcaaggccgacggtggcgccgcccttggcgaagccggcgaccccgccctcgccttcgcccgagatcttgtagccgttcggcggatcaaggtcgctgagcatgaccttgcccttgaagcgggcggagaccgggccgaccttcatcttggcggtggcgcggaagccgccctcatcggtcttctccagctcttcgcagccgggaatgcaggccttcaacacctcgggatcgttgagcttgtcccacacagcctgtcgcggcgctgcaagctggacttcgccggtcattgtcatggccatggggggacctcctcgatcgcaagaaaccttttcccccaagtaaagcagcccgggcgcaaaggaaaggccaccttgggaggatgagcgatgcatattcgcaaccgcagcaagccgagcgcatcgttcacgaaatcgcgcggtccgcttgccggatgtgacggcagcgcaggggcattggcagcgacgcgcaggagtggttaggtcgcgcgccatgagcacagccctctcccccctgcttgcgccgatgctgtcgagcgcggcgatgcgcgcggtgtgcgacgacgccgccaccctgcagaacatgctggatttcgaggccgcgctggcccgcgccgaggtggcctgcggcgtgattcccgcagccagcgctggaccgattgccgcggcctgcaaagccgaatcattcgacctcgcggcgttggccgatgcggcgacgcgatcgggcaatctggcgattccccttgtgaaggccctgaccaccaacgtcgccaaagcggatgccgaggcggcccgctacgtgcattggggcgcaaccagccaggacgtcgtcgacactgcgaccatgctgtcgttgcgcgccggcatcgatgcgctgctcgccgatctcgatcgcgcgattgccggatttgccgggcttgcgcgtgcccaccgcgacaccgcagtggtggcgcgcacctggttgcaacacgcgctgccgatgccgttcggcctcaagctcgccgaatatgccgcggcgctgcatcgctcgcgccagcgcttgctgcggctgcgccgcgagacgctggccctgcaattcggcggggccgccggcaccctcgccgcgctcggggacaagggactagcggtggccgcagcactggcgaaagacctcgacctgcccctgcccgatgcgccctggcacacccatcgcgaccgcatcgcggaggccgcgtccgtgttcgccatcctcgccggcagctgcggcaagatcgcgcgggacgtttcgctgatgatgcagaccgatgtcggcgaagccttcgagccggccggcgccggccgcggcggctcctccaccatgccgcacaagcgcaatccggtcgccgccgcgagcgcgctcggcgccgcgacgatggcgccgaatctcgccgcgacgatcttcgccgcacaggtgcaggaccatgagcgcagcgccggcccgtggcacgcggaatggccgaccctgccgagcctgatgctggtgacttcaggtgcgcttgccgcgatcgtcgatctcgccgaggggctcgaggtcgatgcggcgcggatgcgcgtcaatctcgatgcgacgcaagggctgatcatggcggaagccgtcacctttgcgctggccgacaagatcggcaagagcgacgcccatcacttgatcgaggccgccagcaagaaggcggtcgccgataagaagcatctgcgcgatgtgctgtcggcggatgccaaggtcaccgcgcatctcgacaccaagcggatcgcaggactgttcgagccgatggcctatcagggcgcctcacaggtgctgatcgaccggttgctggcttcactggatgagaaatagcgaagatgtcattgccgggcttggcccggcaagcgcatgacgagagggacaagacgatgccgatgatcaacgccgacggatgcctgctcaacgtccaggtggatggccgcgacggcgggccgaccttgatgctgtcgaattcgctcggctgcaccttgcagatgtgggagccgcagatgcgggcgctgacgcagatgttccgcgtcatccgctacgaccgccgtggtcacggcaaatccggcgtcccggccggcccctactcgatggaacggttcggccgcgacgtgctcgcgatcctcgatgacctcaacatcgagaaggtgcattggtgcggcctgtcgatgggcggcatggtcggacaatggcttggcgccaacgctcccgaaagattcggcaagatcatcctcgccaacaccgcctgctactatcccgatccgaccaactggctgaatcgcatcaaggcggtgaagcaaggcggcatcgccgcggtcgccgacaccgtgatcgcgggctggctgaccgccgaattccgcgagcgcgagcctgagaccacggcgcgcatgaaggcgatgctgctggcctctccggtcgaaggctatctcgcctgctgcgaagcgttgtcgacgctcgaccagcgcgcgctgctgcctgggatcaagagcccgacactggtgatcgcaggcaagcaggacatggcgacgccggtgtcggcgggtgagatgatccgcagcggcattcccggcgccagcatgacgctgctggatgccgcgcacatctccaatgtcgagcagtcgcacgccttcaccgaagccgtggtcggcttcctgacgcaacgctagcccccgagcagcaatggacgtcattgcaagcgaagcgaagcaatccatgtcaccgcctgccgtaacatggattgcttcgtcgcttcgctcctcgcgatgacgaggaggagaattcaatggacgacaaccagcgccgcgacgacggcatgactcagcgccgcaaggtgctcggcaatgaatgggtcgacaagtcgatcaagaaccgcaacgcgttcaacaccgacttccaggatctgatcacgcgctatgcgtggggtgagatctggacgcggccgcatttcgatcaccgcacgcgccgcgtgctcgtcatcggcaccatggtcgcgctcggccaatgggatgagttccgcctgcacgtgcgcgccgcgctcactgagggcggcttcacgcccgaggacatcaaggagatcctgctgcaacaggctatctattgcggcgtgcccgcggccaatcacgccgtcaaggaagccggtgcgatcattgccgaactagggctgctgaagggatagctcgctcgccggggctccggcctcggcgacaggcgccttggtgacgggcttcgccggctgctcgaacagcatcacgatcgcggtgccgagcagcatcagaagctccgacgcgtgcatccgcagcgcttcgatctcgccgaccctggaggccatcatcatgctggcgaagctcagcacgctgccgaggcagagcgccaccgcaagcgcctcgtcggcgccgctgctgtttctacgcagcggcgagaacgcggccatcgccaggaagaccgcgaagaacgccaccacggtgatccgcgccagcgccagcagccatgccagccgcaccgtcgccatcttgccgaggtgcagatagtcgctcgcatacagtgcgatcgacacgctcggccgctcatagaggccgtggatcggcgacaccatgatgctgaaggcgatgatggtccagaccggaatgaaatagaccgcaagcagcgcgccattgaaggagctgatccgccagttactcgacattgccgcttcccgtgcttgccgcgccttatcgaccggcgacggttcagcctgcgaggtaacgccgatcgattgccggcagcaatttaaaccctttgttaaggttaagcgcggtgcgattgtgccgggaccgatgcgatcggggccggccgggattctgcgccagccgagacaaaagggggtaaaatgaccgaaagaacccgcgttttcgtcgcaacgccctgcttcggcggcgacctgaagatggcctatgtgttatcagcgctgaagctgcaggctgcggccacggcccggggcatcgacatccagttcaacctgatcggaaacgaatcgctgatcgtgcgcgcccggaacgaactggcccaccaattcctgatgtccggcgccagccatctgctgttcatcgatgccgatatcgggttcgagcccgagtccgtgttccggctgctggacaggggcgccgacgtttcggcggcggcctatccgctcaagcacatcgattgggcaaaggtgcagcgggcggccgacgccaagcggcagaacctcgcatcatcgtcgctggactatgtcgtgacgtgggagggcgagcagatccaggctcgcgacggtttcgcaaaggtccgctacgccgggaccgggttcctgctgctgaagcggtcggtcctcgtcaggatgtgtgatgcccatccggagctgaaatatcgagccaaccacaagaccaatgacttgaacaccggcgacctggtgcgcgccgacctcgaccgcgtgtcgctgttcgaatgcatgatcgacaagacgaccggcgagtatctgtcggaagactacgcgttctgccggcgctggctcgacctcggcggcgagatctggctcgacctgcgcagcgaattgacgcatttcggatcatacgccttccgcggccgcttcgccgatcaattggcatgaaccacagcggacacaaacaaatgagctgacgacagggacctcgcgacgcggcgagaccctttttgttgcagctgctcagttgccccgatgagggcttcgggcttctcacgccgggacggttcctgaggcacccgcgcttctgacctgggctccggatgctcgttgtttcatcaagctggggacaacgcgcgcatcgggaccgcagttgcgctgggaacgcgggttccggcgcgatcattgcaaggcaacgaggtgtcgccccctgtgacatcggaaccgcacccgccaaagtagttatgtacaaagccctctctgctgctgccatgctgttgccgccgccggggttccgctgttagaaaataccgcgacgcgacggaccaggctgccgggggccctcgccgcgtcacccgcgacgtggcgttttcgagcgaagtggagaccggttcgcgtgaagacaacgcgtccaaatcaaaccgagagcccgttcggttctcaaccgaacaggccctgacggcagcgcatggattatttcgcccagcaactgatcaacggcctcgtgctcggttcgatctatggcctgatcgccatcggctacacgatggtctacggcatcgtcggcatgatcaacttcgcccatggcgacatcttcatgatcggcggcttcatcgcgctgatctcgttcctggtgctggtgtcgctcggcctcaccgcgatcccgctcatcctgctcatcgtgctcctggtctcgatggcgatcaccgcgctctacggctggaccatcgagcgtatcgcctaccggccgctgcggcattcgttccgcctggcgccgatgctgtcggcgatcggcatgtcgttcgtgctgaccaacttctcgcaggtgtcgcagggcgcgcgcgtcaagccggtgccgccgatcatcaccggcggctacacgctgcatgaaggctcgcagggcttcgccgtgcagctgtccaacatccagatcatggtcgtgctcgccaccatcgtggtgctcgcgctgttcacctggctggtgtcgcgcacccggctcgggcgcgacatgcgcgcctgcgagcaggaccagaccatggccgcgctgctcggcgtcgacgtcgaccgcaccatctcgatgaccttcgtgatcggggccgcgctcgccgccgtcgccggcatgatgtacctgctgtattacggcctggtcgatttcttcatgggcttcgtcgccggcatcaaggcgttcacggccgccgtgctcggcggcatcggctcgctgccgggcgcaatgctcggcgggctcgcgatcggcctgatcgagacgttctggtcggcctatttctcggtggagtacaaggacgtcgccgcgttctcgatcctgatcgtggtgctgatcttcatgccgaccggcctgctcggccgtcccgaagtcgaaaaagtctgacaggcacttcgtgagcgcgacctcagcccgcccctcgcacgccgcgcagccctcgggcagcgccttcattctcaagaaagcgctgatcagcgccctcgtcgcgctggtgctgttctcgctgatgatcggcgtgcgcaccgaggccggaccgcagggcggcctgatctactggacccggttcggcgacctcgccgcactggtcggcaccgtgttcggcggcagcatcatcatcgagctgctgcggcaatggtgggggccggtcgacaaggaccgcctcgtgccgaaaccggtgcaatcggcgatgtcgttcgccggccgctggctggcgccggcgctgctggtgttcaccttcctcgtgcccgtcatcttctacaaccagcgctacattctcgacctgtcgatcctggtcctgacctatgtgatgctgggatgggggttgaacgtcgtggtcgggctcgccggcctgctcgacctcggctatgtcgccttctatgcggtcggcgcctattcctacgcgctgcttgcgaccaatttcggattgtcgttctgggtctgcctgccgctcgccggcatcctggcggcgttctggggcgtgctgctcggcttcccggtgctgcggctgcgcggcgactatctcgcgatcgtgacgctcgcattcggcgagatcatccgcctcgtcatcatcaactggcagagtctgaccggcggccccaacggcgtctccgggattccgcgtccgaccatgttcggcattccgctgacgcccggcgatgacgggctcgccgccaagctcggcatcgagttctcgccgacccaccgcctcgtcttcctgttctatctgatcctggggatggcgctgctcaccaactgggtgacgatccggctgcggcggctgccgatcggccgcgcctgggaagcgctgcgcgaggacgaggtcgcctgccgcgcgctcggcatcaacaccacgaccaccaagctgacggcgttcgcgaccggtgcgatgttcggcggcttcgccggcgcgttcttcgcaacgcgccagggcttcatcagcccggaatccttcaccttccaggaatcggcgctggtgctggcgatcgtcgtgctcggcggcatgggctcgcagctcggcgttgcgctcgccgcactgaccatgatcggcggcttcgaactgttccgcgggctcgatcagtaccgcatgctggtgttcggcatggcgatggtgctcttgatgatctggcggccgcgcgggctgatcggccatcgcgcgccgaccgtgttcctggagcgcaaccaggcgatctcctccgacctcgtcaaggagggccacggatgagcggcgaccccatcctcaccgtcgaccgcctgatgatgcgcttcggcggcatcgtcgcggtcaacgagctctccttcgccgccgagcggcgcaagataaccgcgctgatcgggccgaacggcgccggcaagaccaccgtgttcaattgcatcaccggtttctaccggccgagcggcggcgcgatccgcctcgcccatgacgacggccgcaccatccagctcgagcggctgaacgatttccgcatctccaagcaggccaaggtggcgcgaaccttccagaacatccggctgtttcccggcatgaccgcgctggagaatctgatggtcgcccagcacaacgcgctgatgcgcgcctcgggcctgaccgtgctcgggctgctcggcctgccgtcctggcgcgaggccgagcagcgcgccatcgagctggcgcggacctggctcaagcgcgtcggcctgctcgaccgcgccgacgatgccgcgggcaacctgccctacggcgaccagcggcggctcgagatcgcgcgcgcgatgtgcacggagccggcgctgctctgtctcgacgaaccggcggctggcctcaacgcgcgcgagagcggcgggctcaacgagctgctgctgtcgatccgcaacgaacagggcacttcgatcctcctgatcgagcatgacatgtcggtcgtgatggagatctccgaccacgtcgtggtgatggactacggcgtcaagatcgccgaagggccgccgcagaccgtccgcgacgaccccaaggtgatcgccgcctatctcggggccgacgaggaagaggcgatcgccgtgatggagagcggcacgtgagcgcgctagctgctaccacacccctgctcgcggtgcgcggcgtgcgtgcggcgtatggcaagatcgaggcgctgaagggcgtcgacatcgagatcaaccgaggcgagatcgtggccctgatcggcgccaacggcgccggaaagtcgacgctgatgatgacgatcttcggccggccgcgcgcccgtgccggcagcatcgaatatgacggcaatgacatcaccggcgtgccgacccacgagatcgcgcggctgcgcatcgcgcaatcgcccgagggccggcgaatctttccgcgcatgagcgtcgcggagaacctgcagatgggcgccgacgccaccgaaagcagcgaggccgaacgcgaggccgggctggagcgggtgttcgcgctgttcccgcgcctgaaggaacgcatcgcacaacgcggcggcacgctgtcgggcggcgagcagcagatgctcgcgatcggccgcgccctgatgagccggccccgcctgctgatgcttgacgagccctcgctcggcctcgcaccgctgatcgcgcgccagatcttcgacgccatccgaacgctgaaccggcaggacggcctcaccgtcttgatcgtcgagcagaacgccaaccatgcgctgaagctcgcccatcgcggctatgtcatggtcaacggcctgatcacgctcaccggaaccggcagcgaattgctgcagcgcccggaaatccgcgccgcctatctggaaggcggccgccacgggtagttgcacgtttcgtgccgctcctgcagcaggatgcagctgatgcagcgtcgatttgcctgaaaattgccggtgacttcgccgcgaaaccagccgagaatgcccgcggtttgagggcccggcgtgccgggcccttccgcaagaggcaacgaccacgagggacgtctcatgaaatcactgaagctgatcggcctggcattgggcgcttcgttcgcattgtcggcgagcgcattcgcgcaagacatcaccatcgcagtcgcgggtccgatgacgggctccgaatccgctttcggccggcagatgaagaacggcgccgagcaggcagtcgccgacatcaacgccgccggcggcgtgctcggcaagaagctcgcgctggaagccgacgacgatgcctgcgatccgaagcaggcgcgctcgatcgcggagaagatcggctcgtcgaagattccgttcgtggccggccatttctgctcgtcgtcgtcgatcccggcctccgaggcctatgccgacgccaacgtcctgcagatcaccccggcctcgaccaacccgctgttcaccgagcgcaagctctggaacgtggcgcgcgtctgcggtcgtgacgaccagcagggcctggtcgccgccgactacatcgtgaagaacttcaagggcaagaacgtcgcgatcctgaacgacaagaccacctacggcaaaggcctcgccgacgagaccaagaaggcgctgaacaaggccggcttccaggagaagatgttcgagtcctacaacaagggcgacaaggacttcaactcgatcgtctcgcgcctgaagcgcgacaacatcgatctggtctatgtcggcggctaccatcaggaagccggcttgatcctgcgccagatgcgcgaccagggcctgcagaccattctgatggcgggcgacgccatgaacgataaggagttcgcctcgatcaccggcccggccgccgaaggcacgctgttcaccttcggccccgatccgcgcaacaagccgaccgcgaaggcgatcgtcgagaagttcaaagccaagaacatcgaccccgaaggctacacgctctacacctacgccgcgatgcaggtgtggacgcaggccgtcgccaaggccggcaccaccgacgccaagaaggtgatggagaccatcaaggccggcgattgggacaccgtgctcggcaagatgggcttcgacgccaaaggcgacatcaaggcgatcgactacgtcgtctacaagtgggacgccaagggcaactacaccgagatcaacccgaagggctcctgagccccccgcgcctgatccgatcagagatacgaaacgccccggtccgccggggcgtttttctttggtaccgcggctgctataccggatcgatcggacagcaggcggacgggcccaatcgtgaaaaaccttctcaccgatattgccggcgttgccgtcggccacgccgacgacgcggtgatcgcctcgggcgtcaccgcgatcctgttcgaacggccggcggtcgcctcgatcgatgtccgcggcggcggtccgggcacccgcgaggacgcgctgctgtcgccgcataatgtcgtcgaagcgatcgacgccatcacgctgtccggcggctccgcgcttgggctcgatgccgccggcggcgtgcaggcctggcttgccgagcgcggccgcggctttcgcatccgcgacgcggtgatcccgatcgtgcccggcgcgatctgcttcgacctgctcaacggcggcaacaaggcgtggggacgctttccgccctatcgcgatctcggctatgcggcggcgaatgccgcctccgacgacttcgagctcggcagcgtcggcgccggcatgggcgcgacaacagccaacctcaagggcggcctcggctcggcgtctgatgtgaccgacgacggcgtcaaggtcgcagcgctcgccgtggtcaacgcggtcggcagcgtcgcggtcggcaacggcccctggttctgggcggcgccgttcgaggtgaacagcgagttcggcggacgcggcctgccaccctcgttcacacaggacatgctcaagccgcggctgaagggcggcacggacgctaccgccgccgagaacacgacgctggtcgtggtcgtgaccgatgcgcaattgacgaaaccgcaggcgcggcggctggcgatgatcgcacagaccggcatggcgcgcgcgatctacccagtgcacgccccgctcgatggcgatgtggtgtttgccgccgcgaccggtgccaagccggtcgatccgctgttcgggctgaccaagctcggtgcgatcgccgccaacacggtggcacgcgcgatcgctcgcggcgtccattcagcgacccccctgcccttccccggcgcgctgccgagctggcgggaccggttcggttagatcgtcactctcccgtcattgccagcgaagcgaagcaatccatttatccgcacatgcggacagatggattgcatcgtcgctccagcgcaaaattgctttgcaagtttgtcgccgagctcctcgcaatgacgagctacgcgctgaccgacagcgacgatgaggcctgggccgagatcgcctgcgactggcgctggatcagctgctcgatgaaattgtaggacgaggtggccttgttgccggcggaagacgaattcgcgctgctgttggccgacgccgtggccggcgtcgtcatcgacaccttggagccgtcggcataggtcgtcgtcgtggtggtcgagccgtcgctgttggtcaccgaggtcgaggttgcgccgtccagcgcctgcatcagcggatcggagctcgagccacccgagccgccgctcgagccggatccatcggtcgagccgctttccatgtgatggtgatgatggccgccgcccttgtggccctgcaaggcctgcgacatctcgtcgaggctgacgctgccgtcgccgttcttgtcgagcttggagaacacatcgtcggcctgcgcgatgttggtaccgccggcgccgagcgcgttctcgaattcggtcttggtgatctggccgttgccgtcggcgtcgatcagcgagaacaggtccttcagcgcatccgaccggctggtcggcgttgtgctggttgaagccgtgccggtcgaagcggtcgcctggctctgcgcgtcgagcagcgcactcatggtctgcggcgaaatctgcggggtgccggcgcccgatccgccgctggtgctgctcgacgtcgatgtcgcggtcgagaggtcgaacagcccggtggtctgatttccctgggtggagctcccggtctgggtcgtcgacttcgacgacatcagcgagctcaaaagatcgacggcggatgacgcagcgccaatggcaaataacatggcaatactccaacaaggccgcgcctggcggctcaaacgcttgtcattggcggagcaaggggcatgccatggcaaaaacccaataaaaccaggccttggcacatcgacgcgggttccgcgcacccggcaagaactgccgttggcggcaggaatttccggcttccagccgccgtccgctcgcattgcccgccacgcctgcgcgtgttaggcgggatcacccgtcgccccctgaagtcttccggaactgcgctatgactcagccattcaccccgcgtcccctcatcatcgctccgtcgatcctggcgtcggatttctcaaagctcggcgaggaggtccgcgccgtcgaccaggccggcgccgactggatccatctcgacgtgatggacggacactttgtgccgaacatttcctacggccctgatgtcatcaaggcgatgcggccgcacaccaagaaggtgttcgacgcgcatctgatgatctcgccctgcgacccctatctcgaggccttcgccaaggcgggctgcgaccacatcaccgtgcatgccgaggcgggcccgcatctgcatcgctcgctgcaggcgatccgcgcgctcggcaagaaggccggtgtctcgatcaatccggcgacgccggcgagcgcgatcgaatatgtgctcgacctgatcgacctcgtgcttgtcatgtcggtcaatcccggcttcggcggccaggccttcatccgctcggcgatcggcaagatctctgacgtcagggcgatggtcgcgggccgcccgatcgacatcgaggtcgatggcggcgtggcgcccgacgtcgcgggccagctcgccgccgccggcgccaatgccttcgtcgcgggctccgcggtgttcaagggcggcacgctcgaggcctacaagaccaacatcgccgcgatccgccacgccgcggccgaggcgcgcggcgaagcgatttagaacaaagcggggggcgtcggcgcggcatccgccgcggcgtcgcccgtatccatcgcggccaaccgcgacggccgcaccacggtcacggtgcacggcgcttccccggcgacctgggcagacacgctgccgagcagcgcgcgccgcatcgaggactgccgcgcgccgacgatgatgtggtcgaccagattgaccgcggcgaattccaggatggcggcggccggatcgatcgcctccaggacatgcacggtcagccgcccctcctcgagccggaacgggcgtgcccaatgctggagcgccaccaggcggtcgacatgcttgttctggccctgctcgtcgtggctgcggtcgatcgcgaggcgattgagctttaacacattcacgcaggcgagccgcgccgacggcgaggtcgacaacacctgctcggcggtgacgcggatggtctcgttcagcgcctcggtaccctcgccgagatcgagcgcaacggcaacgatcgggctcgatgcgagctgcaccgcgacgttggacttcggctgcggcggcgccgcgccgagattgaaacggcggcgccagaccgtactcagcgggtcgcgtttgagccgctgcgcccgagccgtcagcttgacctgctctggatggccgagatcgaacgcgagctgcgccgcagtcgggtagcgcgcggccgggtcgatctccagacagcgcagcacgatctcctgcagccagggcggatagtcgggcttgagctcgcgcggcggagtgggatcgcgccacagccgccggcgcatgccgcgcaggctctcggtctcgccgaacgggcggacgccggtggtgaagaaatagagcagcacgccgagcgaaaacaggtcgctgcgcggatcgtcgcggacgccgagcaggcgctccggcgccatgtagggcgcggtgccgtaaggcagccgaaactcctcctgcagcagatcgggcagatgctggtgatgcgagaggccgaaatcaatcagcaccgcctcgccgcgctcgcggaacatgatgctgctcggcttgatgtcgtgatggatgacgttctgccggtgcaggctggcgagcgcggcggcgaccttgccgccgatcacccgcacctcgtcgtacggcaacggcagcgcgtcgagccgcttgtagagcgtttggccggggatgcgctccatcaccacataggcctggcgttcgaaatcgccggtcccgaagcaggccggcacgtgcggccccgacagccgcggcaggatcatctgctccatctcgaagctgacgatcgcggccggatcctcgccttccgaggtgagcggtaccttcatcagcagcggcacgttgatgcccggatgggtgaccgtccacagcgtcgccatgccgccacggtgcacgcgctcgccgatggtgaagccatctatctcggcgccgggctgcatcgtcagcgccgccatgtcggtcacctgccgatcgacaagcggtcggcgagccagagcggcaggccattcgccttgatgcgtgccgcggcggtcgcgacgtcgtagggcacgcgatgataggtgatctcgcggcttgccgtgtcgaacatcgcaaacgacgccgccggatcgccgtcgcgcggctggccgaccgagccgagcaccgcaagccagcgccgcccggtcagaagctgtacgggcacgcccgaggtcggaacgaagctcgtcatcttcgccgtcgaggacatcgagtagaggccgggacgatggatgtggccgcagaaggtgatctgcaattcggttgccatcatgctgcgcgcggcatccgacgtgtcgcggacatagcgccatttcgcggggtcggaggcctcggaatgcacgtagagccggttgtcctccgcgcgtaggatcggcaggccggcgaggaaggccttctgctcggcgctgagccgattgcgagtccagtcgatggcggcctgcgcatcggcattcatgctgtcgctgggctcgccgatcgcattgtcatgattaccgcgcaccgcaatcccgccgttggcgacgaggtccatcgccgtgtcgacggcccattcgggatcggcgccgtaaccgacgatatcgccgaggcagatcagccgctccgcgccgcgcgcacgcgcggcatccaggcaggcggcgaaggcctgccggttggcatggatatccgcaagcagtgcaagccgcatcgtggtccgcagaatgatcgagaaaagcacgactgatcttgacggatatcaagcacacgcggccccggcctcgcaatcggccggaggcatcaggtcgtcagaggatgttggaagaaagcaggctagtgcttgcacacccgcacgccgcgcagcagcagggcgatcagggcatcgatccgtgacgggcattccggcttggcccattcctcggcatgcgccgggtgatggtagcggacggtcgcgtcgaacacggcgcgcgccgtcgtcttgacgtcgtccatctcgaacacaccctgcgcgacgccgtcggacaggattttcgcgatcaggtcgacctgcttgtccttgtaggcttccaccacctcgcgcgcgccctgcgccagcgcaaggtaggtcgcgaacatctccggatcgtcgcagaccttcttctgcttgatcgagaaggcggtgcgcagccatttctccagccgttccggcgccgggccgtcgccggctgcgagcttgcagagcggctcgttggcgcggtccagccagcgtttggcgaccgcgtcgcgcagcgaggccttgctggggaaatggcggtagacgctgccgtggctgacatccagcgcacgggccacgtcgacaacggtggccttggtcaacccgtagcgtctcaagacatcctcagttgcctcgagaatccgctcgggtgtcaaaaccaccgcctcgttcatgcgtttaccgtctggttatcgctgtcctgcccgcgggtgaacttggcggcctgggcagccaaatggcgggcgacgcgaaggttgagccactgttgaatctgggcggtcaattgaaagatttctatcgtcatggaggtagtccttcgaggtggtcaaattaagtacggcttccccggccaaacgccggaacagccactgggcgccctcctcccttgggctggattgtgtatacaccgtctcgctgacagatttcaatatctgtcagcgagacggtgtgagatgacagccatgcacggagcgcggccttgctggaaaatgccggtcgggatctggcggcagaatcgaaaggggccgcttcacgcagcggcccctttgccgggaaaatggcttcgggataaaatctagccccggttagcccaaagtctacacggttcaggcaattgaggaattccggatgactactgtccgctccgctgactgattattggcgatccctacttttgtgccatcgcccggccggcccgcgtcgccctatcgctgctcgtccttgggtggcatccggggcggcggcagcggggtgaaaaccgatccctgcgcgcccgccggcggggccacgaacgtccctgtcgtggaatcgccgcccgtggtctccacaatcgtcttcggcgtgatgtactccctgacgaagtccatgatggtcccgtcaccgccgccgaaatccgccgcccgcccgccctgcggatgcccggccttgatctcgttgtcggcggtgtgggtctgctcggccagggcgtcgctgtagggaatgcggaaggcgcgcggcaccgcgctcgggcggttgtcctcgtcgagctcctcgacccacagatagatcgagcctggatcgccctccagcgagtgcggctccacgatccgcgtcgagagcagcttgaagttcgccggcagcttctccgcggaggcccagccgagcaggccgcgcatgccgccgaagctgacgaagtagaaggcgctggtcacgacgatgacgacggccttcagcgaccagtgcagccgcgcatagaccagcacgatcaagagcagcgcgccgaccaccgcgtaggcgaccgcaagcgtgaggatgactgattgcaggctaatcacgacggagcaccctcacgccggatctcgggacccccgtgttcggatcgagatcggcaccgttgcgccagctgctgcggaaagtctcgagcagcgatttcggccgccggtcgacgttgatcaccttgccctcggcatcgagacgaaatcgcaccgcggtcttctcgtcgccggtgtggtcgacggtcagcttgtcgtcgaagatcacctgcgccgtcggattgagcttctgcaccttgacattggcctgcaccggctcgcctgtcgtggcctggaaatgcgagacgttgacggtgtattcgccggcgacgacgccgcgcagggtgacgatctcctcgcggattggcgaagcgatcttcttgccgttgaccacgatgaagtcgttggcgccgccgcgatcgtcgcgatcgagcgtcaggaagccggcctcgcgatgccggtaccaggcgatgttgccggccgggtcctgcacgaacaggtcgagatcgtcgggatggttgtccggccagtccatcgtgatgatgaactccgccttggattcgatcttgccgtccttggagtccggcgacaccgcgagcagcgcgaggaagaacaggaaggcgatcacctgcagcgccttgaacagcatgacaccgagcggatcaaacggctcctcgcgcggatagagcccgaactcgtccatcatggcggcgtaccaaggcgacgttcgagagcgggcgtgacgtgcgtctcggtcagcacgacggcatcggagaacacccgctgggtcgcggaatccagcatgtagtactggatccggaccaggatcgacccgatcaacccggccagcgtcgtgtacatcgcaaccgccatgccgtcgctcatcagccccatcgaggatttcatcgcgaccttgtcggcggcatcgagcgaggcgatcggcgccagcatgatgatgaagccgatgatggtgccgagcaggccgagcttcatcagcgtgtcggagacgaaggcgccgaagccgttcgacccgcgcaagcgatccgccagcgtccgcagcagcagggtctggtcgatgcggcctttggcttgcgcgtcggccttctgaaccaggctcttgatgtgatcggtgacgaggccaccgggcaagccgcgcgcatccggtacaagaaccttggcgccgtcaggcgcggcgaggatcgtgcggcaggaccgcgccacctcgccttcccgcgcgatcgcccgcgtccgccagaagcaatggacgcaggtgacgacgtagagcaccgcgatgacgctggaaatgtaggtgcggtcggaactgaccatcaggcggatcagcccgtagcgccacagcaggaaggcggcgaacaccgaaagaccggtgaagatcatccagagcagcagcacgctgcgctccgccgcatccgtgccggccgaagcggccgcggcgccgaccttggcattcatgctgcgctcgctccctgtggcggttgttccatgaggctccgggagggcctcgccttcggttagagcagagccggcgggcgtcgtccaaagacatctgcccaggtttggtcgggcaaatttcccgacctgcatcgctgcgcatgcttgtccttgccgggaatggggttgctgttaggcttcgcgccgctcttttgagcgcgatctccgcgcaagcgcgtgccgcgtttatcgcgagggatcatgctccggccgtggagtgatcatatgcgcctcgtgcttcaactggtcgcccgcctgctcgtcatcgtcgcgctgtgccttggcgccgccaccgtctgggccacgatcgatgcctatcgcagcgtcgatcgcgccacgtcggcgtccgccgagcgagtttcgcaggcactggaggcgctgtactggcgcgaattgctgctgcgcagcaaccggatgcgggaacagctgctgccggcgccggactggcgcaccatcgaaaccatgggcctgatcgcacccgggatctgcgtgcagttcgaaccggccggcgccttcgagaggccgctctgcggccagagcaaggggatcggccaggcgccgccgcgctggttcgcggccacggtgcaggcggtgctcggcgatcacgccaccgtcgagcggccgatcagcgcccgcgccacgaccgcgggagccgtccgcgccatcgccgatccggaggccgcgaccgcgctcgcctggcggcacatcctggacaacatccatgtcgcgctgctgatggcgctcgccatcgcgctgctcgcgtcgctcgcgatcgcgcatacgctggcgcccgcccactcgatcgtgtcggcgctgcggcgcatggccgacggcgagtatcgtacgccgctgccgcgcatccgatcgatggagctcgcgatgatcggacgcgccgtcggcgatctcggcgatcgcctggcgcaggccgaggaggagcgcacgctgctgacccggcggctgctcgaaatccgcagcgacgagcgtcgcgcgctggcccgtgagctgcatgacgagttcggccagaatctcaccgcgatcctggccttcgccaccacgatcgaggcgagcgccggcgacgaatacgccgccggcactgaaatcgcgcaggacgcgcggatgatctcgcaggccacgcgccgcatcatcgcctgcctgcgtgacacgttgaaccggttgcgccatccgccggccgaggagctcgggctggaggcaagcctggtcgccctcgtcgacagctggcggtcgcgcgcgacgcagccgcagatccagctcgatctgcagggcgacctcgccgacatcagcggcacggtcgcggtcactgcctatcgcgtcgcgcaggaatgcctgaccaacgcgctgcgccacagctcggcgcgcgagatcgtgctgcggatcgaacggcgcagcggaactgaaaacgcgctgctggtgcgggtcgaggatgacggcggcggcgatgccgccaaggtggcgcagtcggcgggcttcggcctcaccggcgtcagcgagcgcgtcgcagcactcggcggttcgctgtcgatcgcgcgcgccagccgcggcctctccgtcgccgccacgatcccgctcgccgcctgagatgacgaccgcgaaaaccaccgcaaccctccggggcatctcgatcctgctggtggacgatcatcccgtggtccgccagggctaccggcgcgtgctcgagcatcaggacgatttccgcgtggtcgccgaggccgacaacgccgccaacgcctaccgtgcgttcaagtcgcacggccccgatgtggtggtgatggacatctcgatgcccggcgcgagcggcctggaggcaatccgcaacatccgcgcgcgcgatgccgacgcccgcatcctggtcttcagcatgcacagcgaggccgcccaggtgaaggcggcattcggcgccggcgcctccggcttcgtcaccaagggcagcgagccggccgagctgatcgcggcgatccgctcggtggcgcgcggcgagcacgcgatgagcgacgacgtcgcgcgggtgctcgcgctggagagcctggtgccgaccagatcggcgctcgaccagctcggcgagcgggagatcgagatcctgcggcagttcgcggccggcagcaccaaggagcagatcgccgccaacctcaacctcagcaccaaaaccgtgcagaactaccattatctgatcaaggccaagaccgggatgcggaccgacgcccagctggtccgcctcgccgtcgaatgcggcctggcgaacctctaactgctccctctccccgttcttgctatctccgcgaagacgttgacagccgaatttcgcggaggcccctctcaccccgagcgcatccggcgatgcgttccggcctctcgccgcaagcggggcgaggcgaaacaaggcctcggatatcgctgcgccaatccgggctaccaaccgccggtttcggccggttttccccgccaaatgccccgaaaaggtggcttcggccgacccgatttgctaaagcgcagcgtaaaatcggatcggccggagcgcgttttgcgcgccccgccccgtccgattcggagttctcgatgatcccccgctatgcccgcccggaaatggcctccatctgggagccgcaaacgcgtttcaagatctggttcgagatcgaggcgcatgccgccgacgcgctggccgagctcggcgtgatccccaaggaagccgccaagacgatctgggccaagggcaaggacgccaccttcgatgtggcgcgaatcgacgagatcgagcgcgagaccaagcacgacgtcatcgccttcctgacccacctcgcggagatcgtcggccccgaggcgcgcttcgtgcaccagggcatgacctcctccgacgtgctcgacacctgcctcaatgtccagctcaagcgcgccgccgacctgctgatcgccgatctcgaccgggtgctggcggcgctgaagacccgcgccttcgagcacaagatgacgccgaccatcggccgctcgcacggcatccatgccgagccggtcaccttcggcctcaagctcgcctatgcccatgccgagttcgcccgcgcccgcgcccggctggtcgccgcgcgcgacgagatttcgacctgcgcgatttcgggcgcggtcggcacctttgcgcagatcgatccgcgggtcgaagagcacgttgcgaaagcgatggggctgcggccggagccagtctcgacccaagtgatcccgcgcgaccgccacgcgatgtattttgccacgctcggcgtgatcgccgcgtcggtcgaacggctcgcggtggaggtgcgccatctgcagcgcaccgaggtgctggaagccgaggagttcttctccgagggccagaagggctcgtcggcaatgccgcacaagcgcaatccggtgctgtcggaaaatctctccggcctgtcgcgcatggtgcgcgcctatgtgacgccggcactggagaacgtcccgctgtggcatgagcgcgacatctcgcactcctcggccgagcgcatgatgggccccgatgccaccgtcacgctcgacttcgcgctggtccggctcgccggcctgatcgagaagctgctggtctatccgcagaacatgcagaagaacctcgaccggctcggcggcctggtgcactcgcagcgcgtgctgatcgcgctgacccagaagggcgccagccgcgaggacgcctacaaattcgtgcagcgcaacgcgatgccggtgtggcgtggcgaaggcgacttccagacgctgctgaagaacgaccccgacgtgacgaaatacatgaccgatgccgagatcgaggagaagttcgaccttggctatcacctcaagcacgtcgacacaattttcaagcgggtgttcggcgaggcctgagcgaggccgccattcccgcgtgacatcgcagcgggttgcgctacgctgacccgtcttacaaagcccacaagaaacggaccctccccatgcccatcgtcaatcgcgttgccgccctctcggatgaaatggccgcctggcgccatgacttccatgagaaccctgaattgctctatgaggtgcaccgcaccgccggcatcgtcgccgacaaactgcgcgagttcggctgcgacgaggtggtgacggggatcgggcgcaccggcgtggtcggcgtgatccgcggccgcaagaacggctcgggcaagaccatcgggctgcgcgccgacatggacgcgctgccgatcgtggaggcggccgacgtgccctacgcctcgaaggtccccggcaagatgcacgcctgcggccatgacggccacaccgcgatgctgctcggcgctgcgaaatacctcaccgagacgcgcaatttcgacggcaccgcggtggtgatcttccagcctgccgaagaaggcggcgccggcggcaaggcgatggtcgacgacgggctgatgacccgctggggcatccaggaggtctacggcctgcacaacatgcccggcctgcccgagggctatttcgcgaccacgcccggcccgatgctggcctcgtccgacaccctgaagatcgtcgtccgcggcaagggcggccacgccggcgccgcgccgcacgaggcgatcgacagcgtcctgatcggcgcccagatcatcaatgcgctgcaatcgatcgtgtcacgcaatctcgacccgctcaaatcggccgtcatctcgatcacgatgttcgaggccggcagcgcgttcaacgtgatcccggagaccgtcacgctgggcggcaccgtgcgcacgctggaccccggcgtgcgcgacatggtcgagcgccggatcggcgaggtcgcctccagcatcgccaaggcttatggcggatcggccgagacggattatggacggatgtatccggtcacgctgaaccatgcgcatcaggccggcatcgccgccgagatcgcccgcgacgtggtcggcgccgaccgcgtcaacgacaatctggtgccggtgatgggcgccgaggatttcgccttcatgctggaagcgcgccccggcgccttcgtcttcctcggcatgggcgacggcccgatgtgccaccacccggcctacaagttcaacgacaacatcctcggccacggcgcgtcctattgggtgcgcctggtcgagaagcagatgccggcgggctagcaccgcccgcgcaaccgatgaacgacgaatggcccggccgcgatccatcgcggccgggccattcacatcacgaacgcggctgctgttgcgtggtgcagtgaatgccgccgccgccggcggcgatgccgtcgatgttgagctggatgatttcccggtccgcaaacagctcccgcaggatgtcgcgcgcattgcggtcggcggccgcatcgccgaattccggcgcgatcacggcgccgttgcagacgtagaagttgatgtatccggcagcgaagtccttcgtaccgtgcttggggcgcaccgtcgacgggccctgcaacaccacgacgtcgagatgccggcccttcgcgtcgaccgcgccgcgcagcagatcgaggtgccgcctggtcaccgcgtgatcgaacgacgacggatccggctcgaggccggccacgacgacgcctggaccggcaaatcgtgcgtagaagtcggtatgtccgtcggtgatgtccttgccggcgatccctggcagccagatgatcttgtccaacccgagcaggcgcgacagttcggcctcgcatttctccttggagacaccggaattgcgattggggttgagcacgcagctttcggtgacgatcgcggtcccctcaccgtcgacttcgatgccgccgccttccagcaccaggccggccttgacgaacgtcgcgttcgcggcacgggcgacgtattccgcgacctcggcatcgagcgcgtggcgctgcttgttgccccagccgttgaagttgaaaccgatcgcgccaagctgcccggacgggtccctcacgaacaccggtccggtgtcacgcatccacacgtcatcgaccggtcgaatgacgaggctgaccgaggggccgcagagccgcgcggcaatctcgcggtcctcctcgcgcaccagcatgttgacgcgctcgtaggccgcaatcgccttggcgatgccggcgagattttcccgcgccgccggaagcagcttgccgccccagatcgcggcgctggcgccgaacgccatccaggtcgcggcatgcggcgcgccctcatccggcatccgccaatttgcattgtcccgtgcaaggtcgtccacgagcgtaccggccgcgatggccctcccggcttgaccgccagattagccccgtcgccaacccgacgccacgatctgacggtgatccgctcgccctggggctggccgcccaagtcgcttggtgaggcgcctaaagcgcgatgagattgggttgaatcgtcatcgcgcttcagctctttgtttgagcatgattttttcggaaaaccgcttcgcacttttccggatcatgctttagcgagcggggtcggcctcacccgccccgatcatgcgagcggcgacgcggtcgcgcttgacgaaatgatggaaggcgactgcgccgagatgcagcacgatcagtgcgagcagcacataggcgaagaagatgtggcgtccctcataggcatccgccgccgccttgtccggcgaggtgatctggggaacgtggaacaggccgaagaagctcgaatagtcctgcgcacgggatccggaatgcgcccagcccagcatcgccaccaggatggtgacggcatagagtgcgccgtggttgacccgggcggcgatcctttgccaggagggcatgtcggccggcagcgccggcgtcggattgactccgcgccacaccagcctgagcaccgtgagcagcagcaccagatagccgatgtcggcatggatcgaccggtagaagaacttgtccgcccgcgccgggatgtggttcatccaccagccataggccagcatgccgatgatggtgacgcccagcacccagtgaaacgcgcgggcgagcgagccccagcttgccgtcgtattgcggatcatggtcgaatgccccgttaggatttcgcacgtcgcagcaatagtttgccgagatacttgcagggatcggtcaaggccatatgaaattcccgccttcaccgccttttgtcggccgcagacgctagatagccaaaaacaactgaatggtaaccctggttcggatagaatttccgcgtgtccaatcccccgaccatccttgtgttcgattccggcctcggcggcctcaccgtgctgcgcgagatcgtccgggcccggcccgacgcgcacttcgtctatgtcgccgacgacgcgttcttcccctatggccaccatggcgaagacgagatcatcgcccgcgtggtgccgctggtcggcgagctgatcgaggcccatgcccccgacctcgtcgtgatcgcctgcaatacggcatcgacgctcgtgatgtcgcatctgcgcgacgcctatcctttgcccttcgtcggcacggtgccggcgatcaagccggcctgcgcctcgtcgaagacacggcgcgtctcggtgctcggcaccaggggcaccgtgaagcgggaatatacccgcaagctgatttccgatttcgcgcagggttgcgaggtcaccctggtcggctccggcgaactcgcctctctggcggaagcggccctcagcgggaaggccgtgcgcgacgaggacatcgcggccgagctcgcgccctgcttcgtcggcgatggcgctgacgacccggcccgcaccgacaccgtggtgctggcctgcacgcattatccgctgctactggagcgcctgacgcggctcgcgccctggccggtcgactggatcgatccggcgccggcgatcgcccgccgggtcgccgacctgctcggcccggcaggcggggagagcgacgaagccggcgccgagatgatcttcacctcgaaccgcccgcatgccctgaccgcggcgctgacgccgttcttcggcggccgcgtcccggcctgatcctttccgtcgccacaacgcgctgctagtttgccctcgcctcaccgagggagccctgcattgacctcagcaccgctgacgccgctcaatcgcctgcgcaaggcgtggcgcgacaagcgcccgaccttcggcgcgatcgcgaccattccgagcatccagaccgtgcagatcatggcgcagtcgctggactggatcatcgtcgatctcgagcacggcccgatcgatctcggcaccgcgcatgcgatgatcgtggcgacctcgggaacgccatgcgtgccgatggtgcggatatcagccaacgagccgcaccttgccaaggcgccgatggacatcggagcgctcggcatcaactttccgatgatctgcaaccgcgccgacgccgagaaagccgtgcgcagcgtgcgctatccaccaaacggcgaccggctgtggggtccgttccatgcaccgttccgctggggcgtctcgatgaacgattacatggcgaccgccgacgacgacatgatctgcatgatcacgatcgagcatgtcgatgccgtgaatcgcatcgacgagatcatggcaacctccggcatcgacctcgcggtgatcggccccggcgatctcgccacctcgatcaacaagcgcgggctgcccgacgatcccgaagtgatcgcgctgatgcagcgtgccgaggaaggcatcatgaggagcggcgtgccgatcggcggcgtcgcccgcaccgccgagcaggccaacgcgatgatcgaccgcggctacctcgcgctcgcactcggcttcgactggtcgctattccagcgcggcatcgccgccgcgttcgccgggatcaggcggtaggcgcgatggcgagcaagttccagccctgtcatgacggaaccccagcaccgccccagcgcggctgcgatgagccgccgcgcctgcacgccgcaattgcctgaacagcaggtaagcccactgtaagcttggccgcggataattccatgacggccagcacgaccggatgaacggactaatcccattgtcgaaagcgtacatcacacaacgcctgcttttcgccgcgattccacgctgctagagtttcgcgggttgggaggaaattgcatgttcaggaatttgctgctgggtctcaccgtgattgcgtttgccggcgccggcgctggttttgttggtgctggcgctgccttggcgcagcagagcggcatcaagcgaacgccgctgcagaaggtcgattttccggcgggctacaacacggtcacagcgattgcagaggttccggcagggggtgcgtcggggcgtcacagccatccgggtgctgaaaccggctatgtgctcgaaggcgagctggagcttgtgatcgacggcaagccgccgctgaagctgaaggcgggcgattcctaccagattccggaaggtgcggtgcacgatgccaggacttccggcgacaagccgctcaaggtgctcggggtctacgtggtcaaggccggcgagcccttggccaaaccggcgccatgagcagaaaccgattggcctccggccaattggttcatgtcagcttcaggtacggcgagcaaagcctgagttctccgggcctttgattttttgcctgattgcagggaaatgaaccgaacaaatgcgcggtgaatttcgtcggatctcattgccgcgccgtctcgtcgctgatctgatgcacgcgtcggccggcgtgccgttcgtctccctgacgcgctcgttgaacgtccgtgcagtggtcgaggcccgcgcacgcggggcacaggcaccaggctgggccgcgatcttcgtcaaggcattcgcgctggtcgccaggaccgagccaacgctgcgaacgctgcacgtcaaatggccgtggccctgcctctacgagttgccgtgcagcgtcggcatggtggccgttgcgcgcgtcgagaagggtgaggactgcgtgctgttcgagcgcgtccgcggcgccgaccagatgacgctcaccgctgtcgacgcgctgatccggcgcgccaagaccgcgccgctgcacgagattccctcgttccgcaaaaccctctgtgtgacgcggctgccaattccgctgcgccgcctggcatgggcgatcgggatgaacttcggccggcagcgcgccaatttctgcggcagctacggcgtgacctcggtcgccgcctacggcccgggcgagctgcacgcgttgagccccggcccgttcctgctgagctacggcgtggtcaagccggacgacaccatcgatgtggtgctgcgctgggaccatctggtctgcgacgccgccctgatcgcccagaccctgacccggctcgagcaggtgcttggcggcgaaattgccgcggagctggatgcgatcccgccgctcaacgaggccgaccggctagggcagccgcaaaccgcccctaaagggcaaaaactgccaaattttgcgccgattcggccccaaatagccggtgtttcgtttgacaggaccggactttctccttaagaccacccttgctcgcgggccggtttcggcccgcgatgcgtttcgcgacccgtggttctccccgagctttcgaggcggacctgtcggtacaggcctttaggcaggtacacaggagggcgcgtctcctcaaaccctggactgacaaaacgccggacgccagacagcgacggctatacaaagaggacgcgatgacaaagcgcagtgaggcgaagtacaagatcgatcgccgcatgggccagaacatctggggccgcccgaagagccccgtgaaccgccgcgaatacggccccggccagcacggccagcgccgcaagggcaagctctccgacttcggtgtgcagctgcgcgccaagcagaagctcaagggctactacgccaacatttccgagcgtcagttccacggcatctatgtcgaggccagccgcctgaagggcgataccggcgagaacctgatcggcctgctcgagcgccgtctcgacaccgtggtgtatcgcgccaagttcgtctccacgatgttcgccgcgcgccagttcatcaaccacggccacatcaaggtgaacggccgcaaggtcaacatcggcagctacaagctgaaggtcggcgacgtcgtcgaggtcaaggaatcctccaagcagctcaccccggtgctggaagcaagccagctccccgagcgcgacgtgcccgacttcatcgaagtcgatcactccaagatgaccgcgaagtacgcgcgcacccccggcctctcggacgtgccgttcccggtgcagatggagccgcacctgatcgtcgagttctattcgcgctgatcagttcagcattgcgagttcggaaaggccccggttttgccggggcctttttgtttggctaaagtcagggcaaatcgaccgagagaaacatcatgcactacacccctgccccgcccgatccgaaggcgcccgccgtgcgcatcaacctgctgtcggacacccagaccagaccgacgccggcgatgcgcgaggcgatggcgaaggctgaggtcggcgacgagcaggtcggcgacgatccgaccaccaatgagctctgcgcccgcgtcgccgatctgcttggcaaggaagccgccgtgttcatgccgtcgggcacgatgtgcaatgtcgctgcgacgctggcctattgccggccgggcgacgagatcctggcgcacgccaccgcgcatatcatcgcgcgcgagggcggcgcgcatgccgcgctcggcggcttccagatcacccagcttgcgggcgacgatggccagttcacgccggacaccttccgggccgcgctgcatccgcgtacccgttaccagccgccgcaggtgctggtcagcgtcgagcagaccgccaatatcggcggcggcacgatctggaagaaggccgcgctggatgaggtcgttggcatcgccaaggcccatgggctcgtgacccacatggacggcgcgcggctgttgaacgcgaccgtcgcctccggcatctctccgcgcgacatgacggcgggctgggattcggcctggatcgacttctccaagggcctcggcgcgccgatcggcggcgtcatcgccggcaccagagcgttcatcgacgacgtctggcgctggaagcagcggctcggcggctcgatgcggcagtccggcgtctgtgccgccgcctgcatccacgcgctcgatcatcatgtcgaccgccttgccgacgaccacgccaatgcgcgggcgctggcacgcgggctgtcgcagatcaacggcatcgcggtgcagacgcccgagaccaacctcgtcttcttcaagccggacggtgccggcgtatcgggcgacaagatggtcgccgagctgcgcaagcgcggcgtgatgctggcgatgatggacggccggatccgggcctgcacgcatctcgacgttacggcggagatgatcgaggaagcggtcgggcacgtccgggacatcgtccgcgcggcgtagctacggcttggcttgcggaacgcgtcgcgcaaggtgatccctaccgtcctggtggaagatcaactgcgtcgctgcagcttcgccgtcaccatcgaacgatagcaccgcatcaaccaccttgaagaagaaggtgcgatcgctctcggggaagagctcgcgacgctcctcccccgtcgcgtggctgaacaggcgattgccctccctggcgacgcggatcgcaaactgcggcgtgaactgataggtcccgaccaggcgatccagcgcctgcgggtccgctgcgatgactgtcttgatcctggcctggcgatcaggccagcggtactcatccgcgatgctgcgcaggatctcgcccaccaggatctgtccaccccagctattcgtcatcacgaccgcgccatcaccgttctcgaagatcaccatcgtgttgacgaagccgtggttgacgccgttgtgccagaactgccgttgaggcgcggtgccgcgaaccagccagcccaatccatatcgtccgagccccggcggaagcccctcggcgctgccgagaacgggcgagagcatctccacagtcgtcgattgcgagagcacggaatagcggcggcccgtcagcccatccagcgtggcgagcaagcaatgagcgagatcggtcggcgtcgtccatagtccggcagcggcaagttccggatggatgcgggggccgccgggcaccggcgcgccgtccgagcggtagggcgttgcggccatcggcaagcgatccgcggacaatggttgcgcgaaactggaatgcgtcatcccgaacggcctgagaacgacatcgtcaagcaacgccggaaacggccgccccgtcacgtcgaccagcaactgctcgatgatcgcgtagccgccgccggaatattgcgtctgcttgcccggctcgtgctcgaccaaaaccggcgcgctgttcgcaggccgcgcgccattgaggacctcggcaagggacggcaccggttcgccggccgggtagccctcaaagccctgaacagtcgtgccggccgaatgactgagcagcccgcgcagcgtgaccctggattggcggctgaacggatggtcaggaattttccagcccttgagcgcgagattgacgtcggcatccagatcgagcttcccggcctgcgccaatgccaacgccgcgacggccgtcaccggcttgctgatcgagccggcctggaacagcgtttccggcaccacgggcgggccaccgatggcggtgaggccaaagccgcgcgcccattcgatgacgccgccgctgatgaccgcgatgctgacacccgggacgcggagttcgcccatccgctcggacaggctcatcggcgcatcgccatcgacgatgacggcggtcctcagccccatcgtgacccgttcgatgcgcgctgcgacatcgctttgactgttcgaaccgccggcagaaccggtttgcgaggaagcggcgtcgtcatggccaccgcctcgcgccattcctaccgccccatcgcctggtagatcagcgtcttcagttcctgctggatccggccgcgctgcgacggcgtctgcaccatgaaaattccaaacagatcgtcggcgggatcgatgaagaagaacgtaccgccgacgccgtcccagcggtattcgcccagcggccagttcgtgttcgccggcaccgaagtgcggacggcgaagccgaggccgaagcccgaattcggaccgggataatagttcttgtcgcgggcgacgccggtctcggggccgatatggtccgacgccatcagtgcgatggtctccgccttcaggtagcgccggccttcatagacgccgccgttcaacaacatctgcgcaaagcgtgcgtaatcgctgacggtaccgaccatcccgccgccgccggatcgccatttcagcggcttcctgggatcgcgcacctgtgtggtcgggctgatcgcgcgatcattgggcatcggctcggcgatcagcggccacttggcgggatcggcgacatagaacgcggtctcgtccatgccgagcggctcgagtagccgctccctctcgaactggagcagggattttcccgtgatcacttcgatgacgcggcccagcacgtcggtggaatgaccgtagtcccatctcgtcccgggctgttcggcgagcggcagcgcggtaagcttcgccacgaactcggcattggagatgtcgctcttgaacaggtcggcatcggcataggccttgttcaccagcccaccgccatagtagccgtagggcagcccggaagtgtggcgcatcaggtcttcgatcgtcaccgcgcgcttgagcggctccagtgtgagcgccggcttgccatcttctccgtgcgtcttcactccgaccttcatatccgcaaaggcaggaatgtatttcgagaccggatcgctgagcgccagcttgccctcctccaccagcatcatcgcgacgacggtcgtgatcggcttcgacatcgaatagaggcggaagatggtatccgcgctcatcgacagctcggtggtggggtcgcgaaccccgaaattctcgtagtagaccggcttgccgtgctgttgcagcagcaggatcgcgccgggaatcttcccgttcgcgatctcgttcctgacatagtcggagaccttggcgaggccctccggagagaatctgtgcgcggccaaccccggggagccggccttcgcatcggttgcgacgaacgcgagcacgagcgccgcgacgacagcgcggcatctacgcatgagagagcatgatccgatcggattgcatcggatcatgctctcattccttgtttttgacgcgttatcttcacgcgaaccggcatccacttcgctcgaaaacgctctagttttccatggcttcgtagacgagctgcttcaacgtccgctggatgcgctggcgctcggtcggcgtctgctccagcaggacgaagaagaagtcctgcttgcggtcgatgatgtagtagcagccgctggcgccgtcccatttcagctcgccgagatcgccgggcggcggcggcttcgccgtacccggatcggtgcgcaccgcgatccccagtccgaagccgaagccgtcgccggggaagtagaagaagtctcgctcgacgccggagccgggcccgacacggtcggtcatcagttccttgaacgtctcgggcttcatgatggtcttgccgtcgagggtgccgccattgagcagcatctgcgcgaagcgcgaatagtccgccatggtcgagaccatgccgccagaggcggactcccatttcttgaccgtggtcggatcgttgatccggccgaccctgaagtcgctgtcgttcggcatcggctcggccatcagcttctgcttctcgggatcggtgacgaagaagccggtgtccttcatcccgagcgggccgagcagcctttcctgctcgatggtcgagagcttctcgccggtggccacctccatcacgcgcgccaggatgtcggtggaatggccatattgccagagcgcgccgggctggttgtgcagcggcagcttggcgatccgctcggcgaattcagcgagatcgaaatcgccgccgtagatgttggcctccttgtaggccttgcggaccaggctgtcgccgtagaagccgtaggtgatacccgacgtatgcgtcatcagatcgaggatcgtgatcggccgcctgggcggcaccagctcgagcgtcttggtgccgtcctcggccttcttctcgacgccgaccttcacattggcaaaggacgggatgtatttcgagacggggtcgtcgagcttgtatttcccctcctccagcagctgcatcgacactacggcggtgatcgacttggacatcgacgccagccggaagatggtctggtcggtgatcggcaccttgctgaccacgtcctgcacgccgaaggcctcgtgatagaccggcttgccgtgctgctggatcaggacgacggcgccgggaatcttgccggtcgcgacctcgttcttgaagaactcgctgatcctggcaagcttgtcggggttgaaatgcgcacccgccggaatctcataggtgccctcggtgtgcgagaatgccggcgccgttagcacgaccgccacggctgcggccgcgcatgtcaaacgaaatgaatgcattcggtctgtccctccccggatatcacggggaagtgtagcggcggtatcatcaggcacaagggctcccaaaggcgtccaggaccgcctgatgcagctcgccgcttggagccgcgaagcagcagaagatcacctgtgtgacaccgggggcggatggcagggcgtccacgaccgttcgaacggcgattgccgccgcgcgatccgcggggaaacggtagatcccggtggaaatcgcagggaaggccaccgacgcaagcccgtgctcgtcgcagagctgcatcgaacgccgatagcacgatgcaagcagagcatcctggtcgagcttcccgccattccacaccgggccaacggtatggatcacgtgcctggcgggcagccgatagcccttggtgatctttgcctggccggtcgtgcagccatgaagcatacggcattcggcgacgagatcgggtccagcggcgcgatgaatcgcgccgtcgacaccgccgccaccgagcagcgatgaattggccgcgttgacgatggcgtcaacgcgcagggtcgtgatgtcggtgacgatgacttcgagccgcgcattgccgatccggcgcgcggtcaaggtcaggcagccacgtcgaccgggatgcccttgtcggcaaacagctgctgcaattcaccggcctggaacatctcgcggatgatgtcgcaaccgccgacgaactcgcccttcacgtagagctgcggaatcgtcggccagttcgaatagaccttgatgccgttgcgcagctcggccgattcgagaacgttgaggcctttgtagccgacaccgatgtggtcgaggatctgaacgacctgaccggaaaacccgcactgcgggaattgcggcgtgcccttcatgaacagcacgacgtcgttcgacttcacttcgttgtcgatgaattgctcgatgctcattttcgcttccttgcgtaggcggcgctctcaggccttgacgggccggcccgcccttctaacccgtgactggctatatatgtagctcaaaccattgtgcatccaaagcaaaatggcggaaatccggcatgcggttggggccggacggcacccccaaaagcgccgggattatctgacggccccaatatcatcatggggggaggcttttttcccgtaacggagcccctatctaggacgaactgtccgtcaggaaccagactgccgaagcaacgttctcccctggaatcggagacccatgtgacgaaaccagcctctgccgcggccgccaattccgccgccgccccgtcaccttcctccgaatccgccccgctcgcgcagcggctggcggacgcctatcgtgcggtccgcgacgagaccgagcgccgggccgccccgctttcggcggaagaccagctgatccagtcgatgccggatgcgagccctgccaagtggcaccgcgcccataccacctggttcttcgagcagtttctgctcggagaacacgtcaagggctacacgccgttacatcctgactacgcctatctgttcaattcctattacgtcagcgccggcccccggcatgcccgccaccagcgcggccatctgacccgaccgaccgccgacgaagtcacagcctaccgccgccatgtcgacgccgaggtggtgaagttcttccggaccgcgacgcctgaaaagctcgaggcgctggtgccgctggtcgaggtcggcctcaatcacgagcagcagcatcaggagctgatggtcaccgacatcctgcatgccttcgcgcagaacccgattccgccggcctacgatccggcgtggcgcttcccggcgtcgcagcacgggccgcaggaatgggtggcgctcaacgaaggcatccacaccgtcggccatgccgacgacagcttccatttcgacaatgagaagcccgcgcatcgagccctggtcggcccggtcaagctcgccaagaatctcgtcaccaacgccgagtggctcgccttcatcaaggacggcggctattccaccgcgacgctatggctgatggacggcttcggcactgtcagcaaagagggctggcaggcgcccggccattggcgtgagatcgacggcgaatggcagatcatgacgctgggcggcctgcagccgatcgatccgcaggccccggtctgccatgtcagctattacgaggccgacgccttcgcccgctgggccggcaagcatctaccgaccgagatagaatgggaggtcgccgcccgcgccggcctgctcagcgacgcctatggcatcgtctggcaatggacccgcagctcctattcgccctatccgggctaccgcgccatcgagggcgcactcggtgagtacaacggaaaattcatggtgaatcagctcgtgctgcgggggtcgtcgctggcgacgccaccgggtcacagccgcgtcacctaccgcaacttcttctatccgcaccatcgctggcaattcacggggttacgcctcgccgactacgcctgattgattccagtcgacatcaagtgcgcgccggtaagcgcgttcaggagagtatcatgaatgtgcatgccgccgctttggccaaagcctatccgttcgacgaagcgactgctgcgtttgccggcgacgtgatcggcgatctcgcccgtcacccgaaacggctgtcgccaaaatatttctacgacgccaccggctcggagctgttcgagcagatcacggtgctgccggaatattatccgacacgcaccgaactcggcatcctcagcgaccgcggcgacgagatcgcggcgaacattccggacggcgcagcgctggtcgagttcggcgccggtgcgaccaccaaggtacgcctgctgctcgagcattgcgaattcgcagcctatgtgccggtcgatatttccggcgatttcctgaaagcccaggccgacggcctgcggaaggatttcccgggtctcggcatctatccggtcacggccgatttcaccacgccgttcgcgctgcccgaggcggtcgccgcgatgccgaaggtcggcttcttccccggatcgacgctcggcaatttcgaaccgagcgaggccttggccttcctgcgcagcgcgcgcaagatcctcggccacggcgcgcagatgatcatcggcgtcgacctcgagaaggacgagcgcgtgctgtacgacgcctacaacgatgcggccggcgtcaccgcgcgcttcaacctcaatgtgctggtgcggatcaaccgcgagctcggcggcaatttcgatctctcgggcttcacccaccgttcgatctacaaccgtgaccgccatcgcatcgagatgcacctgatcagccgcaaggcgcagaccgtgcggatcctcggcaacaccttcgcgttccgccccggtgaaagcattcacaccgagaacagctacaaatactcgatcgagcgtttcaccgcactggcgcgcagcgcgggctggacggtgcgcaacagctggaccgacgccaacacgatgttctcggtgcacgcgctgatcgcggaatagactcgggagcggaccccgccggctattcttcggccgagggatcggaccgcagcgagatcgattcccacgccgcgaccacgatcatgatcgcggtggtgacgatcgagagcatcagcggcgacatcccgccggcgaaatacgccgtgaccgccagcgcgacgatgccgacgccgtgcgagagctgcaggaagccgcggatcacgtatttgaacaggatggtcccgaccaggaacagcatggggccgccgaccgagctgatgatcgtcttcaggtcggaatggccgcctggatgcttcaacaccagctcatcggcaaccgcggtgaggatgatgccgccgacgatcggcatatgcagataggtgtaggcgatccgcgcgacacggccggattcctccgccttcgagatcatctcggagcccgcctcggcgcccttgtggaaatagatccaccacatcgcgatgctgccgaccaaagccgagatgaaggctgtgacattctccggcgtccagatcaggtcggcgaaggtcgcgccgtcgaccacgatggcctcgccgagcgcaatgatgatgaagccggcgcagcgctcggccatatggccgccttcgaccgaccaggcctcgatcgaggacgggccgagccccggggtccagaaccgcgcggcgggcgcgatatattcgattgtcagcgccgcgatccagagccacatccgcgtctcatgctcggcgaagccgcctgatatccacagcacggccgagcaagacagccaggtcaggatccggatcgcattgtggcgcaccgcggtgcggcgccgcggcgtcgccagcagccagaacgcggtgcggccgacctgcatcgcggcataggtcccggcaaaccacagcccgcggccctcgaatgcggtcgggatcgaggtcgacagcaacagcccgcccagcatcaggacgaacagcagcaggcggaccggcgtcaggtcgggattgagccagttggtgacccaggtggtgtagacccacacccaccacaccgcgaggaacagcagcgtgacctgcaccgcgccgagcggggtgaagtgatgcagcagcgtgtgcgacagctgcgtgacggcgaagacgaagacgaggtcgaagaacagctcggcattggtgacgcggctgtgctggttcggcacgatgacgcgaaacatggcgccgcgcggattttctgccattgcttgcggcccccgcctgctggccgggccttagccttccggcaccccggtttgcagcgccagggcgtgcaggacgccgcccatctggcccttcagcgattggtagacgatctggtgctgctggacgcgggacttgccgcggaatgactcggaaacgacagtggccgcataatggtcgccgtcgccggccaggtcgcggatcgtcacctcggcgtccgggatcgctgccttgatcatcgattcgatatcacgggcgtccatcggcatcccagtccacctccgtcaggtcattcgaatcagggccgatttggccaggaaaacccaagaaaacccgagtagcccgagaaaatctgcgacaacacccaaggcaaaacctggcgcctgaggtcttctaggtcatcccgggcacactatattcccattcccagcgatttaaacctgcatcaatcggtcacaagccatcacgtcgaaataaccagaagaggcgcagaatcatgaagctccccggccccgaccatcccatcacgatcacgcccaatgccaaacgcgtccgcgtcaccgccgacggcgtcgtgatcgccgagaccacccatgcgctgaccctcaaggaagcgagctatccggccgtgcaatacgtcccccggcaggacgccaacatggcgctgctcgcccgcaccgagcggaccacgcattgcccgtacaagggggatgcgagctacttcagcatcaaggcgaacggcaagacgctggacaatgcgatctggacctatgaggagcctttcccggccatgaccgagatcgccggccacctcgcattctatcccgacaaggtgaagatcgaggaagtcgcctaggttcaacgtcggcattccgggacgatgcacaagcatcgccccggactctcgggatcccccgaagcgcaatcgcgcgtcggaggtttgcttcgcgccccgaatgacggcatttgttgaagcagctttgccgctagaccctgaatatcgtgagcccaaggatcagcagcaccaggaagatcacgacgaacacatagaacagaaagcgtgcgatatcggctgaagcggctgagatacctgtgaagccgagcaagcccgcgatgatcgatacgacaaggaagaccaacgcccatttcagcagtgtcattacttgctcctcaaaggcgcgcgccccgtgcgcccgccagccttccagacaacgcccgctacaaacgccagttccaaaacgaaacagacgcgctgagatgaccgacctcgacaccacggaatcgggacgattgggccttgctgaatcgggttcccgattgcaacatcgggatgcagaccaggctgggggcaccatgaaatcgattgctcacgcggctccggccgtcgacatccaggcagcaccgaagctccacaagcgcaatgtcgcgctggaccgcgcgcgcaccttcctgacgctggtcgtgctgctgcaccatgcggtgatcccctacacccatttcgggcataccgaccccacatcgtggatcggcttcgactgcgtggtgctcgccaccgacagcttcttcatggcgatgttcttctttctgtccgggctgttcgtctggcccgggctcggccgcaagccgtggctgatcttcctgcgcgaccggctgctgcggctcggcttgccgtttgtggtctgcgccgtcaccgtaattccgatcgcctattacgcgatcgccctgcgcgcgacgccggagctgaccttctccgagttctggcgaaaaaccatgatgttcgggccatggccaagcggcccgatctggttcgtctgggtgttgatgaccttcgacctgacggcgagcctgctgtaccgggtctcgccgcatctgctcgagccgatcaaccgtctgtcgatcatgggattcgaacgtccctcgaagttctggctgttcctcgtcgtcgtcagcgccgccgcctatctgccgatgttggtccattacggccagaactactggttcgagctcgggccgttttcggtgcaggcgagccgcgtgctgctgtacgcgtcctatttcttcatcggggcgggcatcggggcggcaaacctcgagggtggcgtgctcagcgcgcatgggcgactgaccgagcggcgctggttctggaccggcgtcacgctgatcccctacgcgctgatgtgggtgatgatctacatcaagcgccagatcatcggtaaccccgatccgctgccgggctggtatcttgcggcctatggcagcttctacgtgctgttcagtgcctcgatcctgttcgcgatcctggcctacttcctgcaatcgaaagcagtggggccgacgctgctcgaccgcatgcagagcgacgcctacggcatgttcctggtgcactatccgatcgtgctgtggctgcaatactggctgttcgacatggatctgccggcgatcgcaaaggctgcgatcgcgttcttcgccacggtggcgctgagctgggccgcgacagccgtgctgcgcaagctgccgggcgccaactacgtgctgtagagatcacgcagcgatctcgcccctcgccgccacgctttcgagccgtggcgtggcggcggcgcgatggtcgcgggcgatcaggatgtagaaggtcggcagcacgaacagcgtgaacagcgtgccgatcagcatccccatcaccacgacgatgccgatcgcgaagcggctcgccgcgcctgcgccgtcggcatagagcagcggcgcgaggccggcgaccatcgcggccgtcgtcatcagtaccggccgcatgcgcacgacggccgccttctggatcgcggcaacgcggtcgagtccttcatggtgctggatctcgttggcaaagctcaccatcaggatgccgtgcttggagatcagcccaatcagcgtgacgagcccgatctgggtgtagatgttcagcgtggtgaaaccgaaatacagcggcagcagcgcgccgcagaccgcgagcggcaccgtgaccatgatgaccagcggatcgcgaaaactctcgaactgcgccgccagcaccaggaagatcacgatcagcgccatgccgaaggtgacgatcaggcggttgccctcctggacgtattgccggctgtccgacagccagtcgaccgtcatgcccggcgacagcttctgcgcctgcatgaaggacaccgcctgtcccatggtcacaccgggcttgagcaccgccgagatcgtcgccgcgttcatctgattgaactgcggcagccggttcggctccggcttgacgtcgatcttgatcaccgtcgacagcgggaacatctggcccgagctggaacgcacgttgaagtttccgagattctccggcgtgacccggtcggcctggcgcacctgcgggatcaccacgtaggagcgctcgaagaaattgaagcggttgacatagttctcgccgaccagcaccgcgagcgtatcggcgatggtctgcatgctgacgcccgcctcggccgccttggcgtgatcgatcgtgatccgcgcggtcgggctgtcgaaggcgagatcgctgtcgacgaagacgaacagcccgctcttccaggccgctcccttcaaagtctcgacctcctgatagatgctggcgaaatcgccggccgaacgcaccaccatctggaacggcaggccgccggtcgccgccggcagtgcggccggctggaacggcgtcacgctggcgccgagcacgccgtaggacatgccgtagagctggttctggatgtcgtcggcggaacgcttgcgcttgtcccagtcggtcaggttgatgccgccgaaggcccggttctgtccgtcattgccgttaagcacccaactcgactgatactccggaaacgagcgatacatctgctcgatctgatcggtgtagcgcgtcgtgtaatccacgctggcatattgcggggccctgagcacggtgaacacgtaaccctggtcttccggcggcgcgagctcgcgctggctgccaaggaacagcaccacgatcgcggccagcacgctgacggcaaccaccagcaccgcggtacgcatcctaagcgtcgctgccaagagccagctgtagccgcgcgacagcttcgagaaccggtactcgacaaagcgggcaaaccggccatgcgaggtcgcttcacccaacagctgcgagctcatcatcggcgacagggtcagcgcgaccacgcccgatacgatcaccgagcccgccagcgtgaaggcgaattcgcggaacatgctgccggtgaggccgcccatcaggccgatcggggcgtagaccgcggcaagcgtgatcgtcatcgcgaccacggggccgatgatctcgcgcgcgccgatcaaggccgcctcggccggcttcagcccctcttcgatgtggcgatggatgttctccaccacgacaatggcgtcgtcgacgacgagcccgatcgcgagcaccatcgcaagcagggtcaagaggttgatggaaaagccgagcgccagcatcatcgcggcggtgccgaccagcgacagcggcaccgtgacgacagggatcagcaccgagcggaacgatccgaggaacaacaggatcaccaccacgacgattacgatcgcctcgaccagtgcgtgctggacctccgagatcgaggccttgacgaagtgaacgatgttgaagacgtccctgacttgcaggccgggcggcgccgcccggttgagatccccgatcaccttgttggtggccgcgacgatctccagcggattgccgtcgggggtcggctgcacgccgatgaacacggtcggcgtgccgttgtcgcgcgcattggcatcgtagttctcgccgccgatctcgagtgtcgcgacatcgccgagccgcaccaaaccgccgctgccggcaccggtcttgatcaccatcttgcggaaatcgtcgagattcctgagatcggtctgcgccgcgatgttggtgacggtgatctcgccgcgcagccggcccggcgccgactgcacgttgttggcgcgcagcgccgccgcgatatcgcccgcggtcagcccgcgcgccgcaagcttgaacggatcgatccatacccgcatcgccagcgccgcgccgcccaacgtatcggccgacgcgacgccgggcacggacgtcaacagcggctgcgccacgcgggtggcgaagtcggtgatttcagcggagctcagcgtcgcgctggtgaaggcgatgtactgcaccgccgacgcgccgtcggtgatcttggtgatgacagggtcgaacacgccggcgggcatgcggtacttgacctgctgcaccttggcgagcacctcggtcatggcacggtcggcgttggcgttgagcaccagcttggccttgatctggctcgtgccgagcgtcgagttcgaggtcatgtactcgatgccattggcggtcgcgatcgactgcgcgatgacagaggtgacgaacccctgcatgacgtcctgggtcgcaccggggaacgagacgtcgacctggatcgtcgcgctctccatgctgggatattgccggaccggcagcgagaccatcgctgcggtgccgatcagaaggatcagcaggctgacgaccgtcgccaggatcggtcggcggatgaagatgtcggtgaaatgcatgatgcttgcttcgggcgccgctcgcggagctagcgccccttctcctgcgtttcggccatggtcatctgcacggctgcgccgggcacgacgcggagctggcctgatgtgacgatgtggtcgccgggtgcaagcccgtgctccaccacgacgcgctcgccgatccgctgcccggttttgaccgcgacaccgatcgccttgttgtcgcgcacgacgagcacgctctcgccggatgcgctggtctggatcgcggtgaccggcaccacgatcgcatccagctgcggcggcagcaccacgttgaccgtcacgaacaggccgggccgcagcagccggtcgggattatcgaacagggcctgcacgaggacattgcgggtgtcctcggcgacctgcggttcgatggcattgatcttggcctcgaacacccgatcggggaaagcatcggtacggatcgtcaccgcgcctcccaccttcagatttgacaggcgctgctgcggaacggtgaaattggcatagagctggtcgagcgcggtcagcgtggcgagcgcatcgcctgcgttgacgtattgaccgagattgaccttgcgcaggccgatctggcctgcgaacggcgcccggatcgtcgtctgcgcgatctgcgcatcgagctgctccaccgaggcgtcggcctgcttcaggtcttcctgccgctgttgcagggtctcctgggtcacgaatccggacggcgcgagcccctgggagcgcttctcctgcaattgcgcgaagcgtcccttggagaccgcaacggcgcgcgaggcgcgcagcggcgcgtcatagagctgcaccagcggcgcgcccgcggcgacgtcggtgccggcgtcgaaattgatcgcggtgacacgcccggccacttcgggcgacaggatcacctgccgcaccgcctgcagcgagccgatcgcctcgagcccgcgcggcagggtttcggtccgcaccaccatggccgccaccggcgtcggcggggcttcggcggacggcttggcgaccgctccgccgccgcgccatgccaacaatgcagcggcagccgcgccaaccaggaggacagcaatgccgaacggcattgcgcgggcgcgcagcgaccggcgagaaaaagatgatgcggacggcattttgattccagaacagcgaacccgacggcttcgccgggtgcttgccccttgcaagctcgcggatgttatagaacctcaagcatggttgaggtcaagaccaggcagattgcagaacctccaatcacgggaattccgaccgtcgcgtccgctcacatcttcgtcatgctgctcgccgcccagccctgaagccatgcgcttttgcctgccacacggtggccagcgcagtcatgacgaggggaagtaaaatccacggcagccaaccaggtccggcctggtcggtgacgagtcctccgatcagtcctcccccggccaccgcgagattgaagaccgtgacgaggatggattgagcgacgtcagcgtggtcacccgccgaatccgccagtgccgtttgcagcagcgtgggtgcgcccccgaaagtcagtccccaggccgccacgccgatcagcaccagcacggcagagtgatgcggtatcgccagaagaatggcggcgacagcgaaggcagccaagctgatcagcgtcaacgcccgcaactggcgatccaccagaagtccggtgccccatatgccgacgaccgacgccacgccgaagacgagcaggatgaggtcaaggcgcagatccgttccggtcgcaccaaggaacggagcgacataggtgtagaggatgttgtgcgcgagtatccatgcgaacagcaccaacaggaccggccgaaccccgggaatgagaaagacaaggcggacgggcaaacgttgatgccgggcttgaccaggaaaatcagggacggcgagccggacccacgccaacagcaacaatgcgatggcggacatgatgtaaaagacggcccgccagtcgaacatcccgcccagccatgacccgagcggcacgccgagcgaaagcgcgatgggttgcccgacgccgacaatcgccatcgccctgccttgcaggttctgcggagccagccgccgcgcatagccggcgaccagcccccacaccacgccggccgacatgccggcgacaaagcgggccacgagtgtcagcccgtattgggcagaaaccgccgtcatcgtgttgaagatcagcaaccccgcaatcgccagcaggaacagcgggcggcgattccagctccgcgtcgccgcaatcaccggaacggcggcgacaaccgacccgagcgcgtagagcgtaaccgtctgccctgccatggcttccgacacgccgaggccagtgccgatctgcggaagcaaaccggcgggcatgttctcggtcatgatggcgaggaagcccgccacggtgaacgccagcaattgcccgaccggaaggcggtcttgagcgctgccagcctctagtctggcggcatgaatattctctgagacagtcatgatttactcatcagggtggagaagaaggtggcgatgtcgccttcgcattgaccggcggcgaggatgttcggccggtccggcaggcgcggcggggacggcgaccaacaagcaggcaatgcgaagcagcactgcgcgagcacgcagcggcgcgcgcgaaggagatgacgcggacggcatttcgattccagaacggcgagccggcggtatcagccggatgcttgctcctgcaagctgccgagtgatatagaacctcaagcatagttgaggtcaacaggccgaacacaggatcgtccgcgatggtgccagccaccgagctttcagtcggcgaagtcgcaaggcgcagcgggctcgcagtctccactcttcacttctacgagaccaaggggttgatcgcgagccggcgcaccggcggcaatcagcggcgttatccgcgcggcgtgctgcggcggatcgcggtgatccggatcgcccagcgcgccggaattccgctggaggagatcaggcagactttttccgcgataccactggagcgcgctccgacgctgcgcgagtgggagcgcgcgatgcggaactggaccgctgcgttgcagcagcggatcgacgatctcactgatctcagggacaagctgttcagctgcatcggctgcggctgcctgtcgctgactgattgcccgctacgcaatggcgaggacaggctcggcacccaaggccccggcccgcgcgtcctgatcactgctgccgaacgccgccagcggcgcaagcggcagggctgagaccggacgccaccaccgacaagttgcgcacaacctgccattggtcacatgccatcgggtgattctcggttatgctggccggactgcttgaccctagggagtcccagaatgaacgaccctcaagttggatggatcgcggcaatcatcgtcggcggattggccggctggctcgccgagatgttcatgaagaccggaaccggcatcttcatgaatatcatcctcggcatcgtcggcgccgcgctggcgaactggctgttgggtctgcttggcgtatcgctcggcggaggatggatcagctatctgatcgccggcttcatcggcgccgtcatcatcatctttgcgtggcgcgcgatccgcggcgcaacctagcgcttgatccaaaaggatcgcgcccggacataagacaatagcgcgatgatgggttcatcgcgctatcaagattgctgcttcgcgccacagcgcctgatccatccggatcaggccgcgccgttgcgcatgtaattcggcagccagtgctcgaaggcgcgagcgagcgtctccaccgcaaccggcgcctcgccagccactgcgatggcatcgccaccggtggtgccgatacgtgcgcagggcacgcctgcacccttcatcttcgcaagcacgagaccggcatccgctgccggcaccgtgacgatgtagcgggcctgatcctcgccgtaccaataggcatgcggcacgatcgaggacggcgccgccagcagctgcgcgccgataccgcttgcgatcgccatctcggccagcgcgatcaacaggccaccgtcggagacgtcatgcaccgcggtcgcggtgccggcgcggatcatgccgcgcaccacgtcgccgttgcgcttctcggtggcgagatcgaccggcggcggagcgccctcctcgcggccgcagacgtcgcgcagatagaccgattggccgagccagccttgggtgtcgccgaccagcagaatcgcctcgcccgacgccttgaacgccagcgtcgccgacttggtgaagtcgtcgagcagcccgacgccgccgatcgagggcgtcggcaggatgccgcggccgttggtctcgttgtagagcgagacgttgccggacacgaccgggaagtccagcgcgcggcaggcctccgagatgcccttcaggcagccgacgaactggcccatgatctcgggccgctcggggttgccgaaattgagattgtcggtgatcgcgagcggccggccgccgaccgcggtgatgttgcgccaggcctccgccaccgcctgcttgccgccctcgaacggatcggcctcgcaatagcgcggcgtgacgtcgacggtgagcgcaagccccttcggcccgtcctcgacgcggaccacggcggcatcgccgccgggacgctgcatcgtattgccgaggatgacgtggtcgtactgctcccacacccagcgcttcgaacacaattcgggcgtgccgatcagcttctccagcgccgcggtgatgccgagcggcggctcgacgtcctggccgcggatcaccggcagcgcgttcgaggcgacatacggacggtcatagaccggcgcctcgtcgccgagctccttgatcggcaggtcggccatcacgtcgccgccatgcttgacgacgaagcgcttggtcggcgtggtgtagccgacgatggcgaaatcgagcccccatttgcggaagatcgcctcggcctcctgctccttctcgggcttgagcaccatcagcatgcgctcctggctctccgagagcatcatctcgtaagcgctcatgccggtctcgcgggtcggcaccgcgctgaggtcgagctcgacgccgaggtcgcccttggcgcccatctcgaccgccgagcaggtcaggccggccgcgcccatgtcctggatcgcgatcacgcaatcggcttccatgatctcgaggcaggcttccaaaagcagcttctcggcgaaggggtcgccgacctgcacggtcgggcgcttctcctcggaggcgtcgtcgaattcggccgaggccatcgaggcgccatggatgccgtcgcggccggtcttggaaccgagatagacgatcggcatgttcacgccggaggccgccgcgtagaagatcttgtcggcatcggcgaggcccaccgccatcgcgttgaccaggatgttgccgtcgtagcgggtgtggaagcgcacctggccgccgaccgtcggcacgccgaacgaattgccgtagccgccgacgcccgcgaccacgccggacaccaggtgccgggtcttggggtgctccggcgcgccgaagctcagcgcgttcaggcaggcgatcgggcgggcgcccatggtgaagacgtcgcgcaggatgccgccgacgccggtggtggcgccctgatagggctcgatgtagctcgggtggttgtggctctccatcttgaagaccacggcctggccgtcgccgatgtcgatcacgccggcattctcgccggggccctggatcacccagggcgccttggtcggcagcccacgcagatggatccgggacgacttgtacgagcaatgctcgttccacatcgccgagaagatgccgagttcggtgaaggtcggaacccgcccgatcagcttgaggatgcgctcgtactcgtccggcttcagcccgtgggcggcgacgagttcgggggtgatctggggctcgttcttaggatcgttcttggggtcgttcttgggcgcggtcatgggacccttaataggtagatcgaacgggggcgaaaaggccttttacggcccatttccggcctgtccagagctttgcggcggttggacccggcttggggtcggtacccgggatttgcacaatggggatggatcggatttaaggacccgaacccgacaattgaaggcccagatttcgtgaacgagctcgccccgaccgcactcaacaccgcattcaaccgccgccccgacctgcacgtcgaaaccgagggcgaattcgccggctggcgaacctggacgcgggacaatttcgagacccataccggcccgttttaccaccggatggacgagaccggccgcatctcctgcgcgttccgggtcgccaggaagcacctcaacggctccggcaatgtccatggcggctgcttcatgaccttcgcggattactgcctgttcgcgctcgccggctcggtgctccagggtcccggcgtcacggtctcgttcgcgtcggaattcctcgacgcggcccgcgagggcgatctgatcgaatgcagcggcgaggtcacccgcgccggcggctcgctgatcttcgtgcgtggcatgctgacatcggccgagcgaccgctgttcaccttctccggcaccatcaagcgcgtgaagcgcaaggcgccggcggagccgacagcgtaagcacgcgcacctcgcttcgcttgagaacacgcacgcgccgtgaacacgcgtcgtcatccggccgttacatcggcgcggattgaatcgaaggcgcggctctagcgcgttgtgttcacgcgcgttcttcgtgtgaagcaatgcgcactgcagttgtgacgcgacgagatgctgtcgttgcgtcgtcgcgcatgcgtcacatgcccgtcagccaagcttccgtagattgccgaacggtttcggtttgtgcattcgcgcagcgagcttggggcattctcatgacattgaagacgtttgtttccgtcacgacggcaatgacgcttgtcgcatcgctggcctggaccgcaactccggcgcgcgccggacaggacggcgacaatggcgatcgcggcagcgactcccgcgggcacgatcaggaccaggatcaagaccatgacggcggccatcatggtcgcaagccacgcgtggtgctgatctcgctcgacggtgcaaaacccgatttcatccagaaattcatcgaggaaggcgtgctgccgcgcgacggcggcctcgcccggctcagccggcgcggcgcggtggcgctgcagaacgtgacggcatcaccgtcgctcaccgcggtgtcgcacatcgcgatcgcgaccggctcgaccgcggtccacaacgacatcccctcgaacacgttccagccgatcgtcgggctgatctccagcagcatcagcggcttcgcggccccgatcggcggctacaccgagagcccgctcgggccgtcggcgcacccgacggccgagcccctgtgggtgcagctgcgccagcagggcaagaaggtcgtcaccgcgacctggcccggcggcgacggcgccgacatctccatcaacaagaccgtggtgcaaccggcgcagccgacccgcgtgaccgacttcacggtcccgttcggcgcattcggcggcatcggagcccagggcttcacgctgtcgcgcagcgacttcaccgccgatcccggcatcgtcgcagcgctgcaggcggcaggtcatttctcgttcagcccggtgctggtgacctcggcgccgatcgagacgttctcatgttccgcggctgcaaccgcgacctgcaccaatgcgtcgacgcttgacgtcaaatactcgatccgcgtcgccgcgatcgacaccacgaacgatcgcaaggtgaactacgacacgctggtgttcttcgacgagaaccgcggcatcaccgcaggtccgttccatgcaccgtcgaccgggccggcttatgccaggttcggtggcgagaacgcgccgttcttcttcgagggcagcggcgccaaggtcggtgccgcctacttcgtctcggcactgtcgccggacctctcggtggtgcgcttcgcccgctacggtgccaactacatcccgcgcaacacgccggttctcgccgacgtcgacgacatcaacaacaacatcgggttctggcgtgcgcaggccgacttccgcatcccggagcgcctgagcccgggcttcaccaacttccccgacgtcgagatcgagacgatgtacgaggacatggtgaagaccttcgtgcgctaccaggccaatatcggcgagcgtgccatcaagacccatccggacgccgacctcgtgatggtctatatcgagcaacccgacggctccgagcaccagttcctgctcaccgatccgcgccagggcaccaacccggcggatccgaactcgatcggcgccaaccaggaccccgccaaggtcaagcgctacgcctcctacatccgcttcgcttaccagaccgccgacaaggcggtgaagcaggtcgccgaagcggcgggccatgacagcaacgtcgtcgtggtgtcggatcacggcttcgcgccgttccacacctcggtcaacctcaccaacatcctgcgcaacgcgggcatcgacaccagcaaggtcggcatccgcacctcgggccctgcggccgacatctacgtcaacctgcagaaccgcgagctcggcggcaccgtggatcttgcgacctaccgggccctggtgacgcagatcaccgatgcggtgaagaacgcggtcgatcccaacgcacgcttcaactactcgctcaaggagcagcgcatcttcaccgtcgtcgagacccggccgctgcaatgcgacgccggcaccggacagtgcaccagcaagaccgtcggccaggactatggcgacgtgttcgcgctgatggcgcccggctacaatttcgacggcgtgcagaatccgggcgtcgcacgccagggcgatgcgccgttcaattcggcgaccaccgcgctgtcgatgccgaacttctacggcgcccacggtcacgaccccgagcttccggtgatgagcgcgacattcatcgccgcgggaccgcagatccgcagggataccgtagtacggcacatgcgcaacatcgacgtggcgccaaccatcatgcggatcctcggcaccacaccgcatcacgtcgatggcgaggtgctgaacgaggtgctgcgctagtatctcagctaaattccgtgcgacggacgccacgcgcgtccgtcgcttttcactattgaaccaccgcctctagcctttcgccctgtggccaagctacattcgccccatcgcgcgacaatgcgcgaagggagccaatcaaggtgccgaagagcacagcgaacacgggcggcgtgacggctcccgcgatcacgccccatccgtccatatcggcgcccggtgcgcgcggctggcgcgactatgcgctgctgctggcgctggcctgctgctggagctcgacctatccgctgaccaagatcggcctcggctcgatcccgccggtcaccttcatttccgcccgctcgctggtggcggcagccttcctgctcgtcgtgctgcggatccgcggcatccgcatccccaccgacatcaaggcgtggaagctgttcgccttccagcagaccatcaactcgacgatcccgttcctggtgatcacctgggcgcagctctatgtgccggcgtccaacaccgtggtgctggcctcgacgacgccgatcttcgccttcctgatcacctgggcgatcacgcggcacgagccggcctcgctgctcaagctggccggcgcgatcctcggcctcgccggcacggtcgcgatcatcggcctcgacgcgctctcgggcttcggcaaggaaatattcgcggagatcgcgatcctgctcgccaccatctcgttcgcctgcgcgacgatcttcggactgcggttgtcggattacgatccgatggtggtcgccgccggctcgctcttgttcggcggcaccgtgctgctgccggtcgccctgattatcgaccatccctggacgctgcatccgacgccgcaggcgctggtcgccaccgtcgtgaagggcatcttctccagcgcgttcggcctgatgctgttctacatgtgcctgacgcggctcggcacgctgacgaccaatgcgcaaggctatctgcggattccgatcggcgtcgcgctgtcggtgatcctgctcggggaatccgtgccgtcgaacctggcactgggactcgtgctggtcatgttcggcgtcgccgcgatgacggtgccgggcgatgcggttaagcggtggctgcgcaggggtagtcgcagctcaagtcgatagctgcttctcggcgatcgagagccattcggcctgcgcatcgcgcaggtatttcggcgcgcgccgcatctggatcaatagctcgttgaacaccatgcgcgcctcggcggtgcggccgaccagctgcagcagcaggccatagcggacccgcgcctcagcgccggggaagtactgcgacaccgcctgatactcctccagtgcctcgtcgagccgacccagttcggcgagcgaacgggcatagagcagatgcccctcggcggactcgaaatccggccagcgctcgcgcaaggcgtcgagcgtcgccagcgcctcggccggctgcttgcggccgaactgggcctgcgccttggccagcgcgtaagccggatcgtcgccctgcggcaaccccaacacatggtcgtagtggctctccgcctcctcgaagcgcccgatcgcctggcactccgcggccagcgccgcgcggttggcgatcgtgtctgatgtcgcgagccggtcggacagttcgcgataccgcttctcgggatcgagccggttggcgacgcgcttgcgcgcctgcgcggcgcccggtccgccccaccattccggaatcagctcgacgacgatgtaggcgatcgcgccgatcagcggcaccatcaggatgatgaaggcccacggctgcaagcgcccggtgcgcgaggcgtggtagatcagcgtgatgtcgagcagcaatatgaccaatgcaacaggcattgcggatccccgcgaaccggacagaccatcccaatcgccctcgtcataacgtgcccggcacgctgcgacaatccccggttgccatgccggccgcgctagcgtgaagagattgtgaaacggaggcgattatccctgcattggtcgcagaccgaacagtccgggttcacggttcctattgcgcttcgcagcgagccttgcgctcctcttcagcgcgcttttcctcttctgatgtcgcctgcatttcggaggcgctacttcttgtcgtcggcgagcagcgcgcggtatttcgcgacgtcgcgggccacgagttgctgcagcacctcgggcgcgagctcgtcggcgtccggcgcgaccgtcgacagatcggcgaaccgcttcttcaccgcgtcgcttgcgaccgcggtgcgtgcggcggcgttgagcctggcgatgatctcgggcggggtgcccttcggcgcgaacaggccgttccagccctgcgcctcgaactcgggcagcccggcctcgctcgaggtcggcagctccggcagcgaggcgagccgcaccgtcgagccgaccacgaccgccttcacgagcttgtcgtcgatcgcctgcgacaccgaggccgcggcatcgcagacgccgtcgatctggctgccgatcgcatcggtcagcgccagcgcggcgccgcgatagccgaccagctgcacgtcgatcccggcggcatgcacgaagctcttgcagatcagataattcgacgagccgacgccggcatggccgagattgaccttccccgggttcttcttggcgtagtcgatgaagtccttgaggtccctggccggaaaatccttgcgcaaagcgacgatgccgaaggttttcgccaccaccgcgatcggcgcgaaggagtccggcgtgaacgacagttttggatagatcgtgtaggtcgcggcgttggtgccggcattgccgatcgcgatcgtgtagccgtccggctcggcgcgcgccgcgcgggtcagcgcggtcgagccgcccgcgccgccgacattctcgatgatgatgctctggccgagcgccgcgctcatctggtcggcgaccgcgcgggcgatcacgtcggaggtgccgccggccgtgaacggcacgatcatcgtgatcggacgcttggggaagtcctgggcgtgagccgatgtcacaagcagcagaaccgcggctgcggccgcggcaaggtaccgtcccagcatgatggctatgccgccttctcgaactgctggaccagcccggcgaacaggccgcggccatcggtgcagcccatgatctcttcgacgtggttttccggatgcggcatcatgccgagcacgttaccgcgctcgttgacgatgccggcgatcgaatgcgcggcgccgttgaagttggaggcctcgtcgaccacgccatcggccgagcagtagcggtagagcacccgcccgtcgccctcgagccgcttcagcgtctcttcgtcggcctcgtaattgccctcgccatgcgccaccggcacgcggatcacctggccggcattgtagccgcgggtgaacggggtgtcggagcgctcgaccttcatgtgcacgtcacggcagacgaatttcagcccggcattgcgcatcaagacgcccggcagcagaccggactcgcacagaatctggaaaccgttgcagacgccgagcaccagcccgcccgaggctgcgaagtcgcgcacggcgtccatcacgggcgcgcgcgccgcgatagcgccgcagcgcagataatcgccataggagaagccgccgggcaccaccacgaggtcggtgccttttggcagcgcggtctcggcgtgccagaccattgcggtctcgttgccggaggccagtttcagcgctcgcgccatgtcgcgctcgcggttgatgccggggaagacgaggacggctgatttcatcggatcacctggttttgggcgccagcacgagcttcgctgcggcggcaaactttgcgtaattgtcgttgctggctttctcgtcgcgcgccgaactgatcaggctggcggagccttgtccgccgatcagcaagccgctgacttgatactcgcttgcgccatcggccgtcacggtcagacgccgtgccttgaacatgcgcggcgtcgccgtgcccttgtcgccgtcaacgccgagcagcgtaatccgctgtccgggcgtccgctgttccagcgccttgatgatctgctcctgccccgcacggaactggtcgagcgtcatctgctttccgccgatatagtaccggtagctcaccttggagcccgcaccgcaggacgactgcgtgcagcggaacatgtgcgcatcggagccgcggcgctcgtagctccatccgctgaccgtgaacggcggcgcctgcgtcgtggcggagggtggcggcggcgccgattgcgccgagacaccgccgcatccagcaaccgtcagcagagcagccaacaacgatcggacgacgatacggtcaccgccagcagcgagggtggctgttgtcatctggcgcgcccggctagctcaggacctcgacccggtagttctcgatcacggtgttcgccaaaagcttgtcggcggcggccttcaatgccgcctccgccttggccttgtcggtcgcggcgagctcgatgtcgaacaccttgccctggcgaacgctcgcgatgccgtcgacgccgagcgatttcagcgcgccctcgatcgccttgccctgcggatcgaggatgcccgacttcaacgtaacagtgacacgtgccttcacgatagccccttaacttttcaccagcaccgggccgcttccagcgggccgctcgttttcgatcaggatgccgagccgcttcgcgacctcggtgtacgcttcgagcagaccgccgagatcgcggcggaaacggtccttgtcgagcttctcgttcgacttgatgtcccacagccggcaggagtccggcgagatctcgtcggcgacgatgatccgcatcatctcgttctcgaacagccgcccgcactccatcttgaagtcgacgaggcggataccgatgccgaggaagaggccggtcaggaagtcgttgacgcggatggccagcgccatgatgtcgtcgatctcctggggcgtggcccagccgaacgcggtgatgtgctcttccgacaccatcgggtcgttgagctggtcgttcttgtaatagaactcgatgatcgagcgcggcagctgggtgccctcctcgatcccgagccgctgcgacagcgagccggcggcgacgttccgtaccaccacctcgagcggcacgatctcgacctcgcgaatcagctgctcgcgcatgttgaggcgacggatgaagtgggtcggcaccccgatgtcgttgaggtgctgaaacaggtactccgaaatccggttgttgaggacgcccttgccctcgatcacctggtgtttcttggcattgaacgcggtcgcgtcgtccttgaagtgctggatcagggttcccggctcggggccttcgtaaagcaccttggccttgccttcataaatgcggcgtcgacggctcattgggatgtaccgtgttttgttgaaatccatgaatttgggtgctccggatgacttggggttacgacccacgacggagctgccgcggaggcctggaacctgagctatccaactggaaacagaacaagaaccacgcctgttggcaacctatccgattggcccatccagcacaatcgatagtgcccccttgcgggcacttataccgccctatcgaaaagggccgattccgcctgttttgcctgcggcttaacggctcgttgtcttgccgattcctcccaactatctaggcaggcatcggggctgccgcaacgagctgcggcccgcattcagcagggattggaacttcggccatgaacgagttcaacaagcgcgaggaaggtttcgagaagaagttcgccctcgacgaggagctgaagttcaaggcggaagcccgccggaacaagctgctcggcctgtgggctgccgagaagctcggcatcacgggcgatgccgccaacgcctatgccaaggaggtggtggccgccgatttcgaggaagccggcgacaacgacgtcctgcacaaggttctgaaggacctcacggccaagggccagcccgccaccgagcgcgatatccgcgccaagatggacgagctgctggccgtggcggtggcccaggtcaaggcgggaacctaggttcacgccccggcttcgctcaccttcgagttgctacgcgcgccggaccttgttccggcgcgacgcgtttgtgccccttgccttggtgaagtctgcgcggatgatgtcgagcaggcggcgcgacgcggcgctgaggaagccgccgtgccgtgtcaccgcgacgacctcgtgactggcagtgagattgccgacgcggatggtcgcgatcgccgaggtccgcagctcctccgccgcattgctgtgtgacagcagcgcgatcccgagccccgcctcgaccagccgcttctgcgccgtcaggctgtcgaccggcgtccatgcgacctcgccgagcccgtgggtcaggaacagcgcgaacacatgggaggccgtgatctcgcgccggcccggcacctcgggaaaggcgatccaccgctcgtcccggagatcggcgagcctgccgaccctccgtcccgccagcggatggtccggcgcgcagaccacctggagcggctcggcgaacagcacctcgcattcgaggtcacctgagcggtcgcggtcgtagcgcagcccgatcgtcgcctcgccgcgccggatctggtcgctgacctcggcgctggtcgccgtgcgcaaggtcagcgcgacatccggatgccggcgggcgaaccgcttcagcaccttcgagagccgctcgcccgccagcgtgccggtcaccgccagcgccaccgggccggaattgtcgcgcagcagcgcgcgcaccgcgttctcggcatcctgcgccgccgccaccgcgcgctcggcgtagggcaccatcacccgccctgcatcgctgagccgcgtcttgcctccgatgcgctcgaacaggggcacgccgagctcctgctcgagcagcgcgatccgcctagagatcgccggctgcgagcgatgcagcgccttcgcggcgttcgagatcccgccgcggcgatgcactaccaggaacgtgttgagcgcgtcgctgtccattctcgcctcatgcaaaaagctaatgatatcgagagaaataacaaatttgtctgatgatcgaaaccaccctatcgcttgctgccagtcgctttcccaaccatcaggagttcacatgcgcacccaggcagacaaggcagcacggtttcgcgagctgcatcagcggcccggcgccttcatcattcccaacccctgggatgccggaaccgcgaaactgctcgctgccatggggttcgaggcgctcgcgaccaccagcctcggggtcgccaacacgctcgggcagtccaccatcagcctcgacgctatcatcgagaattgccggatgatcgtggaggccaccgacctgcccgtgaacgccgacctcgagaattgcggcgccgatgatccgaagaccgcggcaagggcgatcacccgcgcagcagaggccggcgtggtcggcggctcgatcgaggactcgaccggcaatcgcgagcatccgatctacgacttctcgctcgcggtcgagcgggtgcaggcggcggtcgaagcggcacgggcgctgccgttcccgttcatgctgaccgcgcgggcggagaacctgctgcacggccgcaacgatctcgacgacaccatcaagcggctgcaggccttcgaggcggtcggcgccgacgtgttgtacgcacccggcgtgtacgacgccaagaccatccgcacggtgacggcctcgctcggcaagccattcaacctggtgatgggctttgccgatccgaccctgacggtcgatcagatcgccgccgccggcgtcaagcgcatcagcaccggcggcgcgatggagcgccacgcgctcaacgccttcttgcgctccgcccgcgagatgaaggacaagggctcgttcagctatgtccgcgacatggcgccggtgaaggaggtcagggcggcgttcaacggatccgttcccgccccgtgattgcgagcagtgctggcgacaatgacgtcagccagtgctgcgtgcatgccgaagccgcctcaggttgcctgaggcggtgcggatcactatctgctaaggtgccgccaacaccgcaagcccgggccgtggtgcctgcaatctcgacgatccatgacagctctcggcttgcagccggcaccaggtaatgccaagagagcgggatcatgtcccaagatcacatttccaacgtcctcgccgaacgttatgcctcgcccgccatgcgcgccatctggagcggcgaaggcaaggtccgcctcgaacgcgactactggatcgccgtgctgaaggcccagcgcgatctcggaattccggttccggatggcgtgatcgagagctacgagcgcgtgaaggaccagatcaacctggcctccatcatgcagcgggagcgcatcacccgccacgacgtgaaggcgcgcatcgaggagttctgcgaactcgccggtcacgagcacctgcacaagggcatgaccagccgcgatcttaccgagaacgtggagcaattgcaggtctatcgcgcgttgcagttggtcgagaccaagagcgtcgccgcgctggttcgatttgcaaagcgcgcgcagcaattgcgcgacgttccgtttaccgcacgcacccacaacgtggcggcgcaggtcacgacgctcggcaagcgcatcgccatgttcggcgaggaaacgctgctggcgcatcagagcctggtcaatgtgcttcaaacctatcccgcgcgcggcctgaagggcgcggtcggcacccggctcgaccagatcaccctgttcaatggcgatgccggcaaggcgcgcgcactcgaacagcgcatcctcgttcacctcggcctgccgaaagcccttgatgccgtcggccaggtgtatccgcgcagcctcgacttccgtgccgtcagtgcgctcaccgagcttgccagcggccccggcaatttcgccaagaccattcgcttgatggcgggccacgaactcgccagcgaaggctttgccaagggccaggtcggctcctcggcgatgccgcacaagatgaacagccgctcctgcgagcgcatcaacggccttcatgtgatcctgaagggctatctcgccatggccgccgggctcgccggcgatcagtggaacgaaggtgacgtctcctgctcggtcgtccgccgcgtgatgctgcccgatgccttcctcgccatggatgggctcctcgaaaccttgctcaccgtgctcgatcagatggacgtgttcgaggccgtggtcgcgaccgagctcaaccgctatttgcccttcctgctgaccaccacggtcatgatggaagcggtcaagaagggcgccggccgcgaaagcgcccacgaggcgatcaaggaacatgccgtcgccgccatcggcgacctgcggaccggcaagatcgtgcaaaacgatctgctgcagcgcctcgccgccgatcagcgccttggcttgagcgaggccgagctgcagcttgtgctggaccagggtcgcgccaactccggcgacgccgccgctcaggtcgattacttcgccgagcaggtcgacgccctggcgagagccaagcccgacgcggcgagctatgcgccacgcgcgattctgtgaggtcggagggaagttccgagcgcgcggcgtgaagcagtcgcgccgccctgctctcactcctccttgaagccgtattccggcacgttgccgctggcgccgtaatatttgtacggcaggaacttgccgctcatggtgatcttgacgcggtcgcccttcggattggcgacgcgctccatcgccatgtcgaagtcgatcgccgacatgatgccgtcgccgaactcctcctcgatcagcgccttccatgccggaccgttgaccatcaccatctcgtagaagcggtaaatcaggggatcggtcggcggcatcgccgtgccggtgccgcgcatcggcacctcgttgagcatcgcagtctcagccttcgacagcccgaataattccccggcgttggcagcctgcggttttgtcaatttcatctggccgagaattgcgccgacgatcaggacttcggaataaccgccgatcttctcgcagatatgcttccagctccagcccttctcgcgcttgatgtcgagcagcttttcggtgaggtcttcgcgtttcatctggtttcctcctcaggcttcagcgcgcaatgctctgcgcgggattgggttcgacgacgcgcggcggcgagacgatcaccggttcgcccaggccgggccgcaccgtcggcacgtggcgcggatcgtgtccggtcacctcggccgcaaagctcttgctgcggctgaccaggaaatcgacgatatggttgcgcagcgcgtaataataggggtggcggtgcagatcgatccggccgcgctccttcggcagcggattctcgacgatctcggccagcacggcgccagggccgttggtcatcaggaagatcttgtcggcgaggaagatcgcctcgtcgacgtcatgggtgatcatgaaggtggtctgcccggtctccagacagatgcgccgcacctcgtcctgcaacgtgccgcgggtcagcgcgtcgagcgccgagaatggctcgtccatcagcatgatcttcggcgtgatcgacagcgcccgcgcgatgccgacgcgctgcttcatgccgccggacagctccgacggatgcttgtgctcggagccggtgagcccgaccagatcgatgaacctttgcgcgtgggccttgacccgggcgcggtcccatttgcgccatttcgaactgacggcgtagccgacgttgccgagcacggtgcgccatggcagcagcgcgtggctctggaagatcacggcgcggtcgaggctggtgccctcgatgccctgcccgtcgacgatcacggtgccctcgctcggctggtcgaggccggcgaggatgttgagcaccgtggtcttgccgcagccggaatggccgatcacgcagccgaactcgccgcgtgccatcgacagccagaaattctcgaacaccgtggtggtgccgccgcccgcgccgggatagcgccgcgcgatgccctcgatggagatgaacttgtcggtcatcgctactccggaaatgtcaccatgcgcgtgaaccgcgccagcacctggtcgagcagcatgccgaccagaccgatcaacaggatcgcgatgatcacattggtgatcgacagattgttccactcgttccagacgaaatagccgatgccggtgccgccgacgagcatctcggcggcgacgatgacgagccaggcgatcccgatcgagatccgcatcccggtcaggatcgtcggcgctgccgccggcaagatcacggtgaaggcgcgcctgacggtaccgacttcgagcgtccgggcgacattgatccattccttgcgcacgccgacgacgccgaacgcggtgttgagcagcatcggccacaccgagcagatgaagatgacgaagatcgccgagatcgaggaatccttgatggtgtagagcgcaagcggcatccaggccagcggcgagatcggcttcaacacctggatgaacggatcgagcgccctgctgatcaggggcgacatcccgatcaggaagccgagcgggatcgcgaccatgacggcgatcagatagccgagcccgacgcgcgcgatcgaatagccgagctggatgccgaggcccttgtcgttcggtccgttgtcgtagaacggccgcttcagatgctcccacagcttcgccccgacatcgagcggtccgggcatcgccgacttgccctgggtcgcggtcagccccatcagcttcgcatactccgggctcatgttcgccacagcgcccgtgccgcgggtcgccaggtgccaggcggcgaggaaggtcgcgagcagcacgacggagacgatcgcggcgcggaagcggagggacagcctcattcggcgcgccctctcaacccgtcgtcccggcgaaggccgggacccatacgccgcgccgcctcggtggggcacgcggggagacgccgtgcacaaacaccgacggtcgtggttatgggtcccggccttcgccgggacgacgtggataagccggtgcctaccttcacgacgacttcctgatcttgaagctcgcgagataatcgtcgggcttggccggatcgaagctcttgcccatcaccgagaacgatttgtaggcggttgccggcggcgagagccccatctcgaccatcaccttcttcgtgtcggtggcaaggtagacctgctcggccactgcccggtagtcgacctcgcccttgatctggccccagcgcttcatctgggtcagcatccacaccgcgaaggattgccaggggaacggatcgaaatcgacccgcttggcgtcggtcttcacgccgccaaggccgtcggcataggtgccggtcagcacctgctccagcaccgtgaccggcgcgttgatgtaattggccggcgcgatcgcctccgcgatctgcttgcggttctcggccttcgccgcatagccggtggcatcgacgatcgcccgcgtcagcgccgcgaacgaattcggcgccgcggtgatgaactcgcggctcgcggcaaaactgcaacagggatggccatcccagatctccttggagaggatgtgcaggaagccgacaccgtcatagatcgcgcgctggcagatattgtccggcgcgaggaagccgtcgatgttgtcggcgcgtagattggcgaccatctccggcggcggcaccgaacggagttgcacgtcggtatccggatcgagcccgtgctcggcaagataatagcgcagcagataattgtgcatcgaatagtcgaatggaatggcgaacttcatgcccttccagtcctttggatcgcgccgatccctgtgcttcatcgccagcgtgatgccctgcccgttgatgttctcgatcgcgggcaccgtgaacgggatcgcgttggcccctaagccaagcgagatcgcgatcggcatcggcgccagcatgtgggcggcgtcgtattccttgttgatggtcttgtcgcgaatgaccgcccagccggcggtcttcaccacctcgacattgagcccctgcttggcatagaagccgagcggcgccgccatgatgatcggggtcgcgcaggtgatcgggatgaagccgatcttgaggtccttcttctccggcgaccctgcttcggcgaacgcctccgtcgccgtcttcaacgggaagaattgcgacagtgcggcgagcgcggtcgcagccccgaccgacttcaggaaggcgcggcgtgcgacatcctgcggaaacaccgcccgcatcaccgcggaggcaacgatgccttcgtaccgcttctcctcactcacgacaggctcgcagcgcagcgggcgcgcggcatgatcgtgctcggcggccgagcgatgcagcccgcaggcgcagcccgatcgcaccagcgcgcggtcggcgtcgaagggatcgtctgacatggacatgctgcgccccattgtcgcaccgaaacgaggaaagctccgcgatccggttcattgatcggcgtccggccgcgttttgcgccgccggacgccgacaaacatgcaggttctatgccgccttgccggtcacgacggctgcggtcggcaagccttcgtcgatcggcagcgccggatcgcgcgaccactcgttccaggagccgaaatacatccgcacgtccttcacgccggcgttcttcagcgccaggaaggtgttcgacgcgcgcgcccccttgaagcagtagagatagaccggcgtggtctgcgagatgccgacggtggcgcattcggcaaggatctcgtccttcgacttgaagcgcgggccctcgccggtcggcttcatcatgcggtaccattccagccacaccgcgccgggaatgcggcccttgcgcgggcagaaatccttcccgtaaggcgacgagctttcgccgatccactcgtcgacgtcgcgcacgtcgaggatcgcgacgcccggcttgccgaccgcagccagcatcgccttggcgtcgatcatgatgtcgccggcctccggcacgatcgcgaacgcagccttcgccggcaccgcgacgtcggtggtgaccggcaggtccgccgccttccaggcatcgaacccgccatgcaggaccttgatcttgggatagcccagcatcgccagcaggtaatagccgcggcaggactggccgaagccggaattcatcgactgctcgtagatcacggcggtctccttgccggacaggccggcggcgccgaaggcatcggcgaacttggtcttcagcgcgtgcatgccctccggcgtcgaggtcgcgaggtaagtgaagatgtcatgcacattgaccgcaccgggcagatgtcccgccgcataggcatccggattacgcgtgtcgatgatgacacacggttctttcttgacgagctcggcaagttcgccggcggtgatcagaacgtccgtcatggcagcctctcctgttgcatggttgctagtcttggtggtcccgaacttgtttgagcatgatctcttcggaaaaccggtccccgcttttccggatcatgcttcagccgtccgccagcatcttgcgcagctgcttggtggcgggcgtgacgatggcgacgaaataggcttcgcgaagcctgcgctgggcgcggtggctcatcaggtagccgcgcgcgccgcaatggagcatcgccgcatgcgcgaccgcgacgctggcatcgccgatgcgcagccgcagcgcgacgaccctgcgccagtagctgtcatcgccattgtggggatcctgcgccagcgtcatcgcctccttctcgaactcggcatagagctcgcggaattgcagcggctgctgcggcagatagcggttgatatgaccgagcggcgcatggacctcgtccatgatgttgatgcagtcccgcatcagcccgaggcccatgccgacttgcaacaggatgaatccggcacggaccttcttgacgaagggtgcagccggctcggcgaggatcaattcacccggcacgaagacgtcgcggaactggacgccataggtacccgtgccgtccatcgccaggaacggcttgcacggcgtcagcgtgatcgcgggatcggagcagtcggcaaggaacatcaccgtctcaccagcctcgccgcctgcgatgccgtcgtcctcgcgctcgaagatcgtgccgaagtaatggccgggcccgaggttcgacacccacggcagcgcgccgcgaacgatgtaaccgccgtcgaccttgcgccccctgagcttcagccgctcgatgccgaagaagctcttcatcgggttggagagcccggtgccgcccagcacccgcccgcgggagaagcagtcgccgaagcgcgcggcgagcttcagattggtggaattggcgacgtaccagaccagcgtgttctggcaccaggccatgaaggcggtggcgccgcagacctcgccgatcgcggccatcgactggatggcccagcgcaggtcggccgggccttccagcggcacgtggctgctccacgcgccgatttcgccgagccgccgcaggaattcgccgggatagaccgagccggcatcgatcgcggatgcaagcggcgccagttcctgacgggcgaggcgcgcgacctcgcccgcgatcgtcggtgcgggatctcgcgttgcgacccgcgatattgccagtgagctcatggatgatctccgcaccttgaattgcctgccaggcgcctaggcgctgacctcgagattgacggggcgcgtgaaggtgttggcgaccggcgaccacttcttcacatgcgccaccagggcgtcgatctcgtcctgtgcgacgccttcgcactccatgtcgaccttgacgcggacgtcggtgaagccgaccggcttctcactgacgtcgccggtgccccataccgctgtgatgttgaggtcgccctcgagctgcagctcgagcttgttgacgatccagccgcgatgcacggcgttggcgtgcaggccgaccgcaaggcaggagccgagtgcggcgagcgaggcctccgagggattgggcgcggtgtcgtcgccgagcaggcccggcggctcgtcgacgatgtagggcgcgaggttgcggatgtaattggcgtgacggaacttgccctcggccaccgtcttgcacttcaaggtcttgacgaccttcgggttggccttgccgttggcaatgagctgctcgagcccgcctctgtcgatcggcgcgagacagccggtcagtgcggttttttgagcgacagcggtcatcagttttctccctagggcgatggaaatggtcaggataccgaacggtctgtttcctgcacgaagcgtgccaatcatgccccaggtcaaaagacgaaattccgcagacgcttaggcgcgcctgcctgccgattgaccagggcgctgctgctcaatcgccaagcaaatgccgcgcgccggcgattattttcagcgcatcgatgcgcgcatgaagatgcgacttgatgattttgccgcgctccgatttactgccgcgcatggccaaatcgattgcgaagaaaaaacctgccgcggcgttcagcgccggcgacgatgaatcggcgcgcgggcggctgctgaatgcggcgacgcatctgttctgcaagaacggcatcaacgccaccgggatcgatgcgatcatcgacgaggccggaaccgcgaagaccacgctctacaaattgttcggctcgaagaccaacctcgtgcatgcggtgctggagagtgaaggccggcagtggcgcgactggttcatcggcgcgatcgaggcgggcggcggcgatgcgcagaccaagctgtcgcggatattccctgccctgaagacctggttcggcgaggagcgcttctatggctgccccttcatcaacgcggtcgccgagcacgacaaggacgccaagcagttccgcaacatcgcgctgaagcacaagaaggtggtgctggcgcatatcgaaaggctcgccgccgagatgggcgctaccgagccggccgtgctggcgcaccagctcgcgctgttgatcgacggcgccatcgtcgccgcgatggtatcgggtgatcccggtgtcgccgacaccgcagggcttgccgcgggcaacctgttcgccccggccagggcgaagaaggcaaaacgcgccagcagcgccgccgaactcgtcgccctctaggcggccgatcgcttctccacggtcgcaatgccgcgcaacagccgcccgagcaggtccgagccggtgatgatgcgcttctgcccgctccacaccaggatcagatcgtgctcgatcacgtcgtcgcccggcgtctccggcaccaccttcatcaacccgatgacgtcgccgagccgcgccttggcgtcacgcacgatgatcggccggtgccaataggcggtcggatcgctttcgagttggttgaacagcgcatcgcgcaggaagtggtgggcatcgagcacgaacaccggttcacccgcgagatcggtcacgatcacccatttcatccccgacgcatcgatccggcgcaggaacggatcatctggcacgctgtcgaatttcggcagcacgcagcgctgattggcgagcggcaggctgaggatgctggcgggatcgatcgcctcgccctcgtcacacaccgagatgtcgtcgaggtcgaggaagttctgggcgccgatcgcctccaccttgctgatgtcgccgccgtcgacgacgtggcgggcgatcatctgccggatatcctgctcgcgcagataggtgatgccttccgagccgagccaccagtcgagcaccatggccgtcggcttcgccagcggaaacagcacgatgcgatagaagttcaggaacggcaggaaccgcgcggtcatcgccagcgcgttgcgcgagaaataggcctgcgggaatatctcgccgagcagcgtgatggcgaaggccgagaacaggaacgcgcccacgccggccaacaccgagtccgacaacagcgtcagcagcacgttggtggtgacattgccccagatgatggtggcgaggatctgattcgaatgccggcgaagctcgagcacgcgcgccgcgttggcattgccgctgtccgcctcgatctgcagccgcaacaggctgaggctgaagaccgcgagattgaggccggcgaacaatgccgactgcaggatgcaggcggcgatcccgatccaggtcgcgatgatcccaagataggccatggatgccccggctcactgttgcggcgtttcgccgccatcacagtcgaacgaggtgacagccgaatgaccgcgccgtgatccctccggccatcatccaaacggcgcgccctgctccgccatcagaccggcggcggcatcgacgatcgccgtcatcgacatcaagtggcaggtcgccgatccgacgcgcccggtgcggacaacgccttgccgaaccagcgcctggccgatccccggaaagccgtcggggtagccggccgcgacgtcgaagcgaacccagcgccgctgtccgtcgaccgtcatggcggagccttccgcgattctcggcagcgacggccaagccttcagctcggacaggtgcagggccgtgcaggcgtcgaagccggcaccgagcagcagaatgcgcgccgccgatcggtagagaacgccgagcggtccatcgtcgccgaacggctcgccgagcgactgccacgccgtgatccactccgcttcgggaccaagggccgcgaaggagcaggtcggatgcaggctgcgccgcgcccccggccagctccggaacaattcggcgacggcgcccatgtcgcgggtcggcgtggtgcgcggatcgaacggcggcacgccttcccggatgatcccgatccaactctcggggacgggcggcgcgcgccaattcgcgggatcgctgagctgcgacgactgcgcgggcatcaccagcgtgccggcgtcggtgaccgcatcaagcaaggcgcgcactaccgcctcggcgccgcccgcgacccagccgagcgcgctcatcgcacaatgcaccagcagcgtttcacccggcatgacgccgagcagtcgcaggtcgcgcatcaggctgtgctgggtccgcggctcgccggtcgcggcgacgatggtatgctcggtcattcgatcgttcctgcggtcgttcccgcgaaaccgcggctcacgaaatcgcatcgagaataccgcatcctgccggaccggccacggcactgacggcgcgcagcggcgatgcgagggcgcgccaatttggcgcatccgtgcggtttacttcccgtcaagcacgccgcgtgatcggcggcgtccttaaaggcctgttaggcccgctgggatcagttgccacgtgaaagtacggggcaagaacaatgcagtccgaaacaggacgatacagccagccgcgctggggcgtgacgcgctggcttgccgatgccgggccgggcgtgcccgacgacatccgccaagcgctgatcggcgatctctacggctcgctgccggtattcgcggccggcgcggtcaacacggtcgcagtctcggccgtgattgcgatccgcgagccgaccgcatggttcatcacctgggtcatcctcgagctcgtcatctgcctgtcgcgactggcggtgctggtggctgcgcatcgcgcggcgcgcgagcgacggccgacgccgaccgatctgcacctcgtgctcgcggtcgcctggagcgccagcgtcggcttcggcatcctgatcagccttgccagcggcgactgggtggtcgcgatgctggcctcgctgtcggccgcggcaatggtcggcggcatctgcttccgcaatttcagcgccccgcgtcttgccggcaccatgatcctgctcagccttggcccgatcgtgccgggcgcggcgcttgccggcgagccgctgctgttcatcgtcttcctgcaggtgccgctgtatctcacggcgatgacggtcgcggccttccgcctcaacaagatgctggtcgcgaccatgcgcgccgagcgcgagaacggtcatcttgcccttcacgacaccctcaccgggctgcgcaatcgcgccggtttcgtcgccgcgctgaacgccaagctcgaggccccggccggaaacggccggccgttcgcgctgctgttcttcgacctcgacaatttcaaaccggtcaacgacacctatggtcacgcggccggcgaccaggtgctgatgctggccgccgagcggctgcggcgcgcgctgccggagaccgacgtgatcgcgcgacttggcggcgatgaattcgtggtgctggcgaacggcgtcaccgccgagcaggcgctcgccgtcggccagcgcatcatccaggccgtgacgatgccctaccggctcgccgacggcgtctttgccaaggtcggcgtcagtgtcggtgtcgctgtctcgcccgagcacggcaccgaggccgaagagttgctggcggtcgccgatgccgcactctatgaagcgaaatccgccggcaaggcccagtgccgcatggcctcggtcaccaccaatgtcgccgcgctgcgccggctgacgaaacaggcccccgcgcccgcccgcaatcgcggcgccgcctgaaaacgaggtccggcggaccgcctaaagatcgaagttcgtcggcagcatcacgacgtcgcggatggtcatgccgcgcggccgggtcaacatgaagatcacgacctcggccacttcgctcgcctccagcaggctgcccgacgctttggcttcctgaagcttctccgccggccagtcggcgagcagcgcgctgatcaccggcccgggcgagatcgagccgacgcggatgccgtgcttgaacacctggcgccgcaccgtctgcacgaagcagttgatcgcccatttcgacgacgcatagaccggctcccacggcgtcgggaaatgcgcggcaagcgagctcgtcacgatgatgtcgccggttgcccgcgcgatcatgtgcggcagcacgtcgtgcacgttcttcatcaccacgttgacgttgaggttcagcatccggtcgatcgctgtgctgtcggcatcgacgagatcgccgccgacatagatgccggcattggcgtgcaggatgtcgagctggcctgctttctccagcgcacgcggcagcagcgtcgcgcaggccgcggcatcgagcaggtcgatgaccagcggaatcaccgcatcaccgtgtctttccgccagcgccgcgagcgcggtggcgtcgcggtcgaccatcaccacgcgcgcgccggccgccagcatcgcttcgctgctcgcaagtccgatgccggatgccgccccggtcaccgccgcgaccttgccttccaattgcttcgccatcgtctccaccctgtcaggtcagtgcgacaggcatggcaacacatcgcggtcgcgatgtcagctgccatgcggtgcacgacggcgggcgggtccagcgctcacaggcggagcatcggtggccgcgtggcgaagcggcggcgcagccattttgccgccggcccggccggccgctgcttgtgccagaccacttcgagcgcgaccggatgcgcgccctcgtcgaattccagttcgggaatggcgaggtcttcggcgacctgcgaactcgccatgatgtgggccgggatcagcgcccagccgacgccgtgcttgaggatctgcaggatcacccaatggctctcgacccaccacacctccgccgcgacacgcagccgatgccgttcggtgccttcgttgcgcaccgtgaccatgatctggcgatgccgcttcagctcctcccagtccacccgcccatgcgccagcggatgggtcttgccgcagacgagctgcaacggcacccagccgatggtcttgaagccgagctcgggcggcagctgctcctgccgccacatcacgccgacatcggccttgccgtcgagcacgagccggctgacgtcctccatgatcggaaacagcagctcgagttcgacatgcggaaagcgcgtggcgaattccgcgaacagctcgcccaccgcgctctccggatagagctcgtcgatcgccaccaccaggcgcttctcgacatgcgcctcgaagctgctggcaacgccgatcaggtgctcgcggcgatcgaggatcagttttgcctcgggcagcagtcgcgcccctgcttcggtcagcaccgggttgcgcccggtccggtcgaacagcgcaatgccgaggtcggtctccaggtttgccacgtgcgtactgaccgccgattgcgccttcttcaaaagccgcgccgcgccggagaacgagccctgctcggcggccgccacgaaggattcgagctggtccatggagagggacatctatctcttttccagatattatctaactttataatcccacaatatcagatagaaacccgatcacaacgacaagaaagggttttcaaaatgtctatgcgttccttctccgaccggatcaggcacgcagtcctgttcgaactgatcggtatcgccatcttcacgccggcagcggcctggctgttcaatcagccggtcgcccatatgggcgtcatcggcgtcgtctcggcgacggtggcgacgatctggaacttgctgttcaatctcggcttcgaccacgcgctggtccgcctcaccgggcgtgtcgtcaagacgatgccgatccgcgtcgcgcacgcgatgctgttcgaggccggcctgatcgtgctgctgatcccgttcgtcgcctggtatctcggcgtctcgctgtgggccgcgctgatgatggatatctcgatcgtggcgttctatctgatctacgcgttcgtgttcaacatcgcctacgaccgggtgtttccgctgccccggcccggcgcgcatgatcgcacggtgacccgggccttgccggcctgatcgacctcaacgcgcggcgcagtggatcatttgatccgccgcgccgctgcgcatcctgacaccgccgccaatattgctgctggtagcgactacgcacaagttccgcagcgccgcgcacctaaactggtttgatccggatcaaccagcatggaatgcttgaagccgagacgcccgtcagaggctgccaaacggccaacaatgccaaaacggccaacaagaagaagcggaggactacaatgccaaggaaccgttcgatccagctatcacgccgtcagctcatcaagggcaccgccgccgcgtcggccacgctgctgctcggcaagcctgcgatcgccaaaggcaagaccgagatcgtgatcggcaacatcgacgcctattcgggaccggctgcggtctattcgtcgatcggccgtacgcccggcggctatttcaagatgatcaacgagcaaggcggcatcaacggccgcatgatcaaatacatcacctatgacgacgcctacagcccggccaagaccgtcgagcaggcgcgcaagctggtcgagagcgacgagatcgacgtcctgtttgcgccgctcggcgcccccaccaatgcggcgatcatgaaatacatgaaccagaagaaggtcccgcacctcttcatcgcctcgggcgcgaccaagttcggcgactacaagaatttcccctacacgatgggtttccagccttgctaccagatcgagggccgggccttcgcgcagcacgtactgtcgacgcagaccgacccgaagatcggcatcgtctaccagaacgacgatttcggccgtgacgtgctgaagggcttcaaggacggacttggcgcgaagacgtctgcaatcgtggccgagctgtcgtatgagaccgcggatccgaccatcgacagccaggtggttcgctgcaaatccgccggcgccaacgtgttcatgagcatgaccacgccgaaattcgcagcccaaggcatcaagaagatcgccgagctcggctggcagccggcgcattacatcggcaacaacgcttcctccgccggctcgacgctgaaggccgcgggcttcgacgtgtccaagggcatcatctcgagcgcctatttgaaggatcccgtcgacgccgcctgggacagcgatcccgcgatccagaaatggcgcgccttcctcgacaaatacgatccaacggcggccaagaacgacatctacgcggtcaccggctatctcaccagccagatcctggttcaggtgctcaagcagtgcggcgacgacatctcgtccgagagcattatcaagcaggcggcaaacctcagggacgtcgaatccgacatgctgctgccgggcatcaagatcaacacctcgccgaccgactattatccgctcgagcaactgcaactgacgcgcttcagcggcgaacgctacgagccgctgggaccggtgatcgacggcgggatttcgaaggcgtgatcatctgaagcacgcaccgccctgacgtttccaatcgaccgatcctgaggtagcctcgtccatcctgaacgaggcgagccgccatgctcacgctctattcgtatccgccgttgttcggcgtcgccgacaacaatggctacggtctgaaggtgttcgcctttctgaggctcgccggcgtgccgttccggcacgagcacattttcgatgcgtcgaaggcgccacgccagcaattgccctacatcgtcgacggccacgacaccgtcggcgacagcgagaccatcctccgctatgtcaccgaaaaatacggcgtgacgctggatgcggcgctgacgccggcgcaacgcaccaccgatctcctcgtcacgcgcatgctcgacgatctctactgggtgatgtcctactcgcgctggaaggacgagcgctactggcccaagttccgcgatgcgctcaagcgggagcatccggacctcaccgacgacggcttgatgaaggccagggagttcaacgcgcaacgctatcactaccagggcatcggccgcttcgagcccgacgccgcgatggcccgcgggctcgccgatctcgccgcactggcgaacctgatttcgcggcaaggctatgtacatggcgacaaaccgacatccatcgacgcgggcatctatggcttcgtggccaacatctacttctacgacatcgacacgccgttgaagaggttcgtggtgtcgcacgacgctctgccgcaacactgccgcgcgatccacgcggcagtcagtctctgagcgcgaaacgtcgatcgccacgcatccggcggatggaaacgggaatcggcacccggctttccctgcgccctccgacatcaggacggcgaacaagagatgcaaagctcggacaaatcatgtcgcgagaatgttggtgtatgagccaaagctcgcgcgataaacacagtgtcgtcctggcgaacgccaggacccattaccccaaatctccatcgttgcgcgacgctgtggccgcaatcccatacatcacggaatgcggtggttatgggtcctggctttcgccaggacgacgttggaacgaggtcgcgacgccatcaggcaatcggcgcaacgaccgaggctcaccgcccctgcggaagactcccctccagccgcgccagctcgccgtcgagatcgcgctcgacatcggcaacatgcatgtcgacgacccgatagtccctcgcctcgagccaggcgcggcgcttggcgcggtcggtggcgatggcctcgctctcgttcggattgaccagttcgatcgcggtccggtgcacgaaggagacgaaatcggggatgtgacggccgaccggggtctggcgcttgaactggccggcgaagcggcggtcccgcgtcagcgcctgccacaggatgcgttcggcgtcggtcgggttgcggcggagcagccgggcgaggccacgcaccgtgctggaattgtccgcggtcgcgccgcccccgccctgttcggcgagcagcgcccgaagcctcgtcgcctgggcgccgtcgagcaccccgcccttggccgggcccttgcggccctcggcgatcgccatcaccacgccgtgcagcgtgtgcatgtcctgcttggtcgggtccatccgggtgaagatgttgcgcaggttgaccagcatggtgtcgcgcttctcggccggccgcaggaactcgaccttgtcgagctcggcgacgaggttgtcgaagaacgcctgcatctggtgctgggaggccggctcggaccgttccggcatcgcgaacggcagcgcgcccgcggtcgagagcttgaaccattcatagcccatcagcagcaccgcctgcgccagattgagcgaggcgaagcccggattgaccggaaaggtgatgatgcggttggcgagcgcgacctcgtcgttggtcaggccggagcgctcccgcccgaacaggatgccggcgccgccgccggacgcgacatggccgacgatctcgctggccgcgccttctggcccgaccaccggcttggcctggtcgtgggcgcgggcggtggtcgcgaacaccagcgtgaggtcggcgatcgcctgctcgacggtgtcgaacagttcgacggaatcgatgatgtggtcggcgccggcagcagcgcgctgggcggcgatgttcggccagccgtcgcgcggattgacgatgcgcatccgcgtcaacgcgaaattgcccatcgcgcgcgcggccatgccgatgttctcgccaagctgcggctcgaccaggatgacgacgggaccggcaaggtcgtgccctgccttggtcttgtcggtgccggacatctcacttcactttctgattcaacgtctgaagattttgaatcagcttccgaagcggctgattcaaagtctcatacaggtccccgaaaccagctttgcaccggttttgcgcgggaccaatttctccaagcagataacagggttagccgcgattgcgaatcctcaatcggaatcccgttcgcacaacgccggggtcgccgcttgcgcgcgcttcgccttcggataggctatcaaccacaaccaaagcgaagctgtaaaggcacgcttgagacgccggttgaacggcgaggcaccttgggggagacgacgatgcggggcagatggacgctggcgattgtgggcctgatcttgatcgtggcggggagcctgctcgcccacttcacgcagaccgcaggcggcatccggatcgaggatgtcaggttcaagggcgccaagggcaacaccatgagcgccctgctctacgtcccgccgaacgcgacggcgcagatcccggcgcccggcatcctcgccgtccacggctatatcaattcgcgcgagacccaggacggcttcgccatcgagttcgcccgccgcggctatgtggtgctggcgctcgaccagaccggccacggctatagcgacccgccctccttcgccaacgggttcggtggacctgacggcctcgcctatctccgcagcctgcccttcgtcgacaaggagaacatcggcctcgagggccactcgatgggcggctggaccgtgctggcggctgccgccgcgatgcccaacgactacaagtcgatggtgctggagggctcgtcgaccggcaagccatttgccgccgagggcaccaccagctggccgcgcaacaccgcgctggtgttcgcccaatacgaggaattccccgacctgatgtggggcgtccagctcgcccgcgacgtcaccacgagcccgaaactctgggcgctgttcggcacccaaggcgcggtcgagccgggcaaggtctatggcgacccggccaacggcaccgcgcgggtgctctacacccccgcgatgacccatccggccgagcacatctcgcatgaggcgatcggctacagcctcgactggttcgccaagacgctgaaaggcggcacgccgcgcccggtcgacgaccagatctggttccgcaaggagatcggcacgctgatcgccctgatcggtttcgttgctctcgtcatcgggacgttcgacgggctgctggaggcccagatgttctcccgcctgcggctaccggcggttgccgacggcaccatgccgccgcatcaggcggcgagcggccggcgctggaccacggcattcatcctgtccgccttcgtcccggcgctgacctattacccggccttcgcgctcggtggcaccttcgtcaccccgagcgcggtcctgccgcagggcatcaccaaccagatcctggtctgggccatcatcaatttgctgatcacgctggccctgatgcggttcgcccccaagcgcgccagccgggccggcctgatcggtcaatccgtcgtgatcgcgctggcctccgtggcggtgggctacgccgcgctctggctcgccgacctcgcgttcaagatcgacttcaggttctggatcgtcgcgctcaaattgatgagcgcgaagcaattcctcatcttcctgatctatctgattccgttcacggcgtttttcgtcgtggcgctgcacgtgctacaccggaatttctcgaccatgagcgcgccgcgcggggcgctttatctgaccaacatcctggcgctgacgcttggcttcatcgtgttgctggtgctgcaatacggcacgatgtggctgacggggaagctgttcaacccgctgccggaccccggcttcgtgccgctctcgaccatcgtcgcgatccagttcgtaccgctcttggcgatcgtggccgtgatcgcgacctttacctggcggcggaccggatccagcctgccgggcgccctgatcgcgggcctgttcgtgacctggtacatcgtggccgggaccgccactcaggtcccattttaggtgaaatgatgggctgaaagtgcataaccggtgcgctttcgcccgtccccgggcagtgctatagcgcaggcgtattttccaacccgccgtcaaaagcgcgctgttcccaagagggcctctccgtcatggcaaaaatcaaggtatccaatcccgtcgtcgagctcgacggcgacgagatgacccggatcatctggcagtacatcaaggacaagctgatcaacccgttcctggatgtcgaactgctctatttcgatctcggcatggaataccgcgatgaaaccaacgaccaggtgaccatcgacgccgccgaagccatcaagaaggtcggcgtcggcgtcaaatgcgccaccatcacccccgacgaggcccgggtgaaggagttcggcctgaagcagatgtggaagtcgccgaacggcaccatccgcaacatcctcggcggcgtgatcttccgcgagccgatcatctgcaagaacgtgccgcgtctggttccgggctggaccaagccgatcatcatcggccgccacgcctatggcgaccagtaccgcgccaccgacatcaagttccccggcaagggcacgctgtcgctgaagttcgtcggcgaggacggcaccgtgatcgagcgcgaagtgttcaaggcgcccggcgccggcgtcgcgatggagatgtacaatctcgacgactccatcatcgatttcgcgcgcgcctcgctgaactacggcctgctgcgcaactacccggtctacctctcgaccaagaacaccatcctcaaggtctatgacggccgcttcaaggacatcttccaggacatctacgaccgcgagttcaagaaggaattcgaggccaagggcctgacctacgagcaccgcctgatcgacgacatggtggcctcggcgctgaaatggtccggcggctatgtctgggcctgtaagaactatgacggcgacgtacagtccgataccgtggcccagggctacggctcgctcggcctgatgacctcggtgctgctcaccccggacggcaagacggtggaagccgaagctgcccacggcacggtgacccggcactaccgcgagcaccagaagggcaaggagacctcgaccaactcgatcgcgtcgatcttcgcctggacccgcggcctcgcccaccgcgccaagctcgacaacaatccggagctggcgaagttcgccaccaccctggagaaggtctgcgtgtcgaccgtcgaggaaggctacatgaccaaggacctcgcgctgctggtcggcgccgaccagcgctggctctcgaccaccggattcctcgacaaggtgtccgacaatctcgtgaaggcgatggccacctaaaggctgccgtcttggaatgatgggtgcgagcatgaccaaggcccttgtcagagccgtcgtgctcgcatcattcgcgctcacagggtcggcggcatcagctgccgatcccctgccggacgccgtcgcggcgcctagcgagattccggtcctgtcagtccatgccgagggtgtgcaggtctacgagtgcaagccggtcaccgacggcaagctcgcctggtcgttccgcgaaccggtcgccaccctgatcgccgacggccgcaccgtcggccggcactatgccggcccgaactgggagcatgtcgacggcagcgcagtgaccgcccgcaccaccggcagcgcgcccggcgcgacccctgccgacatcgcctggttgaagctcgaagtgatttcccaccgcggcaacggcctgttctccagtgttgccacggtgcagcggatcaacacctcgggcggcgagctcagcggcgcctgcgacaaggccggcgcgcttgggagtgcggcgtattcggcggattacgttttcctgcggagagactgactagtcccggatgccgccgtcggcctcgccgggcggctgggcgatctccgcgacggcgaggtcgccgccggccgtgagcggatcggcgagccgcgcctcggccgtctcccggacatgtgcggcgagcgccggcatgcgctcgatcagggcatggaagtcctgcgcatcgagcagcaagagcttggtcttgcgcgtcgccgttaccgtgccggagcgattggtcctgcgcagcagcgcgatctcgccgaagaacgtgccgtcggcaagccggacccgctggctcggcaggtcgatctcgacctcgcccgccgtgatgaaatacattgatgaggccgcctcgccgcgccgcaccagcacctcgccggcctcgatggtctgcgagcgcaacaggcgcatgatgtcggcgatgtcggcagcgccaagatgcgagaacagcggcacccgcgccagcatgccccaggtcaccacgaagtcgcggcgccggacctcctcggcgaacgcgctcgagatgatcgcgaccggcagcgcgatcatcgcgaagccgaccacgatcgcaaccacggtgacgatccggccgagcggcgtcaccggaacgacatcgccatagccgaccgtgccgagcgtcacgatcgcccaccacatcgcctgcggcatggtgccgaacttgtccggctgcaccttgtgctcgatggcatagagcagcgcggcgaacagcagcacggcgccggtcaggatcacgacgcagccgaacagcgtgcgccgctcggcatgcagcgccgccagaagcgaacgcatcgcgggcgaatagcgcaccagcttcaggaacggcagcatgccgaacagcaccaatgcgatcttgtcgttgatgaccagggcgacggccgacggcaggaacgcgagcaggtcgatcacgccgagcgccgagcaggcgtattccagccgcgccttcagcggcgtcatgtcgcgcagggaatggccgaccacgctccagagccgcgcggcgtattcgagcgcgaaggcgatgactgccgcgacttcgaccgcggtcagcagccatccgaactgtgcatcgatctcgggcaccgaggccaggatcgccgccagcacgtcgacggtgatgatcgcgacgatgaacccggcaaaccgcgagccgcccgaatgcggcaaatcatcgcgctcgagtagctcgtaaagacggtcacgcagtccgggatggctgatcgtgggcttgagcggagctgtcgccacgatcagcccttccgtcaggcgccggccatcgcttgttcgatcgccgacagcgcggcgtcggccttggcgccatcgggcccgccggcctgcgccatatcgggccggccgccgccgcccttgccgccgagcacctcggagcccttgcgcaccagttcgaccgcgttgaaccgcgaggtcagatcggcggtgacgccgaccacgatgccggccttgccgtcctcggtgacgccgacgatcgcgaccacgccggagccgatctgcttcttgccgtcatcgaccaggctcttcaaatccttggtctcgacgccctcgaccgcgcgcgccagcagcttgacattgccgacctcgcgaacggccgaggccgcgccgttcgacgcaccgccgccgcccatcgcgagcttcttccgggcatcggacaggtcgcgctcgagcttcttgcgctcctccatcagcgctgtgatgcgcgccgggacgtcctcgatcgtggtgcgcagctcggccgccgcggtcttggccagcgccatggtgtcgttggcatgcttgcgcgcatgacgcccggtcagcgcctcgatgcggcggacgccggaggcgaccgcgctctcgctggtcaccgagatcaggccgatgtcgccggtgcggcggacatgggtgccgccgcagagctcgaccgaccagccgagcgcgttctggccatgctcgcgggcgctcttgcccatcgagacgacgcggacctcgtcgccgtatttctcgccgaacagcgcacgcgcaccggcctcacgggcatcgtcgacagccatgacgcgggtcgtcacctcgtcattctcgagcacgacatcgttggcgatgtcctcgacccgggcgagttcttcgggcgtgatcggcttcggatgcacgaagtcgaagcgcaggcgatcgggcgcgaccagcgagccacgctgcgcaatgtgatcgccgagcacctggcgcagcgcctcgtgcaacagatgcgtcgcggaatggttggcgcggatcgacgaacgcctggcgtggtcgacctcgagctgcagcgccgtgccggccttcagcgtgccctgctccaccgtgccgacatgcacgaacagatcgccggccttcttctgcatgtcggtgacgcggaatttgacgccctcgcccgtgagcacgccgatatcgccgacctggccgccggactccgcgtagaacggcgtctggttcagcacgatcgcgccgctctcgccggccttgaggctatcgacctcggcgccgtccttgaccagcgccgtcaccgcgccttccgcgctctcggtctcatagcccaaaaactccgttgcgccgagcttctcgcgcagcggaaaccagatcgtctcggttgccgcctcgcccgatccggcccaggaggcgcgcgccttctcgcgctggcggttcattgcatcggtgaacgatgcctggtcgacgctgatgccgcgcgacttcaacgcgtcctgtgtcaaatccagcgggaagccgtaggtgtcgtacagcgtgaacgcggtgtcgccgtcgaacatgtcgcccttcttgaggccggcgctcttctcgtcgaggatcgacaggccccgcaccagcgtcttgcggaagcgggtctcttcgagctgcagcgtctcctcgatcagcttctccgcgcgcaccaggtccggataggcctggcccatctcgcggaccagcgcccagaccaggcgatgcatcagcggctcgctcgcgccgagcagctgcgcatggcgcatcgcgcggcgcatgatccggcgcagcacgtagccgcggccctcgttcgagggcagcacgccgtcggcgatcaggaacgccgacgaacgcagatggtcggcgatcacccggtacgacgcgacgttctgcgcgttcggcccatgaccgagcgccgaggaagccgcatcgatcagatggcggaacagatcggtctcgaacacgctctcgacgccctgcaggatgcaggccatacgctccaggcccatgccggtgtcgatcgagggacgcggcagcgccacgcgctcctccttcgtcacctgctcgtactgcatgaacaccaggttccagaattcgaggaaccgatcgccatcctcttccgggctgccgggaggtccgccccagatgtgctcgccgcgatcgatgaagatctcggagcacggaccgcacgggccggtgtcgcccatcgcccagaaattgtccgaggtcgggatgcggatgatgcgatcgtccgagaagcccgcgatcttcttccagtagccggccgcctcgtcgtcggtgtggtagacggtgacgagcagcttgtccttcttcagcccgaaatccctggtaatcagattccaggcgagctcgatcgcgcgttccttgaagtagtcgccgaacgagaagttgccgagcatctcgaagaaggtgagatggcgcgcggtgtagccgacattgtcgaggtcgttgtgcttgccgccggcgcggacgcatttctgcgaggtcgtggcgcgctgatagccgcgcttctcgacgccggtgaagacgttcttgaactgcaccatgccggcattggtgaacatcagggtcgggtcgttgcgcggcaccagaggcgacgacgccacgatctcgtggccgttctccttgaagaagttcagaaatgtcgacctgatgtcgttgacgctgctcatgttcatccaatcggaaaaatggggccggccagtcgcaaaaaggcgtcatttccggccgaacgcttttagacattgccagctgcggtgtccagaaactgtgcagccggatcatgggcttgccgcggcagcacaaagcccattggatagttgttgcagctgcgttgacaggcttggcggcggcgtgttttctactggcctgttaacccgtcacgtcgggagagaccggcctttctttgggccggcgccgaaggagcaaccgccccggaaactctcaggcaaaaggaccgcgtgacgtctgacatctggaaagaggcgctggggttgtccccgattgcgtccgccgacgggataatactctcaggcacagcgacagatggggctttctgcaggttcctcaaggggaaataggtccccgtgggaaccgcgagggccctgtgatgcttgcgcacgaaacttccccgctgaaacagaccccgctgcatgcgctgcatctggcgcgcggcgccaagatggtcccgttcgccggctacgacatgccggtgcagtacacggccggcgtgctcaaggagcacctgcacacccgcaaggacgccggcctgttcgacgtgtcccacatgggacagctcgtgctgagggccaaatccggcaaggtcggcgacgcggcgctggcgctggaaaaactggtgccgcaggacattgccggcatcgcgccgggacggcagcgctacgcgcaattcaccaacgatgacggcggcctgctcgacgatttgatggtcgcgaatttcggcgatcatttgttcctggtggtcaacgccgcctgcaaggccgaggacgaggcgcatctgcgcgcgcatctcaccgatgcttgcgagatcctgtcgctggctgaccgcgcgctgatcgcgctgcaaggcccgaaggccgaatcggctctggcgaagctttgtgcagatgtcagttcgatgaaattcatggacgccggcccgcgccgcgtcgccgacatcgactgcttcgtctcacgctccggctataccggcgaggacggttttgagatttccgttccggcccacaaggcggaggccctggtcactgcgctgctcgacaatcccgacgtgctgccgatcgggctcggcgcgcgcgacagcctgcggctcgaggccgggctctgcctctacggccatgacatcgacacgacgacgacgccggtcgaaggcgcactggaatggtcggtgcagaaagtccgccgcagcggcggcgctcgcgccggcggttttccgggcgccgacaagattctcggccagttcgcacaaggcgcttcccgccgccgcgttggtctgaagcctgagggccgcgcgccggtgcgcgagggcgccgcgctgtttgccgatgccacctcgtccgagcagatcgggaaggtgacctcgggcggcttcggcccgagcctcaatgcaccggttgcgatgggttatctgccgaccgctctttccgccgccggcaccaccgttttcgccgaactgcgcggccagcggctgccgctgaaagtcgcgtccacgcccttcgttcccaatacctacaaacgctaaacgccagaggatctctccatgacgacgctgtacacgtccgaccacgaatggctccgcatcgagggcgacgtcgccacgatcgggatcaccgactacgcgcagtcgcagctcggcgacgtcgtgttcgtcgaactgcccaaggtcggacgcagcctgaagaaggccgaggccgccgccgtcgtcgaatccgtcaaggccgcttccgacgtctacgcgccgatcaccggcgaggtgatcgaggtcaacgaggcgctcgccgccgagcccgcgctggtcaattcggatgccggcggcaaagcctggttcttcaagctcaagattgccgacaagggcgagctcggcggcctgatggacgaggccgcctacgccgcgcacaccgcctaaaggatcacgccatgaacgcgcccttcaagccgatcaacgaagccgccaccgatttcgtccgccgccacgtcggcccctcaccgcgcgacgtcaacgcgatgctggagacggtcggcgccgcgagcctgcaggcgctgatgaatgagacgctgcccgcgtcgatccgccagaaggcgccgctcgatctcggccgcgcgctgagcgagaccgaggcgctcgcgcatatgagcgagctcgccgcgcagaaccagatattcacgtcgctgatcggccaaggctattccggcaccatcctgccggcggtgatccagcgcaacatcctggagaacccggcctggtacacggcgtacacgccgtatcagccggagatcagccagggccggctcgaagccctgttcaacttccagaccatgatctgcgacctcaccgggctcgacgtcgccaacgcctcgctgctcgacgaggcgaccgcggccgccgaagcgatggcgctcgccgagcgccactcgcaggtcaaggcgaaggtattcttcgtcgacaaggaggtgcatccgcagacgctcgccgtgatgcgcacgcgcgccgccccgctgggctgggcgctggtggtcggcgatcccctcaccgagctcgacaaggccgacgtgctcggcgcgttgctgcaatatccgggcacgaccggcacggtgcgcgatctccggccggcgatcgcatcgctgcgcgccaagggggcgcttgcgatcgttgccgcggacctgctgtcgctgaccctgctgacctcacccggcgagctcggcgccgacatcgcgatcggctcggcacagcggttcggcgtgccgatgggctatggcgggccgcacgccgcctacatggcggtgcgcgacacgctgaagcgctcgctgcccggccgcatcgtcggcctgtcggtggattcgcgtggtgcgccggcctatcgcctcgccctgcaaacccgcgaacagcatatccgccgcgagaaggcgacctccaacatctgcaccgcgcaggtgctgctcgccgtgatcgcctcgatgtatgcggtctatcacgggcccgagggattgacccatatcgcacgcggcgtgcatcgccgcaccaccgtgctcgccgccgggctgcgcaagctcggctttacgccgaccagcgaggcgttcttcgataccgtgaccgtcgaagccggcacgaagcagatcgagatcgttacgcgcgcgcaggcggaacggatcaacctgcggatcggcgcgaccacgcttggcatcgcgctcgacgagaccaccacgccggagaccgtcgaggcggtgtggcgggtgttcggcggcaagctgagctttgccgagatcgaggccggcgcacgcgaggcgctgccgaaggagctgcggcgcagcagcgccttcctcacccatccggtgttcaacacgcaccgttcggagaccgaactgctgcgctacatgcgcaagctcagcgatcgcgacctcgcgctcgaccgcgcgatgatcccgctcggctcctgcaccatgaagctcaacgccaccaccgaaatgatcccgctgacctggccggcgttcggcaatctgcatccgtttgcgcccacggatcaggccaagggctatcacgcgcttttcaagcggctggagcagtggctgtgcgacatcaccggctatgacgcggtgtcgctgcagccgaactccggcgcgcagggcgaatatgccggactccttgcgatccggggttaccatctcgcgcgcggcgagccgcatcgcaaggtgtgcctgatcccctcctccgcgcacggcaccaacccggcctcggccgcgatggtcggcatggacgtcgtggtggtcgcctgcgacgcgcgcggcgacgtcgacgtcaatgatctccgcgccaaggccgagaagcattcggccaacctcgccgccgtgatgatcacctatccgtcgacccacggcgtgttcgaggagcatatcagcgagatctgcgacatcgtgcatgcgcatggcgggcaggtctatctcgatggcgccaacatgaacgcgcaggtcgggctctcgcggcccggcgactacggcgccgatgtcagccatctcaatctgcacaagaccttctgtatcccgcatggcggcggcggccccggcatgggtccgatcggcgtcaaggcgcatcttgcgccctatctgccgggccatccttcgacagacggtgcgacagcgcacgccatcggcccggtgtcggccgcgccgttcggctcggcgtcgatcctgaccatctcctacatctacatcctgatgatgggcggcgaagggctgacgcgcgccaccgaagtggcgatcctcaatgcgaactacatcgcagcaaagctgcagccgcatttcccggtgctgtaccgcaacgagcgcggtcgcgtcgcgcatgaatgcatcgtcgatccgcgggcgctgaagacgaccagcggcgtcaccgtggacgacatcgccaagcggctgatcgactacggcttccacgcgccgaccatgagcttcccggtggcgggcacgctgatgatcgagccgacggaatcggaatcgaagttcgagatcgaccgcttctgcgacgccatgatcgcaatccgcaacgagatcgcggagatcgagagcggccgctggaaggtcgaggcctcgccgctgcgccacgccccgcacaccgtgcacgacatcgccgacgatgtgtgggaccgggcctatacccgcgccgagggctgcttcccggctggcgtgtcgcgctccgacaaatactggagcccggtcggccgcgtcgacaatgtctacggcgatcgcaacctggtgtgctcgtgcccgccgatcgaagattacgcggaagccgcagagtagcgcggcctctgttgcgggatgtcgtagcaaccgtccaccggggatggttgctacgaggtccggttcaaaacgtcaaaaacaaccccatgcacagtagggattggggcgactggtcatccgcaggcactagatccagtcggtcagacgggtagagccaacgggtccgcgattcgcgccatcgcagggaatgcgcgggagcgaccgacgctgcggcaggaggagacatgcgcgaggaattctggtttcacttcccgtttcgcgtccgctattccgaggtcgacgcgcaggccgtggtgttcaacgcccattatttgacctatttcgacaccgcgatcacggagtatttccgcgcgctcggctacgactatctcggcgaagtggcgcgcaccggcatcgacttccataccgtgaagtcggtggtggagtacaaggcgccgatccggttcgacgaggacatcgaggtctgcgtccgggtcgcgcggatcggccgctcctcgatcaacctggcgctggcgatcttcgccaagggctccgacgacctgcgcgccaccggcgagatcatctgggtcgcgaccgaccagacaacccaccaatcggtcgccgtcacggaggatctgcgggcgctggtcgcaagccgggagaaggcgctggcgccaggttgagttgactacggcttggtcagcgtcggagcaatgcgccagagattgtcgttggtgaggtgcgtgccgccccaccagcgatcgatcgggttatggctgctgaagtcttcctggtgcgcgatgatcgcttcgccgaactcggtcagccgcggatagcttgcagcgtagcgcgcgtaccaactccttttgctctgcggtcgttcgagatcggtcactgcaggcgacggaccatccgtgaggccgtcgagcaatgagaaaagttcgagttccccgaacacatttccggggcgccagaaacgatgaaggagtccaagcgctgaaaagccgtcgtaacgtgcgatcagctcaagaagtcgcatttcagttgcgccaagccccgtcgtgcgggagggcaattctgcaaccaaggcaagctgcgccgacctcagaaatggcagtgagctaaggtcactctgcaagcaatccagaaaaggcattggggtggctgcgcgatacgccgaccagattgcacttccggtattgagttcgaccgggccgacgtcgaccgtcaacacatcctctggctcgggcatctgttcagccggcatcgtcagatcgaaatcaacaagacgcaacttcaatctggccgctgtctcgggatgatatccgaaaaaagccagaaggaaggccagctgcagctgatcgttcggatattgttcgaaccagagctcgataacgtcatacggttcgcaatattcgacgaacgaaaggtgcctgcgagcccgcgcttcatcggagaacaatctccatgaacaccaatccgaccaatgacgacccgggccctggcctgaacgcgcgccaaaataatcttcgaactcttctgccgggggcaacggccccccaacgaagcgaaagcgaaattcaatgaccgcttctgccagacctgagcgcgcgagacggataccggaaccagtcagaatcaaacgcttcatcatccaacctcgccgaacccaaaacaaaacgggcgccgaagacgtcggcaactcaacgtcctcagcgcccgcttgcagcgaaatgattgagccttactcttccgtcggctcctcgccgtcggcgtcacgctccggcgtgccggcgaggatctgctcggagatcaggccggagttctgccggatcgcggcttcgatcttggtggtgatgtcgggattggcgcgcaggaaggccttggaattctcgcgtccctggccgagccgctggctgtcataggagaaccaggcgccggacttctcgacgaggccggccttgacgccgaggtcgaggatctcacccatcttggagacgccctcgccgtacatgatgtcgaactcgacctgcttgaagggcggcgccagcttgttcttcaccaccttgacgcgggtggtgttgccgaccacctcgtcgcgctccttgatcgcgccgatgcggcggatgtcgaggcggaccgaggcatagaatttcagcgcattgccgccggtggtggtttccggcgagccgtacatcacgccgatcttcatgcggatctggttgatgaagatcaccatcgtattcgacttgttgatcgaggcggtgagcttgcgcagcgcctggctcatcagccgcgcctgcaggcccggcagcgcatcgcccatttcaccctcgagctcggccttcggcaccagcgccgcaaccgagtcgatcaccagcacatccaccgcacccgagcgcaccagcgtgtcgcagatttccagcgcctgctcgccggtgtccggctgcgagatcagcagctcgtcgatgttgacgccgagcttgcgggcatagaccggatcgagcgcgtgttcagcgtcgatgaaggcgcagatgccgcccttcttctggccttccgccacagtgtgcagcgccagcgtggtcttgcccgacgattccggcccgtagatctcgacgatgcggcccttcggcaggccaccgacgccgagcgcgatatcgagcccgagcgatcccgacgacaccgtctcgacgtccatcgaacggtcgttcttgccgagcttcatcaccgagcccttgccgaactggcgctcgatctgggagagcgcggctgagagggccttggacttgtccatggaggatccttcgacgatacgcagtgcggtggcggacatttgggatgtgctccttatggcgaggattcgctagcgggacaaacgggcgggtgagatcagttggaatgcgttgttgataggaacctcgtaccacgtttgttctatgttcgcaatatgttctttccggcatgcgggcgctgtccgtatttgaccccgagtgtcctaattcgaatctcgcagtgtcctaaatcgtttggccggaatgtctggggctggtctcagtaggactactgacctacgccccgtcttgggcataaccagtctctatagggcggcaaactctttccctacgtggttctccataggtagacacaggaacaaaaagtaacatgggttacttcctctccgggcgggagcagttgatccatgtgtgagcagtgcattgagctagataagaggatcgcgcattacaccgaacttgcggtgcgcgttactgatgaaaggacattggacggcatcgctagattgctggccgatctgcaaggcaaaaagcgcgagttgcatcctgatacgctcggcgcgccggattgaccgggtgcgatgaccaagaggacgtggtgcggccgccttgtgaggtccgaagtattggtgaaccttactctgaaccggcaagactgacctataaccgggattttgttagtaccctctcgggctggaaggccgcgccgcctgtaagagtttcaaacgggcggcgtagctttatttgctccctaggaacgcttcgaccttgcgaccgcttaccaagcatcaccggctccggctctgttccatcggcgtcggttccataaggcgtcgttggctgagagagagactaatgctccggcctagagacggagcggtcctatgtccgcctactatttcgatttacgtgttctcgatgaagtgtcggccgacgaagagggcaccgaccttgcatcgatgagcgatgcgcaagacgaagcggcgtatgccctcgccgatctgcttaggcaacagatgcgctctactgacggcagccccttcgcgcaatatctagtggtcgaggttcgtgacggcagcgtaccgctatttgaagctaagttctcattcgagaccaagcgcaccaagcagtaaggccgcctcagttggcggcctctttcggccagtaccgacatgcgggtgctgtccgtatttaagccctgcgtcctaagttgattttgaaagtgtcctagttcggtttaagcgaacagaaaccacggcctagctgacgtcctcggtaggatttaccgtgtggcggtcacggaatgttctgcccatccccggatgttatacggccataagattcactatgcagtttgtgccagttgccgcccggggttctccgtgggtgaacggagttcctatctcaactagcgcatgagattgacggccggcgctgtcttcccactatggggttcggtcaggactgcggggatcgtcaatgaaggacatgaaggcgcacttggagaagcttcgggttgaggctgaggagtgcgaactaatcagcaagctcgcgaccaacgcgaccaagaaagagctgttcgccaaactggcggctcaccaccgcgcgctggccgacgaggttgagcgggcgatcagttctggctccaatagctaagcgccgctaggaaccttacattcgtctgaaaattaagttccccgttccgggcaggaaaccgaacgagggaaagggaaatgggtccgaaacgtcgccgtgtgaagcagacaaattcacttgaagaaagacttctagagcgcgccagacagctacgccaacaggccgcagcactctccccaggtatcgagaaagaagcactgctaaagcttgcccgacaagctgaagctggtgcaggcatgaccgaatggttgcgcgctcccagccttcaatcgcagacctgacagtaaggccgcctcagttggcggcctctttcattctggaatgtcctcccgttcggagcgccggcgcgccgcttcggcatctgagcggcgcgagttcctggatctgcgcgcccgcgtgatcggccagcccgagatcagcacggcgaggcgttgacgggcatcaagtcatagggtgcagcgaccgcgacaatgtgcccatggcaaagccgatcatctttcgatgtcctagcaccagtgaaaacgtccaacatttgctggaagacgatgacgcggacgatgaggactacgaggccgtcgagtgcttagcctgcgccaagatacacttcatcaataaggcgaccggcaaattgctgggagagaaatagaccgcctcagttggcgtcctctttcatatcccccggcagtctcgtctccttagctatccacaggtcgcagcgacggacctcccaaagaaacggccccggcgagggggcccagtggaaacgagagagccgcgtcacgcgaacggcccgaccgggtcaatctgaaaatcatccgaactgaaattcgtcccggcccgaaaatcctagctcgcttcgcacccgcagcaattccggaaaagcacgtagtgtcctcatttgttctaccgagtgtcctgactaggacagcaccgagatgcgggcgccggccgcattcaagcccccgtgtcccaagctggattcgaaactgccctggatcggattaagcgaacaaaaaccatagcttagccgatgttctcagtaggactaccgagacggcatcgcaaatgttctagggctattattttctgtgggtcgcgatccgttccggccgcgccgcgcgctccggaggtcggcaaggaaagctgaaattgctgtcccgcgcgaacgatccctccgctcatacaatcaggagatttctctgagaggccgccaccagttggcgggctcctcttcaaatttttcggcgcgcttccgcatgatgccccgccctcggtcacgccaacgcggtgaagcgcggcggcccggtcgttccgcgtcgatcatccgtgatagccaatttgggacatgtgctccggcacaaattgtataggcttccatctatcaggattttgcacaccttcctggggctagggccggcgccgtccgcgtgtatttcaagcgggcggcgtcgtgctgtcgggcgttcgccgcaatgaaaatcttcccgatcgcggaatgcgtcgccggctcatgatcggaccgtctgggctgtgtcgcgacaccatccgtagttctccgggctagaacaaagttccgcgcatagaccgatcggattcgccaaaagtgatttccataatcaatgggttagctgcaggttcagtgacaccggaaatgtcgttggcacaatctgcatactaccttggtacccctcctgacgcccaaaaaaactacgtagccttcacgggaagacccgggttccaccagtgttcgtaacattagcccgccgaagccaacgcacggattttgcgtcgcaacacacggcgtaccgccggcggaacggatccgcttcgagatccacaacgacgccccggatggcgccgccgttcacaacatcgcttgacgggtgttaatcatcgctgcaacctttagtttaattatcaacgaccgccattcctccgcggaaccgttccagatgattcataagggtgtcgaattcagcgtcacgcagctcacggccggcgtctggaaatggcgtttccagatcggcgatcgggtcttcaccggcaagaccgaagcgaaactcgacctcctggcgatccgccgcgtgcagctgcggatcgaccgcgagttgaacaatctggggcttggacggagccgcggacgcggcgatcaggattgaggtgcagccggttcgaccggctccgctgcgcgggccggccttacgcttcagtccgcgctggccagccgccgcatcgtgaactcgatgtcgccgccgggcagctcgcgccagctctcgacggcgctcatataggcggccttcggatagcgcttgagaaaggcgcgcgcccgcaggcgggcctgatcgcgcggcaggctgaaggtctcgcgcagatagccgtcatccggctggcgccgcgcggccatccggctggcgagatcgcgcggacgaaacaccattgccgctactccggaccaactgacgacgccccaatataggggcggcgccgggagaatccgagtctgcgggaggtggacggggccccggcccggcgctactgcgcggagcttccggtcttggttttcggcttggcgggatgggccgccgccttcggtgcatcactgcgcaccgcgccccagggatcggacgatcccttggcatccggaatcttgctcagcgagttcttgtaggcccggtcgttgaccgcgtcctggtccttctcttcctgggtcttggtcttgacctcaggcatcagattgacgttcggcatttgcgcataggccggtgccgacagcagcaccgcgaccgcaactgcgcacaaaactctcataacaacgctccctgcattttcgtcagcggtatatcaccgcaggaaagcggtcgccaagcatgtctggcccgcgcgcttgtccctgtcctagagatgatctgacttgcaggatttcggcgactgcatccagtcgtcccagatcggaccgcatcgcgtacacccaccaagcgcaagcccgatcgcaatcacgccacccagcaagaccaacctgcggaacatgtacgcccccaccactgacgagaggcaatcgggcgccgaaactggggcattttcaagccgggcatggcgcttgcaacacagcgccagcgtatcggaacgcggtgccggcgcgtcggaacgcagcggcggcgcgatggtttgaccgggcggtcccccaaactacactgcgcaacaaagcagaaaaggaatcgacgaatgactttggcgatgagctgggacgaatggacgcggcacgacgggacggcgctcgccgggcgcgtccggagcggcgagctgacgccgcgggagctggcggcccaggcagccagcgccgtcgccaaggtcgatcccgcgctctcgggcgtcgtcgagttgttcgacgacgtgatcgccgatccggcgcgcgacggcgccgacctccacggcccgttcgccggcctgcccttcctgatgaaggatctcggcccgaccttgaagggacggctgcaggagatgggctcgctgatgatgcgcggcaaccgcgccacggccgacacgttcctgaccgcgaagctgcgcaaggccgggctcaatctgatcggccgcaccaccacgccggaattcggggtctgcagctccgccgagaatcccgcagtctatgtcacgcgcaatccctggaacaccgactacaccacctgcggctcgtcggcgggtagcgccgcgatggtcgcggccggcgtcgtgccgatcacgcatgcgaccgacggcggcggctcgatccggattcccgccggcgtcaacggcaacatcggactgaaagtgtcgcgcggcgtgttctcgctcgcgccgcatctgtccgatctcaccggcctggtctcgatccagggctgccagtcacgctcggtgcgcgacaccgcggccttcgtcgatgcctgccggggacctgcacccggcgagttcatgccgttctggacgccgccggagccgtacaccgcgatgatcgcgcgcgaccccggccggctcaagatcgcgctgtcgcacgcctggggcgactatcgcgcgacgccgcatatcgccgccgagctcgagcgggtcggacgcttcctcgaaggcctcggccatcaggtcgattacgcattgccgtcgctcgactatgcggaagccttcgcggcgcagaccacctgctacatcagcaatttcgccgtcgtgatcggcaacatgctcgccgcgcgcggcctggagcggccgccggcggacctgatcgagccggtcaacatccggatctgggagcacggaaggcacttcagcttcgccgatcgcgcgcgtatgcaggctgtcttcaacacgacatctcgcggcttcggcgccttcttcgaggattgggacatcatcctgacgccggtcaccgcgctgccgacgccgaaggtcggcaccacggaatatctcaccatctcggacaacccgtcggtgctggactggttcggcaatctctggcgcaacttcgccttcacgccgctggccaatctctgcggcatcccggcgatctcgctgccgctcgcgaccaacgagcacggcctgccgctcggcatccaggcgatcgcaaagcaggccgacgacgggctgctgctgcagctcgccgcccagatcgaacgggcgatcgacggcaaatggaatgacggcaagcggccgggcgtgcatgtcacgcgcaattaggcgatagattagagaacaataaatcaacaggggaagcgggacgtcatgcagcaggccggtgaattcgggatcgacgaggcgaaacgcatgctcggcgacgtctttgcgccctgggtgcaggacctcaatctgtcgatcgagcagttcgagttcacgccgccgcccggcaacgcggccgattggcagcccggcgccatcctgcgcatgccgttctccgagcggctgtgccgcaccggcggcatcgtctgcgggcaggcgctgatggcgttcgccgacaccgcgatggtgctggccaacctcgccgccaacaagggctatcgtccgatgaccacggtcgaccagaccacgcatttcatgcgcgcggtgaccgcctccgacgtgctggccgacgcccgcgtggtccggctcggccgcaccatgagcttcggccgcgtcacgctctcctccgccaccgacaacaagccggtggcgatggtatcgagcgcgttcgcgatgttgccgggataggacgccgaggcgacgcgcgtgaatgaactacgctgccatcaccgtcatcctgagagatgtgaggctttgtccgcatctactgttgtcgtcgcccggctcgaccgcgcgacccagtacgccgcggcctatcggctcaagcacgaccgtctctggaatactggatctcccgcatgcgcgggtgatggcactgggtaagctgtttgacagttgaatcagacagcagcaaaacccatcaccgtcatcccgcgcaaaggctccgcctttgtcgctggaggtgcgagcggagcgacctgcgcagcaagcttacttgccgagcacggcctcggcggcgttgacgatgctgatggtcggattcttgccgcaataggtgccgaacttcctggcgttctcggtaaacacgtcggtgtcgatgatcgcctcgtcggaatcgcccttgtaccagccgtccatccacaccagcaccatcttgatggtgtcgtcgccgccctcgacgaactgcttgcaggtcatggtcgagagatcgaggacggtggcgctggccggcgcggacgacagcgcgagcgcggcggcaaacatgatcgaggcagtgatcttcatcgcaatctccatgggcaatgatctgaaatgaacaggcgctggaagccctgcgcgtccgctcgcgacctcgtaagcgaagcgttgcggcgaacgcaagcatgacatcgtgcgcgttcgtctgcacgtcgtttcggtgcacgcattgagaaccgatgtcgctgaaacgatgtcgctgatttgtcatgcagcggcgcaacgcgcgcgctgccgcactacgccgcagcgacgcgacgcctcctgcgccaacgccagagcagtccgaccagcacgatcaccaccacgccggccgcgagtgccttcgcagcaaaccgtccaccgggacgatcgatcaagcgcgcgagaagcgaagcaccctcgccctgacgcggcaggcgaaacgcgaccacgctgtcgccgatcgatgtgccgccctcggaatgcccgccggcgccgatcacgacatactgctcgcctttccacagataggtcatcggattggcgacgcctggcacaggaagccgaccgagccacaattgctttcccgacttgacatcgaacgcgcgcaaataggcgtccatcgcgccggtgaacaccagtccgcccgcggtgatcgcaacgccattgagcagcggcgtgccggtcttgagcgcaatgccgagcggcgcgagatcctcgctggtgccgaccgtcgaatgccagaggatctttccggccttgagatcgaccgccaccgtctcgccccacggcggcttgttgcagggcgtgccgactgaggtcattgcaagcgcccgcgacatcgcgaacggcgcgccctcctgctggccgaaatcatggccgggcggcgggttgaagcccttcgcctgctcgcgcgggatcaacgtgatgatatgcgccgcgtggctgacattggcgagcaggatctggttgaccggatcgaacgccgcgctgccccagttcacgccgccgccggtcatcggatagacgatcgtgccacgcgtcgacggcggcgtgtagaggccctcattgcgggattgcgcgagcagcttctcgcaagcggcgcttccgaggcccggcagcaggccgccgatgtcatccgcagtcatgcgctgcgtcaacaaaggcggcacatgggtcggaaacggctgggtcggcgacagctgctcgccctcggcgccgttctgcgggaccgcgcgctcctcgaccggccacaccggcttgccggtgtcgcgatcgagcacgaacacaaaaccctgcttggtcggctggatcacgacatcgcgcatgccgtcgccggtgtcgatccgcgccagcgtcggctgcgccggcaggtcgtagtcccagacgtcgtgatgcacggtctggaatgcccacgccaactcgccggtctcgatccgcagcgcgaccacggaattggcgtgctcgtcattgccggggcgcttgccgccccagaaatcgggactcggcgatgtcgtcggcaggaacaccaggccccgctcctcatccaccgacatcggcgcccagacattgctgtgaccggcctcgatgccgctgtgcaccagcggatcgaaagtccagcgcggctggccggtccgtgcatcgaaagcccgcaccgcgccgaccggcgcgtcgacccgccggttgtcgccgatcgcggacccgaccaccaccacgccgcggcctgtcaccggcgccgacgtgatctgaaattcgcccggccattccagcttgatcccggcgtcgatcttgatctcgccgccgttgccgaaatccgcgcatggcttgccggtcctggcatcgagcgcgatcaggcgcgtgtcattggtgccggtgaagatgcgcgacttgcaggccgcaccatcggctgcacgatcatcggtccagtgcgcgacgccgcggcagacgaagcggttggccggccgctgcgccatgctgatcttcggatcgaaacgccatttctgcgcaccggtgccgggatcgagcgcgatcacttcgttgaacggcgtgcagaagatcaggctgtcctcgacgaacagcggcgtcacctcgaacttggtgcgcttcatgacctcgggcggacgggcgtcgagatcgccggtgcggaattcccagccgcgcaccagcgcgccgacattgtcggacgtgatctgcgtcagcggtgagaagcgctgtccgccgcgatcgcctccccaatactcccaggcgagcgccggctggacgcacagcaccagcgcggcaaacaggcgaaacaggaactgcattgcgtcctcccgcaggatgcgatcatcggacgccgcatctcatgcgggaaagcctttacgcgatcggcgcgtcagtatccacccctgcgatacccgccgccgtcgttgccgcgataaccgccgcgatagccaccaccgccgatcccgatgccaatgccgattccaacaggcggcccgacgggctcatagaccaccgccggcggcggacggcgcaccaccacgacatcgtcctcgaccacgtcgcgcggcggccgcttgccggcacgccgcggcggatcgggctcggcatgcttctcgacacgcttcttggtgggcgcgacggcggccttctgctgcgggggcggcgcggcgttgcacggacaggtcggcgccgccagcgcgacattggtcgcgggcacgctgagcgctgtggccggcgtcaggtcgggacggtaacgcagccgttcgatcatcttgcgcgccgtggccgtgagatcgctgtcgggatacagcaccaggaagctgcgataggccgctgcggtgttggcgaggacagcgtcgctccacgccaccatgcggcgatgccggtcgagccagtcgcgcgcctgcaggccgcgcggcgtgccggcgaacacagcggcaaaggcttcataggcttcgtcggtgccgtccaccacgatcagttcgttggcagcctcgatcggcttgccctgcaggtcgcgcttccattcgtcgacggtgcgcttggccgcggccggcgccggtgccggtgatgctgagggacctgccatgaagcggaagtcgtcggtgagcgacgaggagtcccacggcgtctgccggccatcggtcgccttgttcacggcaaggcggacgcgcttgaaggtatcctcgatcgggatccccggctccttcgccgaagccagcaacgcggtcgtgtatgggctgttggcgccgctgccgtcctcggcttcggcgcccggtgacgtcgagaacgacacgaaagtgccgggcgcaccgatcctggcgtcgacgatggcaagcccgtgccctgcggtcttgctgagctccgggaacggattgttgcggcaggcatcgagcagcacgatgcgcatccggctcggcaccgaggtcagcgtgttcaggatgtcattgagacggaccgcctggatcgggatgtcggcctcacgtttcggatcgacgtcgaccggcaccagatagttctcgccatcgatctgcaggccatgcccggcatagaacaccagcgccacggtgtcggcgcccttggccgccacctggccggcgaaatcgctgatccgtgcgcgcatctcgtcctgggacaggtccgacgccgccgtcaccgcaaatccggcatcggtcagcatttgtgacacggccctggcgtcgttggccggattgggcagcgcgggaaccgacttgtaggcggactgcccgatcacgagcgccagccggctctctgccgatgccggcacggcaccgaacaggatcgcagccggaacgatcaggccgaggagcgaacggcgaagcatggcggcctccgacacatgatatcggagatgggtctgacgccgtcagacgaaggttcatgccgtgcggcaaagtgcagccaccggcgccgattgtgatgtcgcgacgtcacaggaacccgataggccccggctatcgcggctgactatttcggcttcttggccggatcagcggccggcttggtgacgccccagggatcgtatttctccttgggctcggggatccgatcgagcgcggccttgtaggccttctcgtcgatcttgggcttctgctccgtcttcctgtcgtcgcctccgccgccccgccggccctgagccagggtcggtgtcgcgatcagcgccagaatgacggcagcaaccgtgaagcttttcatgtcagtctctctcccccgcagccgtagaaacatccggcaacacctctaccccaaagataacttgtcgctcgacatttgttgatcgacaaagcgtcgcgtgagccgaattcagccccaccaggggggcgcaatgttggcggcggaacattaaatccggtcgatgggacagggacaagtacacctggcggcgctgctggccggcgccgccttgatattgagcggctgcgggctggcggacagccacgcggtgtggccggagatgttgaaggtcaaggccaccgagccggcgccgctcgagacgcctccggatgtcaagcggctggttgcgggcaagctggattcagtgttcaccgccggctcgcagccgtcccatgtgcgggtctccgctccgctgcacgacccgcgcggcaccggctggactgcctgcgtgcgtgccgaactgacttcggtgatcggcaagccgctggggacgcagacctatcgcgtcttcatcagtgaaggcgcgatcttcgatcgccggcaggtcgaggccgacgacaattgcctgaccgagagttacgagccggtcgagagcaccgttgcggcggacgcgcagaagagcaccaaaccctgagcctggacggggttgctcatcacgagccgcatcctgaatggcccgttaacattaccgctcaaattgcccgatggcctcaacggcattttccatctctttgctctagcgttgccctgacgaacgccggctgatctgccgtgcgtgcgcatcggggaaaagggacgtggccgatattgctgaccaggcaatgatccgccgtgcatcgcgcaaggatgccacggacgatcgcgcgttgccgccgctgtctgcggcgccggtcggcgcatggcgcgcgcttgccgagcgcgcgatcgagcccaacggctactaccaggcggactgggaattggcggtcgatgcctccgcccgcggtcgcaccggcgcatcgctgctcagcgccaccggcgatgccgggcaattgatcgggctgttgccggtcgtgccatttcggcgaatctatcggatccccttgcctgcgctggtcggcgccgagccctacggcacgctgtgcacgccgctgctggatcgcgacgccgccgagcaggccgccggccagatactgcagcaggcacgcgatgcgggcgcgcatgcgctgatcctgcgcacgatgtcgctcgatggcccggccatggcggcgatccgcacggtgctcgcaagggatggtttgcagccgcgcctgctgagcacctatcagcgcgcgcagctcgatgcgacgcgtgatgccgacgatttgctgcgcgacgcgctcgggcccaagaagctgaaggagctgcggcggcagcgccatcgcctgtccgaccacggcgcggtgcgcttcgatgtcgcgcgtacgccgcgcgccgtcgcagtggcgctcgagacgttccttgcgctcgaagctggcggctggaagggccagcgcggcaccgcgctcagccagcacgccggcgacgccgccttcatccgccgcgcgacctcggcaatggccgagaccgggcgctgcgagatcgtcacgctgcatgcgggcggcacggccgtcgccggcggcatcgtggtacgccaccaggaccgtgcgttcttcttcaagatcggcatcgacgagcgctttgcgaagcattcgcccggcacgcagctgacgcttgagctgacgcgccatctctgcgccgatccggcgatcaattcggccgattccaccgcggcgtccggccatccgatgatcgacccgatctggcgcggccgcttcgcgatcggcgacgtgctgctgccgctacgacgccgcgatccgatggtcggcgccattcatgccgcgctgacgctgaacaatgtcgcctacgaggccgcccgcaatgccgttcgcttcatccgcagtcagcggaagccggcctagcacacggcggcgcaagggcctcaaccgacggtttaccctttcgtagccatgcagacacatcaggaaacaaccggcttagccgtcaggttggtgtcagctggcccttttagcgtcgcgatgcgctgtttctcaggcggcgcatgcccttgccttggaaagcctcatccgatggaaacgtcgggtgaggctttctgcgccaccgtccgctactgcaacggcgagtgcggcgccggcagcatgatcgtcgagtgcatctcctcgagcagctgcgtgcccttgcccaggaattcctgccaggccggatccttcagcgcgttgccgcgcgccgcggcgcgggcattgagatcgggataggcccagatgtggcagacctcgttgggctgcccggcatcggtggcccagaggccgacgaccttggaatatttctcgcgctcgggcatcacgccggtgatcaggtcgagccattgcttggccgcgccgaccggcttggcgcgataattgcggaattcgtagatgttgccggtcgtggccggcgccaccggcggaatgatcgcattcatcagccggacgtcctggcgcatcagcagcggacgaatcaccggaatgtactcgccggtccagcgcggatttttcgcaagctccgcacgcagccgggcccgctcgttgagatcggcgtagctccacatgtgcatgacctgattgagcggcccgatctcggtgatccagtagccttccagcttgccgaaattatcggcgcggatgtcgcgcgagatcgtgctcgcggccttcaccatctcgccgacggttcctggacggaccgtgtaggtgcgcagctcatagatcatggttgtctccctgatgatttcggatggaagtgggcaaatgaaaaagcccggcgcgagccgggctttcgatggggacccgcggactactctgccgcctgcgcgttgatctcggccgagacctggcggatggcgcgggcgagctgctcggccggctgggcgccggacaccgcgtatttctgcgcgaacacgaaggtcggcacgccggagatgcccttctcggccgcctcctgggcctgcgccgagaccagggcaacgtcctcgtcggaggcaagacgcttgcggatgtcgtcggcgtcgagcccgacatcggcggccgcctgcaccagcacattgctgtcggtgagatcgccgccgtcgcggaagtacaattccatcagccgctgcttcatctcggccgccttgcccttggcctcggcccaatggatcagacggtggcaatcgatcgtgttgggctggcgcttgacgagttcgggatgataggtcagcccctcctcgttggcggcggcgaccacgcggccggcgatgcccttgtaggcttcgaccgagccgaacttggcggtcagatattcgtcgcggctgatgccctcgcgcggcacccaattgttgaggaagaacggccgccagtgcacctcgaccggcacgtcgggcaccagcttgagcgcatcctcgatgcgatgcttgccgatgtagcaccagggacaaacgacgtcggagacgatgtcgaggcgaagcggcttcagatcgctcatggcagggttcccggcaaatttggaaccccaaaggtaggccgaaagcgccccgagacaagccgctatttcatactggctgccatctgccgcatccgctcggcggtcagctcatcggccggaaagaaggtctccagcgccagttcctgcagcgtgatgtcgaccggggtgccgaacaccatggtggtcgagatgaagctcaggatctcgccgttgaggctgagcttgaagggcagcgcgacattgttgtcggtggtgatcggcgccgagcgcgccgggatcggataggacttcaggtcctggtagagcttgagcagctccggatccgccgtcgcctcgcattgccggtgcagccgctccagcagatgcgcagcccattccgccagattgacggtgcgcggcgccaacccctccgggtggaaggcgagcctgaggatgttgaagggctggccgagcagccgctgcggcacgccctcgagcagcggcgccaccatgcgattggcggagaccagattccagtgccggtcataggccagcgccggattgggctcatgcgccttcagcaccaggttgattgcctcccgcgccgatttcagcgccggatcctccagcgaacgttgcgggaatgcgggtgcgaagcccgcggcgaccagcagcacgttgcgttcgcgtaggggcacgtcgaggcgctccgccagtttgaggaccatgtcgcgcgacggcgccgagcggccggtctcgacgaagctcagatgccgcgccgagatctcggcatcgacggcaaggtcgagctggctgagatggcggcgctgccgccattcgcgcaggtgctcgccgatcaggacgggttttgcgggctcggcccgcgccagggatgcatgtgcgttcatggtgcaaaacctaccatgcggaattcgcccgttccattacgcccgaggtaatcgaattggcgcgccggccggctcatcttccacggcacaggagatgaccatgctgatgctgtcccttatccgcgccttcgccgtcctgctgccgtggctggtccatctggccacctggctggtcgcgcgctcgctcaacatgccccagccgctcgtgcatgcaaccggcctgttcgtgttcgcgcaggtctacgcggccgagatgagggtcggcaaggcgctgtgcccgccgcggctgtggcgtcagcttcagtccctgttgcgctgaccaacccctccaacccaaggagatgctgccatgatccattcgtccccgctgctgcgctgcgctttgcttgccgatgccgtgttcagcggcgtatccgcggtcgcaatggtgctcgacaccagcacgctggcctcgctgctcggcctgccggacgcgctgctgcgcgagaccggactgttcctgatcgcctacaccgcgctggtcggctggctcggcgcgcggacctcgctgccgaaaggccccgtgatcctcgtggtcgccggcaacgcggcctggacgctcgccagcatcgcgctgctgctctcgggcgcggtgtcgccgaatctgctcgggaccatcgtcatcctcgcccaggcgatcgccaccggcgtgttcgccgagctgcaatatgtcggattgcgcaggagtgagggtgcggtgacggcgtaggccactcatcgtcattgcgaggagcgaagcgacgaagcaatccatctctcggcaagcaagggatggattgctaatctcgttattccggggcgcgcccttggcgcgaacccggaatccattgtgctgcagagattatggcccgatggattccgggctctcgcggagcctgtcatcgggccgcgcttcgcgcggacccgttggcgagccccggaatgacgaggggagacttcgtctgtatctttcgcccacccccagcatcactccctgcccgccggcgacgcccatctcgaggctcgcggcgatgcggcgcgcgcgctcgatgaaatgaactgctgcaacgggcgggcacagttcatgtgcggtcgcctcgaacagctctagccagcggtcgaaatgcgcggcgtcgatcggcagcttcatgtgcttgaccatcggcgtgccgtgatagcgcccggtcatcagcgcgaccgaggaccagaatgcgcacatctgggcgaggtgcggctcccaatcggtgatcctggcctcgaacaccggcccgatcatcgggtccctgcggaccttggcgtagaatccgtgcaccagctgcgcgatcatcgcctcggtgattccggtctgcgcgacgatctcggcggtgatctgctcgcggcgctctgctccggtcatcgctcaaatcctaaatatgcattttaaatgcctatttagactgctatagctgatccgccaagcgccgatttcgaagggcttccatgcgcctgacttcattcacggattttgcgctccgcgccctgatgcggctggccggcgaaccggatcgctcgtttgcgaccagcgagatcgcggccgagttcggcatctcccgtaatcacctcgccaaggtggtgcgcgacctcgcagaggccggcttcatcgcgacccagcgcggcgcgggcggcgggttttcgctggcgcggccggcggagacaatcaccctcgggcaagtggtccgcgcgctggaaggcggcagcgcgctggtcgaatgtttcagggatgatggcggggattgcgtgctgctgccgcgttgccggctgaaggcaaggctcgctgcggcgcgcgaagccttcatgcgcgagctcgacggaaccacgctggcggaatgcgcctacctgccgcggccggcgcgcgcatcatgacggtcggcgaacaggatcggtcgagggactcaggcttgcagcgggcgcgcggcgccgcgcttcgaagggaccgcccgcctaccggccgcagcagtgaggctgtggccgttgaggtgtttgccgttcaaggccttgccattcagggtcttgctgtttgcagtcttgccgtttgccttggcggccttcttcgccttggccttccgctccttggcgcggctttcagcaagtttctcggcctcgcgcctggccttacgttcggccttttcctttagccgcagccgctccgccctcgcctccgcgcgctgcttcttgcgcttcttctcgcaggcgtcgcacttgcagccgatcggcttcagataggctttgaaatagtcggttccgtaatcgtagttgatctcgtcgcccggctcgatgtccttgatggcgcggatgaacaccttgcgtttacgcgggcgaacgtcggattccgcgttgggccggcaggcgtggttgatgtagcgggcgacgttctcgcggaccgagccgtcgatggtccagcggttggtcagctcgaacaggtatttgttctcgatcgcgtcctcatcctttttcttggagtcgaggatcggcccgaaatagcggatgatcttggtgcctttcttgatcggcttggtggcgaagaggccgaggccggtacgggagcgaccaacgcgatagggcttgtgcgataatgatgcgggcatgatgatcgaggctacggcacgccggggcgcacgcgacaaagttgcgaagccgcccttctaggacgattccgcgcgcctgtcaggtgtttcccgcgtgtctgttgaaccttccacagattgcatatgtcagacacaaagtaacgtccggatcgcaggtttcccacgtgaaatacccggcttttgcaacaatcattatggcgctcgcctgcgcaaatcccggtcaggctgcctctgagacgatcagcagcagctacacctcgaccgcaaatccggccttgtggtgctgatcaacgagggcgatctgcgcgaagtggtctcggtgggctgaaatcgcgcggctgaggcgaaggaaccggcggcgcaggcctggttcggcccgttcagctcgaccggcgaaacggtcgaatggcgcgccgcaggcagcaagccttttgcgatcatccaacgctggcagatcgccgacaacagcgaacaggacaagcacggcggacccgtctcgcgggcgatgctcgcggtgacgcggctgccgccgggcgatgtctgtcacgtcgcttatgtcgatgtcgccgccaatcccaacgccaacgaactggcgcggcaggccgccgacggtttcgcccgcgatttccaatgcggcacggatcaggtgaaggcggtcggcgagagcggccggaccacagcgctcaccaggcgctgatcgcggcgacagcatcggtcacggccgcggctgtctgcttcccgatcgacccagcatcgcgctcaacaacgtctccgcggacgtgcctgcgggcgcgcgatccaggatcgtcttgagacggccgtcgagcagcagcatggtgaagccgtgcaccagcgaccaggcggaggcgatcgccgcggcctggtccagcgtcagcacctccttggagatctcctcatgccggctggcgccgacgccgcgggtcagccccgcgaacgacgcttccgacgcctcgtgcagcgacggccgcgcatgatcgagccgctcgctgcggaacatcagcccatacatgccgggatgggcctgcgcataggcgacgtaggccttggcgctcgccactcccttctccggcggcgtggccgcggacgcgttcgcggtcgccatcgcctggccgaattgccgaaaaccgatcgccgcgagttcgctgagcaggcccgtgagatcgccgaaatgatgcgtcggcgctgcgtgcgacacgccggcctcgcgcgccaccgcgcgcaaggtcagacccgccagcccgtcacgctcgagcacgcgctcggcggccttcaacagcgcctcacgcagatcgccgtgatgatacggcgtgtcattggccttgcgccgcgatgtcggacgatccgccgcggcacgcgcaacccggcgcgtcggggcccgcgtcgtgcgagccgctttgttttccttggataatcttgccatgacgccgttatatgtcgcaatttttacactgtaaagattttgcttgacgatcgaaggcaccctccctactgatatctttacgatgtaaagatcataatgcagggagatgcgaatgctcgatcaggtcacctcgaacgcggcgcggtccaatctggcgccgatcccgtttgaagccgatgcgccattcctgaagatcaccggcgaactgccgcgcgaattgaacggcacgctgtaccgcaacggccccaacccgcaattcgatgtgccgggcgcacactggttcgtcggcgacggcatgctgcacgccttccatctcgagaacggccgcgccagctatcgcaaccgctgggtccgcaccacgaaatggcaagccgagcacgacgccggacgcgcactgttcggcggcttcggccgcaagctgccggacgctcctgccgacatcacgaccgatggctgcgtcgcgaacaccaacatcatcttccatggcggcaagctgctcgcgctcgtcgagagccatttgccgaccgagatcgaacccggcacgctgaatcgcctcggctattgcgactacaagggcgctatttccggccccttcagtgcacatccgaagatcgatccggtcaccggcgagctggtgttcttcggctacaacgccgccggtccgctgacgccggtgctgtcatacggcgcgatcgatgcgtccggcgtggtcaagcgtttcgaacgcttcgaggcgccctatgccagcatggtgcacgacttcatcgtcaccgagaaccacgtgctgtttccgatcttgccgatcaccggcagcgtgcagcgcgcgatgcgcggacaggcgccctacgcttgggagccggagaaaggcgcctatgtcggcgtgatgaagcgtagcggttcgtccaaggacatcgtctggttccgtgccgagacctgctacgtcttccatgtcatgaacgcgtgggaggaaggcaaccgcatcatcgccgacgtgatgcagttcgaggaagcgccgctgttcaaccatccggacggctcgccgaccgacccgaagaagaaccgcgcgcgctattgccgctggaccttcgatctctcgggcaataccgaccgcttcacgcaaacctatctcgacgacctcaccggcgaattcccccgcgtcgacgatcgtcgcgccggacttgccagcaatcacggctggtacgcctgcgccaaccccgacctgccgatgttcggcgcgctgtcgggcatcgtgcatgtcgacggccgcggcaagcggcttggccattatttgctgcccgccggtgatacgatctccgagcccgtgttcgtcgagcgcagcgccgatgccgcggaaggcgacggctggctgctcgccgtggtctggcgcgcccgcgaaaaccgcagcgacctcgccgtgttcaacgcacaggatgtcgaagcgggcccgaccgcgctggtccatctcggccaccgcgtgccggatggattccacggcaattgggtcggggcggagtagcggcgctccctctccaacacaagctaagtcctccactgtcgcgcccggggcaggttttggccgagaccgggcgcgcgactccggtacaagccggccgctccaacgtccggctcagtcccgaggtgaatgcgcgttgcgcccggcgcggcgcggttcaagaccgccgatcaagaattactgctcgcgtcgaccggagatcgatggaggcggcgggaatgcgtttggattcggctgggtccacggcaacgatccgccggagtgagtcgatgggggtggtgcctgcggccgttttctgcactgatctcgaaaggtcgagatggcgtcgagaccgacgttcaaactatcgctgtcgtctatggtgtctcctaccctaaagcgcagcgttccggtcttttcgaaatcgaccagccacttgtcatcatcttgcacttgaaaggcgtatgaccagccgcccacgtcactgaagacaagcttatcgatcaccgacttgctgtcctcaccgccgttcgacagcgtaacggttggatagcgctcgctcttcagaagttccgcgaatttggcacgctgatcgtcctccatcatcaccgagacttcgatgttcccagacccaggttcacacgaaagggcgacacgaccgaaatcatcggttgcatcagacgcagcttgaacgaggacggactgtttctccgttcgattgactcgccagcggaagatcccctcttgcgccgcgacctttggacatagatccgtcaggagggctatcaatattgccgcacagcacgcccttgtcagccttgtcttgcaattcgccgctgccatgttcgaaccactcatcaatattcttgcctatgcaggacgagttttggagcgacgtcgcttccttcctcgcttgcagctaatcacgccttccaaagcgctagcaactcacggtcggggccagcttgctgcaacaagcccaagctcgaccatttatcgctctcggccaaacacggagcccagcccggacagcaacgttcttcagctgttgaacgagtgacacggatggccgggacaagcccggccatgacgacggcgaagagcacgccggcgaaccatcacgccctattcgattggaataattcacgttttccatgccgcctcatgattttgacactgtaaagatttcgcttgacgcttttctctcccgccgctaggttatctttacattgtaaagattggccttcgaggcttccaatgacgatctttctgatcctcgccccctacggcgctttcgctacgctgatgctggtgacctcggcgacggtgagcctgctctgtgccgcactgatctgccttgccgtcatcgcgttcgacatcgcgcgccgccgcagcatcaagatcctcggcatcggttcggtggtcgtgttcaccgcggtcggcagctacctcaccttcgtcgatgcgacgccgagcatgatcgcggtgaagatcgcggtcgatgccggcatcctcctggtgtcgctcggctcgatcctgatcggccatcccttcacgcggcaatacgcgctcgagcaagtcgatgccaaaaccgcgaagcagcctggcttcctctacgccaactatttgatcaccggcgcctggaccgccgcgacgctgctgatgttgatcagcaacatcgcagtgctctatgtgccggcgctgccgctgtggacgggcctgctggttgccttcgccgcgcgcaacgccgcagtcggcttcacccgctggtatccgcagtatcgcgcggccaagtacggcacgccgccggccaacgcgctgccgtcgcactgaacgctgccataacgataccagaacattcactcgcccgaggaaacggaaaccacgacgatgaagcgcgtatttgccaggctcgcgagcgacttcctctccaccatcgtgttcctggtggtctatctcgccaccgacaacgtcctggtcgccaccggcgttgcgatcgccggcgcggtcgcgcaagtggtctatgcgcgcgtcaagggacaggcgctcggcaccatgacctgggcgagccttgggctggtgatcgtgctgggcggcgcgacgctactcaccaacgatccgcgcttcgtgctggccaagcccgcgatcggccatatcgcgatcggcacgatcatgttgaagcgcggctggatgctgcgttatctgccgccgatcgtgaccgagaccattccggaatacgccaccctcgccggctatgcctgggccgggctgatgtttatcctcgccgccggcaccatcgcgatcgcagcgaccggtgacatcaagctgtgggcgttctacgtgtcggtggtgctggtcggtgccaagatcgccgccttcgcgatccagtatgtcgccttccgcttcctgaccggcagccggctgcgcgccacggcccgcgcctgatcgccgctagcggcgaactaggcgcaagcagcaagatgggttatacccgcgacgctacaaataaccgaggggatacatcaatggcggtggacggaaactggaatctcacgatgacgacgccgatgggcgagcgcaaggcgacactgtcgctggcaagctcaggcggcacgctcaccggcacgcagggcgccgagggcaattccaccgagatcttcgacggcaccgtgaacggcgacgacgtcgcctggaaggtttccatcaccaatccgatgccgctgacgctcgaattcaccggcaaggtcgctggcgacggcatctccggcgagatgggcatcggcccgatgggcagtttccccttcaccggcacgcgggcataagcgcgatcttctagaaccagatctgcatcggcagatcatgtccatccagcggctgcggtccctccggaacgcagccgcttggttcatgggcagccaacgccaccgcgcaggcatccagcacatcgtcgcgcttcgcgccgctgccgatccgcgtgacggtgagccagcgatcgatctcgcggaaacctgctcgcttgagcagcttgcgacggagtgcatcgccctcctccgatttcttgcgcggcagcggcgtgccgccgttcagccgcagaaacaccagctcaggatgcacctcgcggatctcgcgcgcggcattcgcacgcacgaacgcatcgacctccatgatcttcggcccgaggtgccagagctggcgcgagacggcggtctggccgcgccgccgcgcttccttgttcgccttgtcggggtcttgaaattccagccacagccagcgccgcgcaccggtgaagacgcgcgaggtatgcgggcgcaggcgcgcgcgtgcgagacgatcgcaggcgcgctcgccgtcatcggtcatgccgatcgggatatcgatcccggcacgatcgaacggacgcgacagcgcgtccgcgacatcgccgtgaaaggaaagtgtgcggcggtcgccgtcgatgctgacggcgacccagcccttcgaaaagccgtcgaggccgaccgcaatcaacccaggttcaattccttgaagaaatcgttgcccttgtcatcgatgatgatgaaggccgggaagtcgaccacttcgatgcgccagatcgcctccatgccgagctcgggatactcgaccacttcgaccttcttgatgcagtgctcggcgaggttcgccgccgcgccgccgatcgagccgagatagaagccgccgtgcttcttgcaggcctcgcgcaccgcgacggcgcggttgcccttggcgaccatcaccatcgagccgcctgcggcctggaactggtcgacgaaggagtccatgcggcccgccgtggtcgggccgaacgctccggaggcgtagccgtccggcgtcttggccggacccgcgtaatagaccggatgattcttgaaataatccggcagcggctcgcccttctccagccgctcgcgcagcttggcgtgggcggagtcgcgcgcgacgatcatggtgccggtcatcgagacccgggtcttgatcggatattgcgacagcgtagcgagaatctccttcatcggcttgttgaggtcgatcttgaccacatcgccgccgagcgattgctcgactgccggcagatactgcgccgggttgtgctcgagctcctcgagatagacgccgtccctggtgatcttgccgagcacctggcggtccgccgagcaggagacgccgagcccgatcggcagcgaggcgccgtggcgcggcatccggatcacgcgcacgtcgtggcagaaatacttgccgccgaactgcgcgccgacaccgagcgactgcgtcatcttgaggatttcctgctccatctcgagatcgcggaacgcattgccgtcggccgagccgtgggtcggcagcgcatcgagatagcgcgccgatgcgagcttcaccgtcttcatgcagagctcggccgaggtgccgccgatcacgatcgcaaggtggtacggcgggcacgccgcggtgccgagcgtcagcaccttctccttcaggaacgccagcagacgatctttcgtcagcaccgagggcgtcgcctggaacaggaagctcttgttggcgctgccgccgcccttggccatgaacatgaacttgtaggcgtcatcgccctcggcgtagatctcgcactgcgccggcatgttgttggcggtgttcttctcctcatacatcgacaagggagctacctgcgagtaacgcaggttgcggcgcagataggcatcgcgcgcgccttcggagagcgcggcctcgtcgtcgccgtcggtgatgacgttgcagcccttcttgcccatgatgatcgcggtgccggtgtcctggcacatcggcagcacgccgccggcggcgatgttggcgttcttgaggaagtcgaaggcgacgaacttgtcgttgtcgctggcttccttgtcctcgaggatcgagcgcagctgcttcagatggcccggccgcagatagtgattgatgtcaccgaaggcggcctcggagagcgcccgcagcgcctcgcgcgacaccaccagcatgtccttgcccaggaccttctcgacccggacgccctcgctcgtcaccttcttgtagggcgtggtgtcggcaccgagcgggaacagcggggtgtgcttgtagggcggaacgggcttctgctggtcgggaaaggctgagggggcgttcatgagctgctcgtcggtttcgaaaggcccggtccggccgcggggccgccggcaatgtagagccgttctaagcctttttcggacaaaggaaagggaagccggccgtcttccagccatgcgccggagcggcaatccacgtgctaggtttcatccctcggtaatctcggcttgccacaacgctgtgcattcggcggacaccggacacggaaaccaccgggacgccaccaggaggccttcatgaagacagcgcttttctttgggtttgcggcgctcgccttgctggtcgcgctcccgagcggcgccgatgcagcacggctcggcagggcctgcggcggccttgccggcgtgcaatgcagcagtcgcggccaattctgccagttcaaacccggcagctgcggacgtgccgaccagtccggcacctgcgcgttccgcccgacgatctgcaacaagatctacaagcccgtgtgcggctgcgacggcaagacctacggcaatgactgcgagcgccgcgccgccggcgcctccaaggcacaggacggcaagtgcacgtcctgacgggcgggccatattgacgcgctgcgcgggagcctgcatgtagcttcgcgtattttcgtaccgcgggggtatttcgtgacagcaccgttgcgccgacgcttgcctttgggcatccgctccaccctgcacgccgcgctgatcgcgctggcgccggccttcgcggcaacacccgcgcatgccgatccctgcgtcgacatcgcaaagcaactcgccggccagatcgacgggctgaaggtcaatttcagcgccgccaacatcacatacctcacacacccggccgccaaggaattgtcgctcggctgccgcggcaaggattatgcgatcgagctctatgccaagacagaccgcaagatgaagccggagtttttcaacctggtcggctccgccacggcgctgatcttcaccgtgccgaaggacgatgccaccacgggcacctcacgctgcctgaagcgcatgggcatcctgcgcggcaacaccatcacgatgcgctatcgccgcctcaacctcgaatgcacgcgtaacaagaccgacgcctcgatcacggtgcggcgcggcaacaacgagtgatccgtcaagcttcccgggtgacgcgcggccccgtcggatcgacatccggcgtctcgcggcataagcaactacttatttaatatcgttgcggccgacgcaggaacgcctcccccgctcgtaaagttgatggctgctaccggatgtttgccggaaaaaccgtacgataatcgcctccggaatcacggagtcgcccatgatcgcaaaactcctcctgcagaatacgttcttcgtcctcgccatggccgcgctgctgtttgccttcgcaggcacgctgcactggcccggcgcgtgggcctacctgatcgcctcggcgctgatcggcccggcctgcgggctgtggcttgccaaggtcgatcccggcctcttggccgagcgcatgcggctcaccgcacgcgagggccagcccgccgaggacaagcgcttcatgctggtgttcctggtcattgccgtgctgtggttcgtcgcgatggggctcgatcgccgcttcggcggcgccgatgccggcgtgccgctgatcgtgctcggcctcgcactgtatctgctctcgaccgtgctgatcctgtgggtgttccgcaccaattcgttcgcagcaccggtcgtcaaggtgcagaccgagcgccaccatcacgtgatctcgaccggcccctacgcgctggtccgccatccgatgtatgccagcgtgatgctgttcttcatcggcgcgccattgacgctcggctcctggtggggccttgccttcgttccggtgttcttcgcgatgttcgcgttccgcaccgggatcgaggagcgcacgctgagggcgggattatcaggctatgctgactatgcggcgcgggtgcgctatcgtctcgtgcccggactgtggtgagggaccgaccgtcatggcagagagcaagatctacaccggcggctgccattgcggccaggtgcgcttcgaatgcaccaccgacatggcgatggtcaccgcctgcaactgctcgatctgcaccaagaagggcctgcacttcgtgttcatgccgccgtcgagcttccagctccgtgccggcgccgagaacctgaaggagtatctcttcaaccgtcatgcgatccgccaccagctctgcgtcgattgcggcgtcgacgtgttcgcgcgcggcaacaagcccgatggttcggacatcgtggcactgaacgtcagctgcatcgacggcatcgacctgtcgaagatcaggatgacgccggtggatggacggaacaggtgactgcggtcacaaatccagcgccttgtagcgccggaaaatcccctcctcgttgaacggtatccgccgctcgctcgccagatacgccttgatgttgggccgcccggcgacgcggtcgcgcagcgcgatcaggcgcgggaccttcttctcgaacgcggccatccgcttcggaaaggcgtagcgcaggccttccacgatctggaacagcgacaggtcgacgtaagtgagccggcgtccggtgacgaaggcaccgccgttcgccgcgaccaggtcctcgaaatagccgagatatttcggcacccgcgatttccagaattcttccgtgcgcttcctggccggcgccctctggtcctcgtaatacagcgacgggccgagcggatgatgggtgtcgtggatctccagcacgaagtccgcgatcgtcagctgcagctggtgcacccagagcttgcccgcctccgccttcggcgccaggccatggcgcgcgccgagatagagcaggatgttggcggtctgcccgatcacgaggctgccggttttgaggaacggtggcgcgaacggcggcgtgccgttgtccgcgtccatcatcttcatcatggcgccggtgccgcccttgccgcgggcaacgtcggtgtagccggcgccggcatcttcgagcgcaagacggacatattcgccgcggccctggatcatcggccagtagtaaagctgatagtgcatcaccggttctcctcgatttcgtcatgacaagcttaacgaatcattgccgggatcgttcatgctggtgatagcacttacgaattctcaacgctgttggtcagcgttccgccggccttggcagattctcacgagacgcgacggtccggttaaccgctccaacctagaatgcctcaccgtaggaaaatcgcagcatgcctgacgtcacgagcaatagttttgcctatcaccagatgctggttatgttcgccggttccgtctgtctgctggggacttgggtcggcatgcgccatttcgcccgtgcccgagccacttcgggcgcgacacgcatcggctggctgttcatggcatccgtgggcactggcgcggcgctttgggcatccaccttcatctcaatccttgcgctcgatccatctctcaacagcggttttgctccgctctcgaccggcatagtactgctgatcgccatcacgtcctgcctgatcggcttcgaaatcggcagccgccatttcacgctggcgcccgaagccggtggcctcgtaatgggcgtcggcatcctcgcgatgcatgtggtggcgttcgaaggctggtacgtcgtgggaatcgtcgaatggaatctgtatggcgttgcggtgaccttcgtgctggggctcggcctgtccgcactcgctgtaaaccgcgccaatcggccggtgacgcgctggtgccgccatggcgctgccatcgtactcgccttcatggtctgcacaatgcactgggtgttgacggcatccgcatccgtagtgctcgatcccgcgatcgacttgcccggttacgtgatcccggcgcatatcctcggacttgccgtcgtcggcacagttctgctggtgatgggcagcggattttcgacctatctcatcgacctacgcgtgcgcactgaatcggcagatcgcatccatcagctctccttcaacgacaccatgaccggtttgccgaaccgtatcgccttcaacgagcggcttagcttcgatgcggccgaagcgcacgagaaggcacacaagctcgccgcgttctcgatcgatctcgacagtttcaaggatatcaacgatgtattcggccacgccgtcggcgacctcttgctgatcgaggtcgcaggccgcatgcgcgagatacttcgtcccggagaattccttgcgcgacagagcggcgacgagtttctcggcctgcagatgtccggcaaccacccgtccgatgcgcaggcgtttgcggaacgcatcgccgcggtgctcgccacgccgttccgtgtgcacgaccatatcatcacactcaccgcctcgatcggctactcgatcttcccgatcgactcgccggagcgtgagcaggtgctgtcaaacgccaagcttgcgatgcatcgcggcaagagcaagcagcgtggcctgatctgccgctatcagcgcgagatggatgaccaggcccgcgccaggcgcgcgctggcccgtgatctgcagaccgcagcgcaaaacgaagaacttgtgctgttctatcagctccagacatcgctcgcggatggcgcgatctgcggcgctgaggcgctaatgcgctggaagcatccgaaccgcggcatggtctcgccagtggaattcatcccgctggcagaagagaccgaggccatcatcggcatgggagaatgggctctacgccgcgcgtgcctggacgcggccaaaggcagaattcccggtacgatcgcggtcaacctctcaccggtgcagttcagccgcgataatcttgccgagaccatccacgctatcctgatcgagaccgggctgtcgccgaatcggcttgaggtcgaggttaccgagtctacgatcatgtcggaccagacgcgcggcctgcacgtcctgcgcaagctgaaggcgatgggcatttcggttgcgatggacgatttcggtaccggccattcatcgctggcaacgctgcattcgtttccattcgacaagattaagctcgaccagtcgttcgtgcggcgtgtgcccgaggatgccgctgcagccgcgattgtgcgcaccgtgctcgcgctcggcgtcagcctcggcattccggtgctcgccgaaggcatcgagacacatacgcaatggcaattcctcgcaaacgccggctgctcaaaggggcaaggctatttattcgcaaagccggtgccgctcgaacagatgtcgaccgcgatcgcaaaggccaatgagctgttgcgccacgacgctccaacgccagtcgctgcaccgcgccgggcgctggccggatagggcattccgcgaacgcgagatgagacatgcagttacctccacaaacttcactgcatcgcggcccctcaccgcaatcgtagccgggccgcgatgggatcgtccatcgtgcacgggccggctgtccgaactgcgccggtactgctaaggttccgacgtcgaatcttcgatgaaggatcatcttatggccgacgataagaagaagcggggcacgcaagaccgtgccctgatcgcgttgagcgagtcctacgaagttgcgtactggtccaagaagttcaaggtcacgccggcgaagctcagggctgccgtcaagaaggtcggacattccgccaggaaggtggaagcccatttcaaggagcagcgccacagggccgctgaccgcgcgcggatcgcgatccacgagccctacgaggtccgctactggtcgaagaagttcaaggtgacccctgcccggctcaaggccgccgtggccgaggtcggacattcctcgaagaaggtcgaggcctacttcgcgacgaagaagaaagccgcgaagaaaaagaaggctgcgaagaagaccgtcaagaaggctgccaagcgcaagacgagctgagcgcgttccatcattgcaagccaacggatcgcgcgaacgcgcgcccgatgacaggccacgcgaagcaatccctcgtaccgcatacacgcggaaggatggattgcttcgtcgctatcgttcctccaaatgacggattgaatggccgctaccgtcgtcccctcaattcgctgcgaagcagtacagcaggccgtcgccgccggtgctcttcaggtcggcctgcgagcagccgccgtcgggaccgcgcgagggatgcgacgtgttccaggattttgacggctcgtcctcgcgcaggcccttgcggtcgaaatgcccgaccatggcggaaccttgcgtgctgctcgtccagttcttgcaggtgcgatcctcgccggtcgcaaacgcagtcccgtccgcctgcgatcccgtcagcacgtcgtgacggttcggcgtgtcgccggcaccgttgatgacctcgcccttctcggacaaggcggtctgcttcgtgagattattgtcggcgctgtgcaggtcggcgacgtccttggcgaccacgacgcccttcacgttcttccacggccccttgccgatgcggtcgcgcgcattgaccgcggggtttccatcggcagcctgggtcgagagataggcgcgccacgtcttcggcgcaccgaagcccgcggcttgcgccagggtctggcaatgattgtcggcgccggcgagtccgccgagattgccgccattgccgatgccgttgctggtcacgaagaagccggtctcggcggtctgcgcgctggccggcgctgcagccatgacgacgaacgcaagacaggcgggaaccgcgatttgagcaaccttcattccatcctcccgatgattgttatggtccgctgacatcaacccgtgcccggtccggatattccggtgccgcgacacttcaatgaaacgtacaaagcaaaagcgccgcggacgatgccgcggcgccttgtgattgtcatatcaggacgtcgatcagttggtctgctggatcgccgaaagctcccagttgccgccgcgctggcgcacgaaggtccagacctcggtgacctcctccggctgcccgccgctgacctggcgaccggtgccgcgttccagcatcgtgtcgaccaaggcgtagcgcatcgcgaccgtcgcatattcgctgtcgccttcccgccaggcttccgccagatcgccctgcaagagcttcacattggtcaccttgttggtgacgttgcgtagcttgttcccctcgaggtccttcgagaagtacgacaccatttccggagtcgcgagcgtgtgcagcttcgcaatgtcctcgttcgaccacgcggtctggatgtcgccgagcagccgctcgaacgtctcatagtcggcaggcgcgatctcgaccggcgcgttcgacccgccgccgaggccaaagccgaaacccgagcgggcgttcgcctgcggaccggggccgacgtcgggtccgcccgcgtaagcggcggccggcgtattgcgccgctgccaccacgacatcgcgagccggaccacgagcacgatcagaccgatctgcagaagcaggccgagcatcgacgacaggccgccgagacccgagaacaagccgccgccgaacagcatgccaaacaggccagccccgaggaaacccgcggccaggccgccgagcaggccgcgccccattccgccacggccgagcaagccgccggagttcgcggccgccgtcgagttcatccccgggctaccaggctggctgaaggtgcggttcatcggcgcaaccgagcccggcgcggtgctggtcgagggcggcgcggagaatgtccgcgagccgcgcgagccgccaccgccgacgcgggcgtcggccgccgagacggtcatcatcacaggcagcgccagcgccatcgcgacggcgatcgcccgaacaattccacgcgtgcgttgcgagaaattcatgttggtttcctcaaaggattccccggcatggggaaacgcgcccctaagatgggcagggcttgacaaaagtgaagcgggaaacgggaaccgcggctgcggccctcggtcgcggcgatgtgacactatgggccttgtggccgcgacaacgcgtcctagcgcgagatgcgacccggtttcaatcgcagttgcatcggaatttcacctcgcacttgcgagaaacgaaggcagttgcggcggcaaccacctagttcgccgtcatggtttccttcaccgcggcgaccagttgcgtcagcgtgaacggcttcggcaggaacgcgaattgctggttttccggcaggctcttctcgaacgcatcctcggcatagccggagacgaagatgatcttcagctccgcattgcggctgcgcatctccttcagcagcgtcggcccgtccatctccggcatcacgacgtcggagacgacgagatcgacggcgccgttcttctcctcgaatgcctccagcgcctcgacgccgttggccgcctcgatcacgctgtagccgcgcgagcggagaccgcgcgcattcagcgcgcgcaggccgtcctcgtcctcgaccagcaggatggtgccctgcccggtgaggtcgggtttcggattggcggcttccgcggcgacggcttcctttgccgcgccgttgccgacttgcacctccggtgcgacctcctgctcctggcgatgccggggcagatagatccggaacgtggtgccgccgcccggcacggaatcgacatagatgaagccgccggtctgcttgacgatgccgtacaccgtggacaggccgaggccggtgcccttgccgacttccttggtcgagaagaacggctcgaagatcttgtcgatgatctcgtgcggaatgccggtgccggtgtccgcgatctcgatcttgacatagtccgctgccggcatgcccttgttggcgagttggacggtttcctcggtcggcacgttggcggtgcggatgatcagcttgccgccgtcgggcatcgcatcgcgcgcgttgaccgcgagattgaccaccacctgctcgaattgcgagacgtcgaccttcaccggccacagatctcggccatgcacgagatcgagcttgaccttctcgccgatcagccggcgcagcagcatggtgagatcggacaaagcatcgccgagatcgagcacctgcggccgcagcgtctggcggcgcgagaacgccagcagctgtcgcaccagcgtcgcggcgcgggtggcgttctgcttgatctgcatgatgtcctggaacgacgggtcggtcggcttgtgcgcgttcagcaggaagtcgttggccatcatgatggccgacagcacgttgttgaagtcgtgcgcgatgccgccggcgagctggccgaccatctccatcttctgcgactggttgatctggttttccagtgcgcgccgctcggtggtctcgagcatgtagacgatcgcggtctcggcgtcgcgctcgtccttctccacggtcgtgacgaagaactgcgcgaagcgctccttgggcccgtcgagcatcacctcgaccggcgcgatatcgccctgcccttcggcagcctggttgatcgcggcgatcaacaggccacggtcgcgcgggttgaccgcgcggaagatcgacttggccgcgccgccgtcgccgttcagcccctgcgccagcttggcatagcgcgcattggcgccgaccacgttgccgccgcggtcgacggtcgcgatcgccatcggcgtatggtcgaagaagcgcatgaagcgcacctcggcggcgcgctccggatcggaatgctcgtcgcgggcgcggctgatcaccagcgtgcgcgaggcgcccgccgcgccgtcggcgccgaaggcgagcttgtgatagagccgcaccggcacggtcttgccgccgcgcatccgcaggtcgatgtcgaacacctcggtcttgacctcgcccggcacggccgcgatcgaggtcagcaatgccgcgccgtcgcccgacacgatgtcggtcagcttgaggccgcctgagccgatctcggccagatcgtagtccagccaattcgccaacgtggcgttgacataggcgatctcgccggccggattgaccgagaagaagccgcacggcgcatgatcgagatattcgatcgcgtgccgcagctcctggaacacatcctcctggcgctcgcggtcgcgggtgatgtcggcgatcgaccacaccgcatatttggcgtcgcgcttgccttcgccgagcgggcggacccgcagccgcagccagcggccttgtccactaccctgcccggcctcatgcccggcgacgcggacctcctcctgctgccgcttgccctcgcgcgcggccttcaagaggcggaacaccgcttcggagacatcggggttgccgatgaagacgcgctcgaccggacgaacgtcctgcggaccggccgcaccggtcaacgtcagataggcggcgttggaatagaccacgtggccgcgggcgtcggtgacgacgagcccttcctgggcctggtcggcgatccgcgccatcaccgggtcgtcggtggcgcggtcggagaagcggatgatgcctgcggccagggcgaacaggttgaacagtccggcggtggcaagcagggccagcacgccgaggatatagggctgtgcctgggtacggccgatggtcatgagccagaccgccaccgcgacgatgccgatcgcgatcagcaccaccaagaggatgctgccgctccgccgggctggcccgtgagccacgaacggctcggtcacgggaggatcgttgctatcggcggtcatctggagagacatggctcgtctgcatcacgaaggcgaccggccggccaccttgcccctgagtgcctgaatcggacccgaaaacgcaagtccaccgggcggcaatttcgcaagttacgcgcatttcaagcggttttccgccccttactgccgcaggccggacaggccgcgcctcagccgcatcacgtaaccgatgatttcggcaaccgcgtgatagtgctcgaccgggatttccttgtcgatgtcgacggtggcatagagcgcccgggccagaggcacgttctccacgatcgggatgtcgtgctccttggcgatctccctgatcttgaaggcgaggacgtcgacgcccttggcgacgcagatcggggccgacatgctgcggtcgtaggccagcgcgaccgaatagtgggtcgggttggtgatgatcaccgaggccttcggaacctgggccatcatgcgcttcttggcgcgctgcacccgcaactgcttgatcctgcccttgacgtgcgggtcgccttccgactgcttgaactcctccttcatctcctgcagcgacatcttgtgacgctcgtaccaggtccggtactggaagaagtagtcggcgatcgcaactgcggcgaggatcgcgaccaccgccgccagcaggtgcaccgtcatgccggtgatggcgggcagcagttcggccggatcgatccgcaggaacgattccatccgcatccgatccggccacaacaccatgaccatgacgacgccgagcgcgatcagcttgaacaggcccttcaggaagttcgccaccgcctgcttgccgaacagccgcttgaagccggcggccggcgagatcttggagaatttcggcttgagctgctcgcccgaccacaccagctggtgctggatcatgttgccggcgaccgcggccagcgcgagcatcaggaacggcacgccgatcgccgcgaccacggcgtagccgagcgtctgggtcagttgcagcaggccggcaccgtcggtgcggatcatccatgaattggcgatcaaattgcgcagcggcatcaagatgccgccgccgatcgagcccgagaaggtcgacagcaccagcgtggcgccggcgatgatgaaccaggtgttgacctcctggctcttgacgacgtcgcctttctcaagggcttcgtcgagacgtttttgcgtagggtcttctgttttgtcttcggtatcgtcggccatctcttctcccctagttcattggagcgagttggcgcatgacgccgttgaagtagtcgaaataggtgctcatcatcgccgcgagcaccacggcgaagatcaggaagccgaccatgatcgagagcggcacgccgacgaagtagacctgcatctgcggcatcagccgcgccagcacgccgagcccgatgttgaagacgagcccgaacaccaggaacggcgccgacaattgcaggccgatcttgaaggcggccgagaaggcgttggtcgcaagcgcagcgacgtcgccggtcggcatgatctcgcccggcgagaagatccggtagctctcgctcaacgccgcgatgacgagatagtggctgtccgtggcaaacagcagcgtcaggccgagaatggtgaggaagttgccgatgatctggccctgctggccctgggtcgggtccaccgcggtgacgaaaccgagcccgagctgctgggcgatcacggagcccgcgacgttgagcgccgacagcgtcacccgtgcggtcgcgccgagcacgataccgatgatgagctcatgcaccatcaggacaccaagcgaggagatcgacgtcaggtcgacgtgataggcgttgcgatgcaaaggcaggatgatcagcgtcaagagcagcgcgatcgacagcttgacccgcgccgggatgttgctctcgccgaaaccaggcagcagcatcaccatggcgcccacgcgcgcgaagaccagcacgaagattgcggccagcgccggcagcagggagacatcgatgcgcatgaccgcggcattagtgcatcaaccgccgatgattcgcgacgaaatccgcatcatgtggctactgagcgaatccgccatgaacggcagcgccagcagcaatgtgacgaagatcgcgaggatcttcggtacgaagaccagcgtctgctcctggatctgggtcagcgcctggaacagcgacaccacgacgccgaccacgaggccgaccaccatcaagggcgacgacacgatcacgatcgtccagatcgcatcgcgcgccacgtcgagagtttcagggccggtcattttggattctcgctttcagttgtttgcaccgtcattccggcgcgatgcaaagcatcgagcccggaacctcgagatcccgggctcgacgctgcgcgtcgccccgggatgacgtcctgacggacgtcagatcggcatcttcatgatgtcttcgtaggcctggatcacgcggtcgcggaccgagaccagcgtcgacaccgcgacgtcggtgtcggcgaccgccgtcaccacgtccatcacgttcgccttgcccgaggccatcgccatggtctgcgcgtcggacttcttgcccgcttccagcacgctgccgaccgagtccttgagcagcgcgctgaaggacgggccggcgaccgcctgcgtgccggccttctcggcgccgccgcgctccatcatcctcgcgaggctggcataggcgttggcggcgactgtcggggtagccatgagttacgttccctgttcttgttgcgtcaggatttgaggatgtcgagcgtgcgctggatcatccgccgcgtcgcgctgatgatgttgaggttcgcctcataggagcgctgggcgtcgcgcatgtcggtcatttcgaccatcgaattgacgttcggatatttgacgttgccggaggcgtccgccgccggattgccgggctcgtgcttgatgcggaatgacgactgatcggggcggatccggccgagcgtcacgacctgggcgtcgagcgagcgatcgagcgcggaggagaacgtcggcaccttgcggcggtagggatcgccgcctgcagtctgcgccgtcgaatcggcgttggcgatattttccgagatcacccgcatccgcccggcctgcgcacgcaggccggaggtcgcaatgctcatcgagcgggcgaaatcactcgttccatctgccatgggatcctcctgccgccgttaagtggcctagcccttgccgatcgcggtcttcagcaaatgcaggcttttgctgtagagcgacgtggcggctgcgaagtccatctggttggccgacactttcagcatctgctcctcgagattgaccgcattgccggccgggcgggtctggaacccgctcttgccgcgatcattgtcgaacgtgtcgggcgcgccggaggctgccatgtgggtggcgctggtctgcatcatcggcagcgtccccaccccaccgccgaccgccgcgccacccttgtcgaacttcggctcgaccaggtcgcgcggccggaagttcggcgtgtctgaattggaaatgttctcggcgagcacccgctggcgctcctggtgccactgcatcttggtgcgcaacgccgacaggatcgggagatcgttcatggccatcgccgcggctccgttaacctctgggtcctcccgaggtaggcagaatttgcccggtgtatggttaacgggtggttaaaatgccggaccgatccgtggagaatgccgcaatagccgcctccgagcgcattttcgccacgaatgctgcgttaaccagcacaaaccgagacagcgtggggcgctgagaagtcgttttgggacaagcgattcttggtttattaatagaacagtcggctgcaagccgctgggaattaagaaataaggcgaatctcgggcgcgattcgctgcgtaaaaccgcaactatcaatccgcgctcgttgatggcggaagctgaggaaggccaagatggccggggactccaatatgcaggtcattactttcgtcttggcattcgttgtcgtgctggcgctgatcggcgtcaccgcatggctcgtccgccgcttcgctggaaaccgcctcggcgccaatgccaaccgcggccgcatgccgcgcctggcggtgatcgacgccgccgccgtcgacggccgccgccggctggtcctggtccgccgcgacaatatcgagcatctcctgatgatcggcggccccaccgacatcgtcgtcgagccgaacatcgtgcgcgccatgcccggccgcgaccagatgtcgagccggcccgcggtcgcccccgaggctgcgctgccacgtgccgcaccgctcccggacgctgcctggaacgagagcgaggccgtccgcgccgacaatttcgatcttcccgagcccgagctgccgccgcgtccggtgcgcccctcctttgccgacgagctgcggcggcccccgccgccgatcgccgagcgccgcaatgatccgctcgcgggcttcacagccgagcggggcgagccgcggcctgatccaatgccgccgcgcctgccgccgcgctccgagcctgccatcccccgtgcgccgcgcgctgccgaaccgccgaaggcgccaccgccgctgcgtgcgcccgagcgcgccgtgaccccgccgccaccgcctcccccggctccgccgccgatcgcaacgcaggcgccagtggccgccccgcccgcatcgaacgccgatgccaatctcgccgagatggcgcagcggctcgaggcagccctgcggcgcccgaccggtgccggcgagaccgtcgccccgccggttgcacccgaggcgccgccggtgcgtgccccgcgcagcgagccacccgccccaccggccggcggacagaagagcgggttcgagaacctagaggacgagatggcatcgctgctcggccgaccgaagaacccttcgtgaggttcggggccgtcccgcgtagagtttttttcatcgctgtcctgatcgccgccggatcctttgccgatccggcgatggcgcaggatatcagcatcaacctcggcggcggcaatggcggcgtgaccgagcgcgcgatccagctgatcgcgctgctcacggtgctgtcgatcgcgccgtcgatcctggtcatgatgacgtcgttcacgcgcatcgtggtggtgctctcgctgctgcgcaccgcgctcggcaccgccaccgcgccgccgaactcggtgatgatcgcgctcgcgatgttcctcaccgcgttcgtgatggggccggtgctgcagaaatcctatgacgacggcatcaagccgctggtcgccaaccagatcggcgtcgaggaagcgctgcagcgcgcctcggtgccgctgcgcggcttcatgcagaagaacgtccgcgagaaggatctgaagttgttcatggacctctccggcgagccgccgccggcgacgcccgacgagatgtcgctgcgcatcctggtgccggccttcatgatctcagagctgaagcgtgccttcgagatcggcttcctgctgttcctgccgttcctgatcatcgacctcgtggtcgcctcggtgctgatgtcgatgggcatgatgatgctgccgccggtcgtggtgtcgctgccgttcaagctgatcttcttcgtcctggtcgacggctgggcgctggtcgccggcagcctggtgcagagttacggggggtagcgccctgcgaaacattcatggcctgtcggctggatcggccgtgccgttgcattatcatgcgcggcaccgcatccagggagccgcgccgtgcagcagccattcgatcgcgccgcagaagatctcggcaacgccatccatctcgagcatgtcaacgtgcaggtgccggaccagcgcctcgccacgctgttctatgtcgccggaatcgggctgacccgcgatccctatctgatggtctccgacagcaacatgtgggtgaatgccggccgcagccagtttcatctgccgagcggccggccacaggtgctgcgcggccacaccgcaatcgtgatcgccggacggcaggcgctgctcgcgcggctcgccgcggtcgcgcccaagctggaaggcaccgcgttcggctatcgcgaacacaacgatcacgtcgaggccatttgcccctggggcaaccgcctgcgctgctttgaaccggacgccgagcggttcgggcgcatcgcgctcggcatgccctatgtcgaattcgacgtgccgcgcggcacggctcaagcgatcagccggttctatcccgaaatcatgggcattcccgccaccgtcgtgaatggcgacggtgtcgtggcacgggcaaaggtcggcaaggaccaatatctgcaattccgcgagaccgaccagccgcaaggcgagttcgacggccatcacgtgcagatctacatcacggacttctcgggcccctacaagcggctgcgcgagcgcaatctggtctcgcgcgaggacaatcagtaccagtaccgcttctgcgacatcgtcgatcccgccgatggccggcatctgttcaccgtcgagcacgaggtgcgcagcgccacccatccgatgtatctgcggccgctggtcaaccgcaatcctgatcagaccaaccgcaccttcgccaacggctacgaccaagcgccgtgggcgatggggccggaccaatacgacggttgagcgcccgcatctccgcgacacgccatcaacgcaaattccagcaacgagacgacatgcttccttcccagcgccatctgttcgagatcccacgcgaggtctgctacctgaattcggcgtcctacagcccgctgccgctgaagacgctggaggctggccgcgtggccgtcgggcgcaagggccagccctggacgatcgaccccggtttcgccggccgccagcatgagcgcgcccgcaccgcagccgctcgcctcatcaacgccgatccgggtgacgtcgcgctgatcccagcgatcagctacggcgtcgcgacgatcgcgaaagcgttgaccattccgcgcggcacccgcgtcgtcgtgctggaaaatgatcactcctcgccggtcctcgaatggcatgcccgcgcagaagcgcaagggttcgtcatcgacaccgtgccgcagccagccgacggcgactggacatcggcggtgctcgcaacgatcgagcgctccgccgcaccgccggtgggcctcgcctcgatctcgtcggtgcactggtcggacgggggcataatcgacgtcgacagggtgcagaccgcgctgcgccgacagggtgcgatgttcgcgatcgacgcgacgcagagcgccggcgtcgtggcgatggacgtgacgaagctcgatccggatgcggtgatcttcccgacctacaaatggctgatcggcccttacggccgcgccttcctctacatcgcaaagcgtcaccagaacggcgtgccgctggagcagacctccgccggccgccgcaacgtcaactccgagaacgcggtctatttcggcgatctcggctatgtcgacaatgcccgccgctacgacatgggcgagcgcgatcatttcatcacgctggagatggcgtcgatcggcatggagatgatggccgaatggggcgccggcgccgtcagcgagcggctcgcgatgctgacacagcggatcgccgatggtgtacgtgacctcgggctcgacgtgctggcgcgcggcgtgcgcgcgccgcacatcctgagcctcggcatggtgggcggcatcccgaaggagctgatcgcgcggctcgccgccgagaatatccatgtcgcactgcggctcggccggatgcggatatcgccgcacgtctacaacgacgaggcggatgtcgaccgcctcgtcgaaggcttgacgaacgcgttgcgcggttagctcggcttgcgcccgagcacgaggacgctgaccagttcgatcgcgagcgctgcggccacgccggccgcgccgatcacgaacagcagcgcatagttgccgccgctctgcgcgaacagataggacaggccgtaggcgcccgccgcctggaacagcgcgaaggtcgtggtggcctgcgcccaggcggagcgctggctcgcggccgaatgcgggatcagctcgtggatgcggccgatcaccagcggcacgatgccgggcgtgaagccgccgacgatgaggctcgacacgatcagcgcggcgggcgatgtggtcacggcgggcagcgcgaccgcaacggcctcgatcaggaacgccgcgcgcagcgccgcagcgaaaccggcgcgatcggcgagatgtccggtcaagagcgggccgaccacggcaccgatgccatacagcacccagtagtacgatcccgcggcgatcccctgcccgagtccacgggcgacgaaatcgaccaggaacaccatgtgcggcaccagcgccagcgcgttgaggccgtattccacgcacagcgcgagcaccagcggcgagcgcacaccatgcatagcgacaggcggctccgccgcgacatgcgcggcgggcgcttccgccggccacgccttccagctgatcaaggtcaacaccgccgacagcgcaccaaggccgtaccaggcctgcttgacgccctgttgcagcaacaacggcaccagcgtgcctgacgcggcgatgccgaggccaacgccggcgaagatcacgccgccaatcaggccgcgcttgctcggcgcggtgtgcggcaggatcgcagtcgccgccagcaccatgatgacgccaccgctgattccggcgaggaagcggaagccgaagaaccagacgaaggagatcggcactgcgcaggcaaagcagctgatcgccgccagcaccatcatgccgcgcaacgcccacaccgagccgatccgcgcgccgaggtcgcgcgcgatcaacgcgccggcgagataaccggcgaggttggcggcgccgagatagaccgcttccgccggcgtgaaccacttcgctgcgatgagcgccgggatcagcggcgtataggcgaagcgcgccagcccaagcccgaccagcgaggcacacaagcccgctgccgcggaaacccacaacggcttgccggcatcgcgatgcggctcaacgcggtggtgcctgtggtgatcgacattggctgacatagacatggcaataggccttccgaccgttcgtgaaaaatgattagttccgattgcagcaatcgctcgccgcgatcacacctcacctctcccggttgggagaggtggtcgttcgatcggcccaaagccgtcagcgggaagccgctgcagcggcccgtttcttccgatattccagcgcgggcagtccgccccagccccaattgtcggtgtcgacttcctcgatgacgacgaaggtcgattccatgggcttgccgagcacgtcgcggagcagttcgctgctgcccttgatcagggccgccttctgctccggcgtggtcgacgacgcccctggcgtcgtcccttcacgcgtgacctggatagtgacgataggcatgacacgctcctggtggtgcttcagtggccggcgctctggccgccatcgacgtgcaggatctcgccggtgacgaagcccgcgccttccaggaacagcacggcgtcggcgatgtccttcatctcgcccattcggccgaccggatgcagcttggcgagatagtcgtgcgtctcgggcgcgtgcatcggggtcttgatcacgccgggcgcaacagcattcacgcggatacccttggcggcgtattcgatcgcgagcgacttggtcgcggcggcgagaccacccttggtcagcgacgccagcaccgagggcacattgctgttggcgtgatcgaccaggctggtcgtgatctgcacgatgtgcccggatccctgcttcaccatttccttggcgacgcggcgggtgatgtagaagaagccgttgaggttggtcgccagcaccgccgcatagtcctggtcggtatgatcggtgaacggcttggcgacgaagatgccggcgttgttgaccagcgtgtcgatccggccgaaatgcccgagcgcctgcttgacggtgcgctcggcaacctcgggatcgccgatgtcgcccgctacagtcagaacatccggatccgtcgacggcttgatgttgcgggagttggcgacgacgcgccagttgcggtcgcgataacccttcaggatcgcctcgccgaggccctgcgacgcaccggtgatgatggcaaccttctgctctgcacccatgatttctctccatccgttgctgaagcgacccagcgccgcttcgatggaggggaacctagatacatccgcatcccgtgcgaatgcccgctattcggcagacacccttccgcgccgcgaacgactggcatcggcctggctggcctcgcgggagagccgctcgaagtagcgtctcagccgcggcgtcgcgaaatcgacgaaggcgcgcaccttcggcacgtcgaagcggccctgcggggccagcaggtgcaccggcaacggtggaggctcgtcgccggcgagcaggatgtgcagccgtcggtcgcggatttcctcggcgatatgatacgagaacagccgggtgacgccatgcccctcgctggccgaggcaactgctgcccgcaccgtattgacgaccagccgcggggtgaactggaccgcgcgcgcgatcttcgacttggcggccggcggaaagctccaggagtccagcccgaaatgcgtcatcgcgatgatctgctgtttcgccagatcggccggctcgccaatcaacggatgctgcgcgagatagcccggcgatgccgcgaccacgcggcgcacctcgccgaccttgatcgcgacgaaactggaatcggcgagatgggcgatgcgcagcgcaacgtcgatgccctcgtcgatcagattgacagtgcgatcaagcatcacgagccgcaccgacaccgccggatattccgtcatgaacgcgtcgagcaccggccgtagcacatcctcgccgacgacaatgggcgcggtgatggtgagtgtgccgcgcggcgcggcccgctcactgccggccgagatctcggcctcctcgagctcggtgaggatgcgccggcacgccgatgcataacgctcgccggcatcgctcagcttcagcgaccgcgtggtgcgatgaagcagctcggcgccgacgtgatgctcgagaaacgcgatcgcccggctgaccgccgccggcgatcgccgcagtttccggcccgcgccggcaaggctgccctcgtcgaccgccgcgacgaagaccttcatggcgtcgatgcggtccatcgatcctccttcgccgcagccgctaaagcacgttgagattgagtcgaattgtcatcgcgcgttagctcattgtttgagcatgatctgtgcgcaaacgctgtacgtttgtcgcaccggaaaaccgcttcgcacttttccggatcatgccgatcccttcacatcaaactgcttgctgaggtggtcgccgatctgcaccagcatcgcgacgcattcgggatagccgggcctcgccaccgtggcctcattggcgctggcgcggaattcccagctgtcgccgtcgcgcagcaccgaaatgtcgatgccgtcggggcagtcggcatgcaccttcagctcggcccgcgccatcgcgatgagttcggcttcggtcttgatcggcttgctcatgtgacgacgtcctcccggctggcgatatcagccatggttgccgaattggcagcaggatgtcgagaggacgcaggcgatcacgggctgttgcaattgacaaattgcgggtctgcggcgaacattcgacccgggtcgatactacccgccgcttgcaccccgcccggggacggtgaatgtatcaagccggtttcaggcttcctttgcccgcgcgaacgggtcagcaacgcaagcccctgacgctttccgttcgtcgatgcagaggaccactccatgcgcgacttccgtgatgccaaggccatggcgcaaacgctgcgcgatgcgctcggcgccaaatcgatccccctcacccacagcgacagcctggagctgatcgccaggctgttcggccagcgagactggaacacgctggcgacgcggatccagttcgccgggccgccaaacacgttgggccaggctgcagggcccgctgtggaatcaccaccaatcgcagcgcggcaggagatcgccgtcgacccagccgtgctcgatcattatgccggcttctaccggctcaacgaccgcgccgtgttcacggtgacgcccgatggacagcatctggtgatgcagctcaccggacagcgcccggtgcggttctttgcggagagcgcaaccgaattcttcgccaggattgtcgatgcgcaggtcagcttcgtggtcggaccggacggacgcgccacctcgctggttctgcatcagaatggcagcgatattccgatggtgcgtatcgacgccgcgacggccacgaagatcgccgatcagaccgcggagcgcgtcaagaaccaggcgcccagtcccggaaccgaggcggcgcttcatcgcctgatcgatgggatcgcatcggggaatcccgactacaacgagatgagcccggcgctggcggcggccacccgcaagcagatgcagtggcttcagccgctcgcggacctcggcaacatccagtcgatccgctttctcggtgtcggcgagcagggcgaggacgtctatagcgtcagacaggctaacggcgccacgcattggcgcatcgcactcgacgacaaagggatcatttcgaccgcgtgggtgacgcccggaccgtaaagccggcgcggctactgggcggcgctggcgcggcgctcgcccttgatcgccggcagcacgctcaccggcgccgccttcggcatgtcgggcaccgatccggtcgacaccggatcgggcagcggcgcgcgggcggtggcatcggggaagcgggtcttcatctcgcggatgaagccgtcgagcgtgtcgacgctggcggccatccgcgcgatctgggcgaattcggcgctcgaggtcgcgaccggcttgctggccgaatcgaacgccagcctgtcggcatcgccggacatcagcggcgcgtatttttcgcggaatcgggatagtccgatggcatcctctgcgagcgcgtagccgaccacggcgcggatgacgtcggccttctcgctcgcgttgagcggcgtgaagtcgcgccagcggtcgccgtagtagagttcgatctgctcggacgcctcgcgccagtgccgcgacgcccaatagatgtccgaacgcagccggaccgcctcgcggccggtgatgttcgagatgatgtcgagcgcgaggtcgtgccggccgacgtcgctctgcgcgcgcgcttcgagcagcagccgctgctggcgcagttcgccggagagatccgcgatccgcgtcgaacgcagcgcggcaatggcgcggtcgggcttgcggttcatcaggtagaccatcgcaagccgcgcggcgacctgggcgcgtgcggcgccttcgagccgcttgtcgacctggtattgcaagaggtcggcggcctggtcgagcaggtcgacgccgacgagacgatcggcaagacggcggatcatctcgtcgccgcggcgaccgatcggcgtcaattcgcgatattcgtagaaggtgccgagcgcgtcgatcggcgccatctcgtcgcccttcgggccgagatagagctgcacgaacagcgccgaggcggcatcctgcgcctggcgcgattccggcgcgttcggctgcaaccgggtcgcggcgcgcgtcaccgcgaaggcgtcggaataacgcgcggtctcggcatagatcttcgacagcacatagagcgtcttcagctcgatattgtcgccgcgccacagcatcgacaacagctcgagctccttcagcacatcgtcgcggccgatctcgccgcgcttctgcttgagcagcgtctcgagcagcctgccttcggcggctgcctgacggtcggccgaattggcggcgaagcggtaggcgtcgagcgcatccttctcctggccgagcgcttcggcgagccggccgcgcagcaccgcaaccgcaggcttgatcgcgtcgggaacgccgaccacgtcgagatcgctcttgcgccgcgcggcgccggcatagtccttgacctcgagcgaggccttcatcgaatcaatggtgacgatgcgctgcaggtctggcggcaaggtcgcgaccgcgaactcggaattcttgaatttttcgcgcgcctcggcccatctgccttcgcgggcaaaggccagccccttccacaattgggaatcgtaaccgttgccgatcgccggattggcgagatccttcaggccctgcgccgggtgcccgaccaggatgctggcgaccgcgtgcaccatcaccacggacggcgtctcgctgccgcgcttgctctcggacaggatcaggttggcgacaccatgggcttcctggtacatgccgcgcgccatgtagaactcggcgagatcgagccgcgcctgcggcagctgctcggcactggcggtcgaagctgcagtgatcaggccgtcgagctgcttgaggaaattctccgactggttcttgctccacacgtccggatcgaacagcggcttcaccgccgcggtggcgcgctcggcggcgacatcggccgatgacagcgtcaggccacccggacggcccagcatcaccttgtcggcgccgacctcggccctgacgtcgtcggcgttcggatggaccacgacgccgtggatcgattccagcagggagagctcgacgaagtcctgccgcttgatgatgccgcgggtcggcggcggtgcggtcacgatccagagcgtatcgcccgcgtcgggatcgaccagtctgtggagctggccgggattggcgagcggcacgctgacattggcgagcgacggctctgagatgttgcgcaccactgacaacggcaaaggtggcttctgcacgcggtcggcaaaggtcagcgtccagctcacgccgcgcgaacggtcgtcgctttcgagcgacggcatctgcggccggttgaggcggaagcgtaccgcctgcccgttctccagcgcaatccggctgacatctgatatcagcgcgccgcccttggcacggatcgggtcgacatcgatcgcctcaggcgtgtcgaacaccatccacacggtgtcggcacggcggtacagcgccgccggcgtcgcgccggggaatgagaatgtcacccgcagcccatcgctgtcgcgctgggcatcgactgaggacttggcgatggacttgccacgggcctcggccggcggcgatggctcagcggcgggcttcggtgcttcgctgactggtgccttgttctgctctgccgcggcgccggcactgccctcgcgcggtgcgggcgggttctcgacgtcggccgctggtgcagccacgaccttcggcagttccggatcgggcagctccgatctcggctgttcggtcttcgccggcatggcggccggttgttcggtcgtagccggttcgggtttcgcaggctcggattgcggcggcccggacttctgctcaggcttggctggctcggacttggcagattcaggcttggcagactcagacttggcagactcagatttggcaggctccgctttggattgatcgggacggatctcgatcctggcctgctgcgcgaagctctccgatgtcaccggcgcgatggccgcggcgcccttcagtttgccgcgcgtgggcaacaacgaactctgcgagggcttcgccgccggctgctgctcgttctgctggaacgcgacatcgacgatgtagctcttctcgtcgcggaacgaatgcacgtcgacatcgccaatcagggtcacgtcgaccgccgaagtgtccgtatcggcccgcgaactgatcgaggcgacgttcggcggggcggcgaccttggcatcggcaaggtcgaacgccaggaccgagttgaaggacagcgtcagtttctgctcgttcagcaccgaggagacgctgaccccgtcgggaacctcgaacacgaagcgcacgaaggtgggctgcaccagcgcgcgaacccggattggcggcttcttcctggcggcatcggcggcgcgctggatgcgcagcagacgctcggcggcacgggcgcgctccgccagttcgcggatcacgtcctgcggcagcgatggcggcgggccggtccagccgtcgggcaggaagtcgacgaagatgcgctcgccggcggtcatggtgttgacggtgacgcggcgcgccagcgacagccggatcgccgagccgtccggatcgcggcgcgcggcgccgacatagtcgggcacagcatccgacagtttctcgacggggatatcgaccggacgcttgaagcggatcacgatgatcgagccggcggtcgtgacctccgactcgacatcttccttcagcttcagcaccagccgggcatagccgttcgcggccgagaacgtcgcctcacccggcaccggcggcgggtcttcggcacgcagcgcggtcggacatacaaagagagcaaggccggcggcgagcaggcacagacgcgcggtccgcgcccaggcgcggccttgcgaccatgttccagcggcagccgttcgcgccatctcgaaacgtcttctcggacctcagcaagccagcgcgaagcgccctcgcccacgcgtcccgatcttggatcgggcggcgttaaggagctgttaacgacaacggattgcgagcacggaggttacgtaatgttctgttggtccgtcattccgggtcgcgcctcctggcgccagcccggagtccattggcccgcaggctctccggatggatggattccggggttctcgctccgcgagctcccggaatgacgatcgtgaagggccaacgctccgtcaattcgtcttcggcgcgagcatcttgccttcgatcttgggaagatcgtcggttgaagccgacttgtcgccgccggcgcggcgggcgagttcgaccgtgagccgctcggcggcttcgggctgcatcaggcccagaatgtcggacatcttgcgcggctggatctgcgaggcgatctggtagagcacgttcatctccagccggtcgaacaccttggcggcgtccttcggcttcatgttctcgtacatggtgacgatgcccttgaagcgcgcggcctcagcttccgccttggctgcggcgtcggcgttcgccttggcatcgttggccttggcttcctcgaccttggcctcgattcgcttctctgcggctttcagcaggctctcgcggatctcgacctcgcgagcacgcgtctcgagctcctggcgacgcgactgcagccgttccaggatcgcacgttcggatgccgacaccggcggcggcgcatccaggttgaccacgacgccgtcgggcttggacggctccgcggccggtgcggccggcttcggcgcctcgtccttcttggcgtccttgttctcgaccgaccccgtgatgtcgccgggatcggccttgagcttgctgtcggccactgccttgccggcaccggggaagttgaagttctgttgcgcccaggacgggccggccgggcgggccggcgcctcctcggcaaacacgtaaccgccatcgagcacgaggcccgcgaccttcagcaccatcaggccgaagatcgcgaccagcaccacgggcatcactctgatgtcacgaagcaacttcatgcagcgaggccgccggccctcctgcgctcggtgaacgcttcggccgccgcagcaaccgcgcgcgcggcggaaaccctgggcgccggcgccgctggcgctgcaggcgcagccgcctgcgccggcgcacgcgcgggctctgacggtcgcgcggccagcgcgatcttggacaggcggcggaccacgccgtcaccctcggcgagctgggtcttcagcagcgccgacatctgcgtcgccgcgtcgagctggttgccgaggttctcgttgacgtcgcgcaccgcgtgcttcaacccgccgatcgcccgctcggcgatctcggtcgcggtgatcaattcggcaatcgtcgccttcagcgaatgctcgtcggccttcagccgctgcaggcgcttgttgagcagccagcaatagccgatggtcagcatcagcagcacggccaccagactctcaattgctagtccaagcacatgactcatggtgcctccatcatcttggtccgctcgtccgccttctcgaacatcgcgaaggtggtttggggtttacgcaaattcttggtgacgcggatcgcgacccggtcgccgacacggcccatgcggccttccgtcagcgtgacgttgccgcagcggaccgagacgagcgcatcggagcggatgtcgagcggcagcgtgtcgccgaccttgagcttcatcagctccttcagcgggatgtccgcttcgtacagcaccgcatcgaccgcaatctcggcctgcgccacctcggtcgcgaaatgaccttcccagatcggatcgcgaccgaacttttcgcccatgaacatctgcaacagcacgttgcggatcggctcgatggtggcgtagggcagcagcaactcgacgttgccgccgcgatcttccatgtcgatgcgcaggcggaccaggatcgcggcgttggccgggcggctgatcgcggcaaagcgcggattggtctcgagccggtcgatcgagaaggtcaccggcgacagcggccggaacgcctgctcggcgtccgacagcaccacctcgaccaggcgcttgaccagattggtctcgatcgtggtgtagggtcggccctcgatgcgcagctgggtctggccgcggcggccgccgagcagcacgtcgatcatcgaatagatcaggctggaatcgacggtggcgagaccgaaattctcccactcctccgccttgaacaccgagagcaccgccggcagcgggatcgagttcatgtagtcgccgaaccgcaccgaggtgatgcggtcgagcgagacttcgacgttgtccgaggtgaagttgcgcaacgatgtcgtcatcaaccggaccaggcggtcgaacacgatttcgagcatcggcagacgctcgtaggacaccatcgccgaatcgatgatggcgcgaatgccggaatgatcgtcgaggctgacgtcgccgaccgtgaagccgaggagattgtcgatctcctcctgcgacagcacgcgttcgccattggtggtcttgctgccgaagtcgcggctgccgtcctcgaccatggcggcccattgcagcgccatgttctcggtgagctcattcttggcagcttccgccgcggccgccgcgggatcctcggaatcgagcgaggcttcccattgggccgcaatggcgtcctggtccatctggtcgttgccggccatggctttacatccgccccgtcactggatcacgacttccttgaacagcaccgcgttgacctggttgggcgccagcgcgaggttgacgcgcttggtcagctcctccttgaggcggaacaggccggccgagccgttgaggtcgctcgggcgcagctcgcgcatataggtctggaacaggtcggtgacgcgcggcagcgccggcttgatcgcctcgacctgcttctcttccttgacctcgagcacgagcttgagcttgagatattgcacacgctcgccgggcgcgccgaccagattgaccagcatgtccggcacgtcgacgaagctcggcggtttcggcggcggcgcctcggcgtgctgctcctcgccgtggccgcgcatgaagacaaaccatccgcctgcgcccgcgccgagcacgacgaggaagccgacgacggcaatgatcagcttgagcttgcccttcttcggagcggccgcgccttcgccgccttccgtcttttcctcgtccgccatcgtccgctcgcttcactctgaaggatgcgaacgcgatttgccccagctttggcctgaagacgcgatacaaatgccgccggcgcacacgcgccccatcgccggcaacgctagggcccgaatggttaacggaaccttaggatttaccttccactaggaaaaaactgccgggcaaacatggtcaacaagacctttctgccgccccctccgacgcccggccagagacctaagcctttcaaataccttagtatttcaagttggcacggctttcgctgagagcacggcgtgactggcgggtttgggagaacccaatggttaccgacgggtccggcgtgaaggtttgggagaacctgcgttcggatcgcctcacaggggagaaccaccgatgcagaatacgcttctggtcggcctatcgaagcagatggtgctggaacggcagatggatgtcgtttccaacaacatcgcgaacatgaacaccaacggctacaaggccgatcggtcgctgttccaggaatatctgtcctcgaacgcgcacgaggacaatttcgcgtccgccgaccgccgcgtctcgttcgtgcaggaccgcgcgaccttccacgacttctcgcagggcccgaccgaggagaccaagaacccgctcgacgtcgcgatcgacggcaatgccttcctggtggtgcagacgccgggcggcgagcgctacacccgcgagggcaatctggcgatcaacaaccgcggccagctggtcaccgcctcgggctatcaggtgctgggcaccgccggcccgatcaccttccagcagaccgaccacgacgtctcgatcgccgccgacggcaacatcaccgtgctcgagggcacctcccgcctcgactcgatccgcggcaagctgcgcctggtctcgttcgcgcaggcccagcgcctgctcaaggaaggcggcaatctctacgcacccggcgaaggcgcggtggcgcagccggccaccaaggcccaggttcgccagggcttcatcgagaagtcgaacgtcaattccgtcgtcgagatgagccgcatgatcgagatcacgcggacctacacccaaatcgcctcgctgctgcagcagcagagcgacctgcacaaatcggcgatcgagaagctcgccgacgtgccgaactgatccgggggactgaccgatgcgcgcactttataccgctgcgaccggaatggcggcacaggaactctctgttcaggtgatctccaacaacatcgcgaacctgcgcaccaccggctacaagaagcagcgcgccgcgttccaggacctgatctacgaccacgtgcgccgggtcggcgcgcaggcctccgaccagaacaccatcctgccgatgggcatcgacctcggcggcggcgtgaagaccgtcggcacgccgcgcctgatgacccagggcacgctgtcgccgaccggcaacgatctcgacatcgcgatccgcggcgaaggcttcttcaagatcctgatgccggacggcacctacacctacacccgcgacggctcgttccagatggacaaccagggccgcatcgtcaacgcgcagggcaatccggtgcagccgacgatcacgattccgcagaacgcctccggcctcaccatcaatgcgcagggccaggtctcggtgacgctgccgggccagaccgcatcgaccacgatcggccagatcggcctgacccgcttcatcaacaaagccgggctgatgccgatcggcgacaatctgttcacggaaacaccggcctccggccagccgcaggacggcatcgccaacaccgacggctatggcgacatgcagcagagcaacctcgaacaggccaacgtcgaggtggtctcggaaatctccgacctgatcgcagcgcagcgcgcctacgagatgaactcgaaggtggtctccgcggccgaccagatgatgcagtcgacctccaacctatttcgctgaggatgatgtcgatgatcgcccgctcactcctgattgcagcagcgctgctcgcggcctcgatgacttcggccgccgcgcaaagccgcagcgagaccatcgcggtgccgacgctgcgcgccagcattacggtcgcggacgacatcgtgcgggtcggcgacctgatcgacaatgccggcagcgccggcagcatcgcgatctaccgcgcgccggacctcggcaccacgggcacgctgccggtcgcacaggtgctgaacgtactgcgctcacaccaggtgatcggcgtcgacacccgcgagctgaaggagatcaccgtcacgcggcttgcgcgcaccatcgacagcaaggagatcgagcagcagctgtcgcgcgcgctcgagggccgccacgggctcggccgggccggcaacatcgcgctgaccttcgaccgcgatcccggcgatatcaggctggagtcgaccaataccggcgcgatgcagccgatcgctgtgcgctacgacccgcgctcgacgcgcttcgacgtcaccttcgagatcagcaacgacgccggcacggcgccgtacaagctgcgcctcaccggcaccgcgatcgaaaccatcgaggccgccgtgctgacgcggaatgtcgagcgcggcgacgtgctgaaggcctccgacgtggtggtcgaacgccgtccgaaggccgaaatcggcagcgacgcggcagcacgcgacagcgccgtcggcatgcaggtgcgccgccagctccgcgccggccaggcgctgcgcgtcgccgacatggcaaagcccgatctcgtcacccgcgaccagaacgtcatcctgatctaccgcaccgccggcatctatctcaccatccgcggcaaggcgatggatggcggcgccgaaggcgacgtcgtcagcgtgatgaatttgcaatccaagcgcgccgtctccggcgtcgtcaccggccgcggcgaggtctcgatttcggtcgcgaccccgcgcccggcgccggttgccgacgccacctcgtcagattccgctcccgtcaagctgagttcagtcgcaccaaacgccgagtaaagttcatgtcccagtaccgtatcaaccgcctcatcctgaccggtgcgctgatcgcactcggaacgatcgccagcggctgctcctcgatcgaccgtctctcccagatcggcgaacagccgaagctgacgtcgatcgacaatccgacgacgcagcccggctacaagccggtgcagatgccgatgccgaagcccgaggtcgcctcctacagcccgaactcgctgtggcgcagcggctctcgcgccttcttcaaggaccagcgcgccgcgcgcgtcggcgacatcctgaccgtcacggtgaacttcaccgacaaggccgcgatcgccaacgagacccagcgcagccgcaccaacaaggaagactccggcgtctccaacttcctgggatcgcagaccatcacgcaagcgaacaagatcctgcccggccgcatcctgactgccgactcggcggcctcgagcgacggcaagggttcggtgaaccggcaggaagcgctgcagaccaacgtcgccgcggtcgtcacccaagtgctacccaacggcaatctcgtggtcgagggcaagcaggagatccgcgtcaactacgagatccgcgagttgatcgtggccggcatcgtgcgtccggaggacatccagagcgacaacaccatcgactcctcgaagatcgcccaggcccgcatcgcctatggcggccgcggccagatcaccgacgtgcagcagccgcgctacggccagcaggttctcgacgtgctcttgcccttctagccgcatgatcccgaacgatttcggatgaggatcatgcctgagtaagaccttcacgagctcccacatctcgtcgcgaacctaggcgcggcgcggtgtaccaacacggccctcgccagctcccctggcgggggccgtggcatttggagcgcgtcaaaacaagccaggagcccgcttcgattcaatcgagacggaaaggctcttgtgaccggtcgcatgcactcaagctgttgtcgcgcaccagtccgataccgcttcgcgcaaatcgcgcgatcggcttctcggttcgttaaccgtcgcagcagtgcacagtggcagtcgcgacgcttgcaacgtagcaaggggacaacgcagggtttctgtttgtatgacggtcatgcaaagagacggacaatatgcggcgtggttccggacgccgcggggcgaaggcaccggaatagtccagctcgacaatggcaggatcagcggcggcgacgccatgttcacatatggcggctcctatcagcttgacgaggaccgcttcacggcggtcctgacgacgcaccgctatgccgacggcccgttcaccaccgtgttcgggtgcgacgaggtcgaggcgcagctgaccggctcgttcagcggcaaccgcgcggtgtgcatgggaacggcgaagcaggcccccggcgtagtgttcgaggccacgctgtttctgcagcagccggaagccgcgcccacgccgccgccgaaatccgcgccgggttctgccggcctcgccaggctgccaaagcccgcggtcagccgccgctcgccgaatccattcgcgggcaagcgcatcgtctgatccgcgccccgttcccgatggcgcccgcgcccgagccggcgtacgatcctgcatgcgcacgaagcgcagcccgatcgatccagccggaaggagcaagcccatgtatgccgccatccgccaggccaaggcaaaaaccggcaccgccgaagaactcgcgcgccggatcaaggaaggcgcgatcccgatcatcagcgacgtcgaaggcttcatggcctattatgtggtgtatgccggcgacgacaccgtcaccgcgatcagcgtgttcaacaatcatgccggtgcggaggaagccaaccgccgcgcgctggcctggatcgacgacaatctcggtcccctgctggtcgggcaggccaccgcggttgcgggtccggtcatcgtgcatacgaaagcatagtggccgcaacgaggttgcggctccggtcgtgcatacgaaagcatagtggccgcaacggggttgcgggtccggtcatcgtgcatacgaaggcgtgacggccggtttatcggcaaacttcacccggcagcaatttcccgcggcacgtgtggcgcgcgtcgcgccaccgcgatccgcttgaatttacagtggcaccgcttggcacgccatttgctccgcgattgcagcactgcaacgggaaagcgcgcgcagatgacggcgatatcggccttcggatcggtcacagccaacatgacgaccggcaagttgaagaagccgctgatcgccgacgccacggggtcttcgcaagccgccggcgacagctcatccaccgacaccgtcgaacagaaatttctcaaatacgcgcagatgagcccgatggaccgcttgcgcgccaacatcctcaagagcatgggcatgtcggaacaagatttgaagaacatgacgccggatcagcgcgccgcggtcgagcagaagatcaaggtgctgatcgagcagtcgttccagaagaactccggcaaggccggccaggcggtcgacatttcagcatagcgtcgctgcgcgcgagcccgcatggacgccggcgttcagggcattctgtccccgagatttgcagagaagaacgctttgtcatgtcgccgcagtcgaaggctgcggggagacgttccgtaacggatctgcggatcgcgcgagatacctgccaacgcggttcaccgcatggatcgataccgccgccaccacgagcccggcaatgacgtcgacgaaatagtgaccgcctccgatcggcgtcgccgccagcatcaccgagttccagatcaagccgacacctctgagccaacggatcggccagcaggcccacacgtacagtgccgcggaaacggcgtgaaagctcggaaacgtcaggagtggccccagttcaaacgggtcgagcaatctcgtggtgccgttgcggacgagcggcagctctctcaaggtgtcgtagtagacgcttggttcaacatgcgaatagtccgccggcaggagcccgagtgccccgtagacgccggtggccggaaccagggtcgagattccggtcgtcacaataaggcctgtcgcgaaggcgaggacaagctccgccgcgcgttggtagtgcccgaccaggccgagcagcgacagcaacgcgaagagctgaagccaaatggagttgtaggcctttgcgagcacgccgatcagaatcggtcgatcgttggcgaagtccagataggcgcggaaatccagaccaaggaaccggtcgaacgcgagcagattggcgtcctgcatcggcaggttcgccgccgcagcaatgtatccgagtgacgcgagcaacatggcgacgcagaagatctgcggcaggacgaacaggggcacgtagattcgcggatcgctgtcagccgacgtcatcttgaaatatccgaacgatccgtagaggccggccaccgctgcgacgatgaggtagctgccggcacgcacccgaaagtcggtcaggagaagcgcgcccagaaagactaccagcatcgcggcgatcaatatccaattgagctgcagcagtcgcttggcaaccgcgaggtgcgtatcctcgccctgaattgggtgagcgtccgccggctgcgatagtgcgggccaacgccggccgctaccacggtggtggacgcgaggagtgcgagattgctccgctctcggacaggcccccgctgcaataccaacgtcggccggcgatacgatctctggccggacaaccaatccactgaacattgcaactgccattccagcgcggcgtttcgacacgaagcccgctcattccacagccacaagtttagcatccgcccgcaaagttgcgtcggtataccggtacaaccatcagcgggccgcgcgactttcatgtccaatggtgaacgatttattgcgctacattttcagggagatggcgtccgcgtccgacgctgccgcgagcctattccgttccgattgaatcggaacgggctctagattcttgttttgacgcgttttcttgacgcgaaccggtatccactcggctcgaaaacgctctggtcgtgatcatctcggatggatccttaaccgcatgccggcgcagctcacgcctttttcttcgcggtcgcgtgggcgcctgcggtcgccttctttgccggcttcttcgccgacttccttgacctggcctggttgagctcgatcgcggcgcggatcaaggtcttgaacgcagaagcgttgatcttgtcgccctcgaacaggtcgatcgcgcgccgcacattgccctcgaagccggtgttgaacagcttgtcggggtccgggagctgcgcgccatacatgaaggtcagcttcaccttgcccttgtgcgcgttgccgaccgcgatgatgccgtcgcgcgaccacaccgggctgcccatccacttccattcctcgatgatgccggggtctgcagcgaggatgctcttgcgcaggccggcgagcgccttgccgcgccagtcggcgagatcctcgatcatctggtcgatccgttccgatgccgtcatcgcttcctcctcgctcctcggctgccccaatcaatcatacttgcgatgccgaggtcgatcccccgagccggcgccgcggcgccagatagggcagcgcgaacaggtacaggccgctgagcagcatagggatcagcgggaacagcgccagcaggccgatccagaccgcctgctgctgcaagaccatcgcgatgatgttgatgatgacggcaaccgtgaagacgatcgaaagccagcggtgcgattgcctgatgaagttgttccagttcaatgtgatctcctgttgtatgtgtttgtgctgaagcgacgacttgtctgccgaagccttggcgaaggcggaagcaatccatttatccgcgcatgcggcacgatggattgcttcgcttcgctcgcaatgacgaggatggagctgcagcaatcctcactccgcccgcaccagcagctgatcgagcttctcgaaaaactgcttccagccggcatgggcgccgccataggcctgcttctgatgcggctggaagccggactgctcgacgcgcagatgggtgccgcgtgccgtcggcgtcaacgtgaacaccaccacgctctcgagattgtaggcggcatcctcatgtgtgaaattccaggtgtaggacagcgtcctgtgcggctcgatggtgagcaccttgcagtccagcacgccgccccactcgccgcgcagattgaagctgtgtccgacctcgggcttgaagtcgttcttcatcagccactcctccatcaaatgcggttgcgtcagcgcgcgccagagtttctcaggaggatgaggaaattcgcgctcgacgatcgccgagcgcgtctcacgggtggtgtcgttcattgatccatccttttgagaagatcttcgaggtgatcgaaccggttctgccagaagccggccatctggctggtccagtcgatcagcggcgccagcgcgccgagttgcgcgctgtaatgcgtctgcctgccttcatggcgatcgcgcaccaggccggcctgcttcagcacgccgagatgctttgacaccgccggctgagaaatcctcgcccgcgccgtcagcgcgctgacggtctgctcgccctcgcggcacagacgctcgaagatcgcccggcgggtcgggtccgcgagggttcgaaacagcatgtcgtgagcgtctggcattttacgatcaataacccgttgattatgtatttatgcataactagccggctatggattagtcaagcgacaattcggagtaggtaagtttcgctaggtgatgcgtttattgggcggctcagccctgcccagaacgcccgctcttttataacccgcgggttattaaataacgtcgatctgtccgctggcattgcgatcggcagagcagcttgtccgccggaggcgaagcgaacagtcggcggcgcaaacgatgggtactccgcaagcagagggcgaaacgaagagcatggctcggacaattcgtgtcgcgagagtgcgaagctgtgtccccactcaagctgtcgtcgcccggcttgaccgggcgatccagtacgccgcggcttatcggctcaagcactgcggcctctggaataccggatcacccgcatgcgcgcgggtgatgacaccgatgttggaccatcaccaccgtcgtcctggcgaaagccaggacccattaccccgaaagctcatcgctgcgcgatgctggggccacgatccttcttgcaatccggtgcggtggtcgtgggtcctggctttcgccaggacgacgacgcgtggacgtggcggccgcgcacgcgagaacgcacgtcgttgcgaatagattgcgcttcacctacaaatatcgcgcggatgcggtccttgttcacggagaacctcgatgtgccaactctgcgacgtcgtaccttccggccagacctcccgacgatctttcctcgccgccgcggcatgcaccgccgccggcctcgcctttgcgccgccgatctccgccaaggagacaaagccgccgccgaagccgcagaacgtgctggcgccggatgccgcgctcgaccggctggtgaagggcaatctccgctatgtcgaaggcgtgtcgcggcggcatgatttcaagcacgagcgcgaggcgctggccaccggacagaatccgtttgccggcatcctgagttgcgcggactcccgcatcgcgccggaatacgccttcgacaccggtcgcggcgatctgttcgtctgccgcgtcgccggcaatttcgccagcgacgagatgatcgcgagcctcgaatatgggtcgtcagtgctcggcgtgccgctgttcatggtgctcggtcacgacagctgcggggcagtcgatgccgcgatcaagtcgctcaaggacaactccaccctgcccggccacctgccctcgctggtcagcgcgatcacgccggcggtgaaggcgaccgagggcaggccgggcgaccgcctcgccaacgcgatcaggcaaaacgtcatcgacaacgtcgccaagctcaagacggcgacaccgatcctgagcgccgcggtcgatcagggcaagctcaggatcgtcggcgcggtctaccggctgactgacggcaaggtcgagctggtcgcggacggcaagcggccaaccacttgaacctcggcgcggtctgcgaccactgaagccaagaacgacgtcgcgtgagcgacatggagcaggcggatgtggcaccggagcgaacggattgctggagcgctgctcctgctggtggcctccctgccggcgcgcgccggcgtcgagccctgcaacaccgcgcagaagcggaccgaaatgaccgcgttgctccgccgcgccgcggaggaccggccggtcaacatcaccttcgcaacccgggccgacggcgtgaagctgcccgccgccgtggtcgagaaataccccgaggagatcacgatcatcctgcaacacgaattcgatcgcctcgtggtcagggacgacggcttcgaggtcggcgtctggttcaatcgcaaatatgccaggctggccgtgccgttcgacgccgtcaggagcctgtgggacggcaaggccctgatgtgtacgaacgatcaaatgtaggaaacagtgacctcaggtgaacgccgcttctaccttgccgagcccatcgagctccatcacgaccacatcgcccgccttcagccacaccgtcttgaccaggctgccggtcatgacgatctggccggcatgcaggccacggccctcggcggcgagatgattggcgagccaggcgagcgcgttgtggggatggccgagcacgtcggcgccggtgccgcgcccctcctccttgccattgatcatcgcgcgtcccaccaccttgcgcagatccggcacggtaatgcgcggcacggcctcgccgagcacgcagccggcggcgaagaaatcgtcggcgatcagcgtcggcgcgccgagcgtctcccatttgacatagcggtcgtcgacgatctcaatcgcgggatggtaggcctcgatcgcttccgcgacccattcggcggtaaaaggcgcttcgctcgcagccagattgcgcgccagccgcaccgcgatctcgcattcgacgccgacatggacgaagtcggccgccggcagccgcacgccgctgtcatgcacgaccttctcgaacacgccgccgccgcaggggtgcgggatgttgatgtactcctgcatcacggcgctggtgcagccgatcttgtagccgacgaggctgccgacctgcggctgcaacagatcgtgcagcgcgtactgcacctgatagccctcggcctcgtcgcgcggcacgacgtctttcggaagcgccttgagcggcgcgcggctacggcgcgcgctggcgatcgcctttgcggccgcgaggatccgttccatctgcgcagcctcccagttgtctcggcggcgcggtggcgcctccgtctgctcacggcaattcagcacccgccgatgcgtctggcaagcgtgccggacgggagaggccgtcaggttttgaccaggccgagcctgatcaggctttcggcggtcgcgacgatcatctccgcattgccgcgcggcttccagcccagcaggttctgcgccttggcgctggtcgagcggcgcaccttgccgagcagcggcagcgcggcgcgcgccagcggattgcgccgcgcggcgagccgcatcatccagtccggcgcctggaaccggggcacgcgccgcgccttgctgccaagcttgttgcgcagcaggcgggccacctgcagcaccgacatggtttcgccggcgaccgcgaggaaccgctcgcccttggccttgggcgacgtcatggcgcgcagatgcaggtcggcgacatcgcgcacgtcgacgagcccgaaatggatccgcggcaccgccggcatcgcgccgtcgagcagcgccttgatgatgccgatcgattcggagaaatcgggaccgagcgccgggccgaacacggcggtgggattgaccacggcaagctcgaggccattgccctcgcgcgcgacgaaatcccaggcggcgcgctcggccagcgtcttggatttcggataggcctgcacgtcggggccatcgagattggaccacaccgtctcgtcgaacggcgccgcctgcggcggatggccgtagccgatcgcggcaaacgacgaggtcacgacgacgcgcttgacgccggcgtcgcgcgccgcgcgcagcacccgcagcgtgccttcccgcgccggcacgatcagctcgttctcgtcctcgggcgcgtgagcaccgagcggcgatgcgacatgcagcacgtaatcgcaacctttggcggcctcgtgccagcggtcatcgcgcagcaggtcggcggtcgcgaagccgacctggtcggccgtatcagcgccgccctcgcgcagcatcgcgatcacgtctttgctgcgatccggattacgcaccgtggtgcgcaccgcatgcccgccggccagcagctgcaggatcgtatgcacgccgatgaaaccagatccgcccgtgaccaacaccgtgctcatgtcctcgccctttcgatggttcggcggggtcgaacatcgcgctgcccaccctgcacaggccgcatctggtcactatctctgtcctggcaagtagaatgaaaatcgagaccggtatggaaaacaataccagtgatgtgtgtgacggcggtgactgcggcagctgccccgccgacccgactttgctgatcgactccaagcaggcgatcggcgcgctcagcggcaaatggaagctcgagatcctgttcacgctgatgcacggcggcgtgcggttcggcgcgctgcgccgtgcgctcgtgccgatcacccagcatatgctgaccggccaactgcgagaactcgagcgcgatggcttggtggcgcgcaaggtgctggccgagaagccgctacaggtcgaatacgagctgacggattcggcctggggcctgacgccggctttccgcgaactgctggcgtggtcgaagacccacggcccgcgccgcagtgcgctggcaatcgagacgacagtcgaagccggactggcgtagattgttgtcgatctatcgccgcatcgacgtcgatcctgacaaagccctgttcgatgaattgcgcgatttgtgcgccgctcagcgcacatgcgtcgtcccgatgagtcatatttgtctctcaaactgccacgggccatcgatactccgcggtgcgcggaattgggctgacccattcggatcactggaatcccacgagcccaggctcgcggggacgatcagcgtttcctgccggaaacgggatcagcccaggaagaagaccgatgcgatgttgagagtacgtgtcatcatggcggcgcgaacctacgaccggtgcgcgccggaatcaatctgtggtggccagccgccactattcgtcgcgatagaccttctcgcgcttctcgtggcgttcctgcgcctccaccgacagcgttgcgatcgggcgggcttcgagccgcttcagcgagatcgggtcaccggtctcctcgcaatagccgtaggtgttgtcttcgatgcgctggagcgccgcgtcgatcttcgagatcagcttgcgctgacggtcgcgggcacggagttcgatcgcgcggtcggtttccgaggaagctcggtccgcgaggtcggggtgattgacgttctcttcctgcaacgtctgcagcgtgaccttcgattcgcggaggatctcatccttccaggccagcagcttggcgcggaaataatcgcgctgccgctcattcatgaaaggctctttttcagtcggccggtagttcttcagcttttccaaaggcagccatgtccctgtgaggcggagggaacaggacccctccgcgcggcgccttatatagccacgtcatgtgacagacaatatctgccaccgcgaaaggcgggccgcccccaaggccttgcacaggcaaacttatccgccctgcttgggggccgccccgccccctcaatagccgaccgtgaaacgctggcggagatgggccggacgctcgatttcgtcggcgagtgcaactgcgaaatcctcaaacgagatcgagcttttgccgtcggcggcggtcagaagctggtcggtcccgagccggaacttgccggtccgctcgcccgccacgaacagcgccgagggcgacaaaaaggtccagttcaggtcgctttgctggcgcagcaggtcaaggaattcggcccccttggaggcctcggccttgtactggggcgggaagttcggcgtcgtcaccaggcggacgccgggggccacttcgaggctgccggcgccgccgaccaccagatagcggccgaccccggaggccttggcggccccgatcagcttgagggggtcgctgaccgagaaatggacggaactgatcgcggcatcgtggccggcccacagcgcggcgaggcccgcctggtcgttcacgtcccccttccgggcggtgacgcccggcagggttgcgatcttctccgggttgcgggcgatggcggtgacggcgtggccgcggcgggccagttccgccgtgatgcgcgagccggcctggccggatgcgccggcgatggcgatcttcatctcaagtctccgattgatggtttccgatggtgactagatagcgaaatggatgtaggtgtgaagaaggcactcttgtctcacctgattacgccggagtaacccgatgaaagcctcgagcctgaagccggacgcctatgccgccaattgcccgacgcgccagatcctcgaccgggtcggcgacaaatgggcggtgctgatcctgctgctgctgcgcagcgagccgatgcgcttcaaccagctccgccgcgccatcgagggcatttcgcagaagatgctgtcgcaggtgctgaagagcctggagcgcgacgggctgctgcgccgccgcgcgatcgcgaccgtcccggtcaccgtggagtattcgatcacgccgctcggctcgacactcgcccaggcggtcgatccgctgcgcgactgggccgagcagaatctgaaggaggtgctggctgcgcagcgccactacgacgcccagcgcaaggcactggcggcctgagacgcgcgtggcgtgagacagggggattgagggaagagcctagtattgcccggccttggcgagctcgacttcgacccgcagttcgatctcgccgagcacggcgtcgaggccgggatcgccggaggattccttcaagctcgccgcggcatcacgcagccggttcacggttgaggaatcgaaattgcctgagagcaggccgagcttgagcgcgtcgagcacgtcgagggcgcccttgccgcgggccaccgagcgcttgcggcgttcggtcgggtcctcgacgccctgcagcgcgagcaatgcatcgaggctggcggcggcctttggtgctgcggtggagcggacctcctcctgcgcgctggtcgcgtccggcagcgagaagccgctcgacgaggtgcgccgcgtggcgctggtggacgtgccaagcgtggtgccgttcggtccgtagatgcgcatcgccatgatcccgcaggcctgaatgccgcaagcatcgccgttttatggttaacgacacgtaaacgacccggcaatttctgccgccacacggcagtttcgcgcttgctggccaaccccaacccaacgcgagcaagacaatttcgataaatatatcaatacattgccccaacgaaacaaagtggcacgcagctcgcatggttaatggcggatcgccgtcatgggagtgtcgcgcgatccgccagtgagttcgaggggagcatcaggatgcccggcatccgcatcgtaagtctattcgggttggcctgcgccgcgctgctcgcgctggcggcttccgccatgcccgcggccgcgacgtcgcggatcaaggatctcgccaacatcgaaggcgtgcggcagaaccagctgatcggctatggcctcgtggtcggcctcaacggcaccggcgatacgctcaacaacatccccttcaccaagcagtcgctgcaagccatgctcgagcgcatgggcgtcaacatccgcggcgccaccatccgcaccggcaacgtcgccgcggtgatggtcaccggcaacctgccgccgttcggcacccagggcacacgcatggacgtgaccgtctccgcgctcggcgatgccaaggacctgcgcggcggcaccctgctcgtcacccccctgctcggcgccgacggcaatgtctacgcggtggcgcagggcacgctggcgatctccggcttccaggccgagggcgaggccgccaaggtcgtgcgcggcgtgccgacggtcggccgcatcgccaacggcgccatcatcgagcgcgagatcgagttcgcgctcaaccgcctgcccaatgtgcggctcgcgctgcgcaatgccgacttcaccaccgccaagcggatcgccgccgcggtcaacgactatctcggcgtcaagaccgccgagccgctcgatccctccacggtgcagctctcgatcccgccggagttcaagggcaacgtcgtcgccttcctgaccgagatcgagcagttgcaggtcgatcccgacctcgccgcgcggatcgtgatcgatgaacgctccggcatcatcgtgatgggccgcgacgtccgcgtcgcaaccgtagcggtggcgcaaggcaatctcaccgtcacgatctcggaagccccgcaggtcagccagcccaatccgctgtcgcgcggccgcaccgtggtgacgccgcgcagcaatgtgcaggtcaccgaggacggcaagaagttcgcggtggtcaaggacggcgtctcgctgcagcaactcgtcgacggcctcaacggcctcggcatcggaccgcgcgacctcatcagcatcctgcaggcgatcaaggccgccggcgcgatcgaagccgacatcgaggtgatgtgatggcaagcctgatcaacagcaccaccggcagcatgccgaacaaggcgttgatgccgatgttcaagggccgtcccgatccggtgctgcaggacgcgatgaagaagctcacgccgcagcagatcaccaaggcgaaggccaccgcgaccgatttcgaatcgatgttcctgaactcgatgttctcgcagatgacgaccggcctgaagggtgaaggtccctacggcgacacggtcggtaccggcccgtggcgctcgatgctgaccgacgagtattcgaagaatttcgccaagtccggcggcgtcggcatttccaacgacgtgttccgctcgctgatcctgcagcaggcgaacaagagctaattccgctatccaaggagcagcgcgatgaaccagcgtccacagcagccgcggccagcctccgcccccgtcgcgcggggtgcgacgtcgacgcctcccgacgtcgcgcgtcttgccaacgagctgaccgaggtgatgggcggcttgctcgccgtcatcgagcgggagaccgagttcgtccgcgccggcaagatccgcgagggcatgcggctcgaggcgcagaaatcggagctgtctcggcgctatatgctcgcggtggagcatctgaaatcgatgcagaagatgctgtcgcagagcgagcccgaactgctcgcgacgctgcggcgtcatcacgagacgttccgcgcgatgctgcaggtcaatctgacggtgcttgcgaccgcgcacgccgtctccgaaggcatcgtgcgcggcgtcaatgccgaggtgcagcgccgcaacatcccgaacacctacaccgcgaacggacaacgcgccgcgccaggtccgcgcaacatgactccgatcgccgtcagtcggacgctctgacgcgcacggcctacaatttagttcaattcgacgcggccttggcagcacgccgttcagcgtgttctctaacaccctattgagaggttccccgtagagttgcggatcgtgaggggttgggatttgactcgagcaaactagtgcctgtgcactacgaggctgccatgagtacagatttcaacatcaagccggtgggggcaccggttgcagcgccgatgatcactcccgcgagcgatacggcgcagaaggcggtgaagaccgaattgcccgcgagccagagcgtcaccgctccggagccgagcgtgcgcgtcacgatcgaccccaacgccgtcaacgcgtcaatttcaaatcgggccccatcggtcaccgaccaggtcatcatcgatcgcgacgcccgcgccgtggtctatcaggtggtcgacaatcgcaccaaccttgtggtgaggcagtttccggaagaagccgtcttgcgccgccgcgcctatttccacgcgctcgatctcagcaaggacgcgccgacccgggcacgcgcaaccgaccgccgcgcgtaaccaggcgaatggagcctcacttctgtgtagcgtaggccttgtcgagataggtcgatccggtggccggatcggtgacaacattggcgatcaatgccgtcccctgctgcaccagcgaaaacttggtatcgccgacccggaacgcgccgtccttgatcaggacgtcctggtacttgctggtgccttcgctctgatagtgaaccttggcgcggaagccgtcgacgttcgacaccgagatgttgaacgacttgttgttggcgtacttgccgctccagctgccctcatagagcttcggatcgacggccacatagggcgtcttcgacggcaccgtgaggccggcggccttgtagttggcggacaggatgctcaacacgtcggccatggctaggcctccatcgtgaaccggtcaatcagccgcggccggagaggccggcggcgatattgcagttgatgtcgatcagagacttcagcttcgccggatccgggttcatctggatgtcgatggtctgcttcatcacgaacacgctgatgtttgcgatgttctgacgcacctcgagcggctgcggattgtcgttgccctctgccgcgctgaggaagatcgaccacagccggcgattgaacagcaatgcgtgatcgagcgccttgtcgaggccgttccagttcgcctggacttcctgcagctgccgcgcggccttcaagagcgcctgcgcttcgatttcacgtggggacgccgtcgtcgttgaggtacgagcgtaggcctgggctgcattcgacattaatgacctcgatgggatgcggatttctcgagccgcggagacgcaattctagcgctcgatatttatgcatccggcgcctttaaatatggttagcagacgttacgaaatacgccgttcttacggcatggacagataccgtaatatcccggagataaacgagaaacggcggggtttcccccgccgttcctgaagtgcttgtcgtcgcgcttagcggagcagctgcagcacgctctgctggctctggttggcgagcgcgagcgccgagaccgcgatcgactggcgggtcgacagcgcctggctgttggccgcttcctcgttggtgtcggccagcgtcaggttcgaagaaccggtctgcagcacgttgatcaggttcttggagaagtcctgacggatctgcacgatcgagaggttcgaacccagcgtcgaggcttcgctgcgcagcgaggaactcgccgtgctcagcgaagcgatcacgttgttcgccgagttgttgtcgaggaagtcggttcccgccgccagcgatttcaggccgaggcccgcggcgtcgaacttgacgccggtgatgctgagcgtggacttgccggtctcgttgaaggtcagcttgaggctgtcgccgctcagcaggttgatgccgttgaacgaggagtcctgcgccgtggtcgtgatctgcgagatggtgttgttgtactgcgtcaccagggccgcacgggccgactgcgaggccgcatcggcaaccggggcagtcgcggcgccgaacgtcgcagtgccggtgccggtgtaggtcaccgcaccgatcgtcgaggacgccgcgtcattggtcgtggtgatgacgagcttgttggagctgtcgaggctcgccgtcagattgctggccgacagcgacgtgttcagctgggcaagcgacgtgctggcaccaaaggtgaaggtgaaggcgggctggccggcagaggccgcgatcgccagggtgtcaccgctcttgatcgtggcgccgtcgacgaggttcgccgccgttccgccgagcgccgccgccgagctcaccgtcgaccgcgtggtgtagccggtcgggctctgcagcacctggttggcaatcgacttcgcggtatcgaccagcttctgcagcgaggtgatgccggtgttggcagcctgcagcacctgcacaccgttgccgatgccgtcgagcaggttgttgatgtcgctggcgcgattgtcgagcgactgagcggtgaagaagttggtcgggttgtcgagcgccgtattgaccttcttgccggtggcaaggcggttctgcgtggtggagagcagatcggcggtggactggagggagaggaggttctggcgaacggaggaggagagaatgataccggacattttcatacctttctggtgtgaaactgaggaaaaaaccgcgccaatcctttctgatcgggcggatggccgatcctgcggacaagccgccaaggaaaaagaaatctccggcaaggcatttaaatcaaatgcggaagaataaaattgtcgccattgggcgaagttcgccgcgaaaactactgagacaactgccgattccggccgaacgccgccgcctgtgcgggctcgtcattcaccaagcattaaccatcatgggaaaggatcgctgtcgcatcggccccgggccgcaacggcggctgctaagcagtgccgagcacaacctcgatccgctagcgatgacatcgcgcgattgcccggcaaaggagaacggtcatggccctgaaggtcgaactcaagccgaacgagcgcatcatcgtcggcaattgcgtgatcaccaacaccgatcagcgtgctcgcctcctgatcgacggcgaccgcatcccgatcctgcgcgagaaggatatcctgacgccggagaccgcggacacgccggcgaagctgatctatctcgcagtgcagctgatgtatctgtcgccggacccgatggcgcaccacccgacctatttcagcctggtgcgcgacatcatcaccgcgatgccgagcgcctggccgttcatcgagagcgtcaacaacttcatcctcaacggcgatctctatcacgcgctgaaggaatccaagaagctgatcgcgcatgaggagaagctgctggaaagcgcgcgcggccagcagaaggccaaccaggacgatacccgcaagagcgcgtagagcttctcgtcctgacgcgttttcttcacgcgaaccggcgtcatttcgcttgaaacgccagcctctcggtctgaacgaacaaggcccccgcgaggaggccttgttgctggctggagataggcaggcgggcaatcagccgatcggcagatacttcaacagcgtggtctgatacagcatcgacgtggtctggtacgaggcctgcaagctggtttgcaacgccaggatcttggtcgcgacctcatcctgattgacgccctcgatcgagtcgagcatcgtttccgacatgctcttgagctgggtctggcgatcggttgccgccttggtcgcggtctgggcaccggcgaactcggcctgcacgtcctggatctgctgctggccgctctgcggggcaagattcgcgccgacccgctgcgcgagcgcggtcacctgtgcgttcgcattcggattgctggcattggtggtcaccgcggcgtacaccgcgacattctgcagcaagtagcggaacgcctgttcgttggcgcgcgcgccatactgcaccgtgatcgactgatcgacttgcgcgagggcggtgccgcgtgcggatcccgggccgttttcgccggtgtaccagtacacggtgttggcgggcgtgcccgcgaccagattgctcgctgtattgaagggcggtccccctaccctgagcggcgccggggtcgcggtcgtgttgttggcaatgccgagcgcgccgagtgctgcggtgttggagctcgagatcgcaaggttctgaccatcggcgccgtggagggtgatcgcgccattgctgatggtcgacggattcttggtgccgctgatctggtcgatcttcgacatcagcgtctgcacgctgtcggtgatgttgacctggttgccggtggcgcccgaggccacgaaggtgatcggggtgccgttcaccgtgatggtgtcgccggccgcgaaactcgtggacagcgaatcggtgcccgccgcccccgaaagggcggtggcgcccgagatcggcgccggcggcgtgttgtggttattgacggcggcgcccgacacggtcgcgaccggattgaagaagttgttcgaagccgcgatcgcggaggccgcgaccagtgatgtgtcgctcagcgtcttgatggacgacgtcaacgtcgcctgaaggttggccgtcgtcgccgtggtgtcggcaccgatcaggaacgaaccggccggcggcgggttcgtcgtcgttgccgtgagctcgactgcatcggtggtgccgtcgggcagcgtgaagttgaacttgatcttgtcgccatctttcggattgacggcgccgagatcgaccgacgccgacttcggcgtcccggccggctgcgtcaccgtggcgccggtcaatgacgactgcaccgacagcagcttcaggccgaatggcgagccgtcctcagcgacgctggtcaccgtcgtggtcgccggcggcgacgacacgctgaggcgtcccatcaggttggcgccctgatcggcctgcttgcgctcgttgatcagctgggtgaggccggcctgggtcgccgtgcccttcaacatggtgtcggcaggcaccgtggccggcgtatccatggcacggccggagaacagatagcggtcgcccgactgggtattgagcatcgcgaccgcgttggcgaacgcggcctgcgccgtgatctggcccgaggtctgcccgttctcgttgagcgtcagcgtcgccgtcgtcgaagcgttcttcacctgactgccgacgtcggacagcccctgcaagctgagattggctacactcaggcgggtgttgaggttggtggcggtgtcggaaaacgcattgatgccgctgatctgcgcacgcaggctgagtgcgaagccgcgatcgagcccctgccccgcataggtcgtcgataccttgccggtcgcaagctgcgtcgtcaggtcattgagctgattgcgcaggttgaggatattggtgccgatataggaagttctgccgcttacgccgtcgatcgacatgttaccctcacgagatctgcagcagcgcgtcgtacatctgcttgatcgacgacatcacgcgcgcattggcggaataggcgttctggagcgagagcagatgcgccatctcctcgtccatgttgacgccggaggtcgagtccatcttggtctgcagcgtattcagcacgacgtcctgaccgtcggccaattgcttggcggccgtcgccgattcgccctgctggctgatgaactgcttggcaaagttcagcagcgtgccggtgaacggcgcgcctgacgtgccgagaccggtctgcggcgaatagctgaacgaggcgttcgacagctggttcagaacgaggttggcccgtgtggtgtctccggccggggtctgcggattggtcgcgtacacgaccatacgcgagggatcgccgaccagggcggtattgacactgatgcgcgcggcaagaccggtcgactgcgagccgtttccggtgatcgcgccggtgtagagcgcgccattgtcagtgaacatcggaagctgcggatctcccgacgtcagcgacgaaaccgtcgacgtgaccgaagctgtggtcacggttgccttgttggcggcgccatcgttgagcacccgcaacgtcgatcccgaggggttggagaactgcaggcccgttccgccgagcgcgccgttgagctgggccagcaccgaactcatgccgccggagaagtccactcccagcacttcgtcgttcggatcgacggtcgcgctgttgctcagcggcagcacgctcggatcattgacacggatgatcgacagattgtgcgtgaggcctgtggtgttgtccttgtaggagacgtggatggtattgccgttctgcagtcccgaaagatcgaggtcgaagccggactgcgcgcccgccgtcgccgccgtgcccgccgtcgtcttgtccgacagcgcgctcgacatcgaggcggcgaactggtcgatctgcgtctgcgccttcaccagcgtgttgtcgcgcagctcgagataggccgcgatcttgcccgatcggatcgagttggtcgacaccatgtcataggtgccgccttgcggaaacgtgatggtgatggtgccgacggtactcttggtcggatcggaattgtactgcgtgttgggcgtcatcgtgccctgggcgttgaagctgagcgtcgcggcctgggcgccgaccagttgcacgccggaattggtgaacacggtcacctggttctggctgttggtcacggtgcggatgtccatcagctgcgaaagctgcgtgacgtagcggtcgcgctggtcgagcaacgccgcggtcgacgcgtcctgcgtgccgccagtggcctgcagctgcacattgaggcgcgcaatctgctgcaatgcattgttcgcagtgttgatggagtcgttgatgccggcctctgcgttggcgcgcagcgtctggattccctgcgaggtcgcgttgagctgctgcgccatcgattgcgcggcattgacgacgccgatgcgggccgactgcgagtccgggctggtcgacagcccctgcaccgcggtcaggaacttgttgtaggcgtcctcgatcgtgccggtggagtcgggattgccgtagacgccctgcagattggacaggaaacttgagcggacgtcggcgtaggcggcgcccgacgtctcggtacgcagctgggtctgcaggaattcgtcgagctggcggttgacgcccgtgatcaggacgctcgacccgaactggccggtggtgccggtatcctggttcagcgtcttcctgacgtaaccgggcgtttccgcattggcgacgttcgacgacacgagcgagagcgaggcttgcgtggcacgcaggcccgacatcgcagtggagagggcttggctcaaacccatgatgtgtactcgcctttactgcttcacacgcgcatcatcgatgcgatcagcgcacgacgttcaagagatcctgcaccatcgaattggtcgtcgtgatcaccttggtgttggccgaataggcctgctgggtcacgatcagcttggtgaactcgtcggcgatatcggtgttcgagctctcgagcgacgaaccgacgatggtgccggccttgccgaacagcgccgcgccggactcgtcggtcgcctcgaacgcaccgccgtcgatgcgcttgaggaagttggtgccgttgaaggtcgccaccgagatttcggcgaggtcgatgttgcggccgttggtgtagttgccgacgatgcggccgttggtcgagacgctgaccgactgcagctggccggccgggaaaccgtcctgctggatctggttgacctggacgttgccgttggcgtccgcgaactgggtcacgcccccggagccgaaattgatcaccgggctgccgagcgacacgccgttgaccacggcattattgagcgtgaccgacgagatcgccggcgacatctggccgttcgccgcgaaggtgaagttcacgttcgcgttctgccacgcaacctgcgtgccggtcgcattgggattgacctggtagaacatgttccaggtatcggtatggccggcgccgagcgaggcgctgtcgctcttggcccagcgcaattgcaggttaaccggcgcgccggagacgtcgtaggccgtgactgcgccgccggcgacgctctcgttgaggaacgtcgtgttgtcgttgccgaccacctggccggtgccgaccgtgccgccgccgccacgcgtcgcctgcgcagtggtggtgaagccgagagccgtgaatgcagcgttgttcgagctcgtcaccgacagatcggagttgacgccggaatgcagggtgatcttgccgccgctgattgtggagggagtcggggggacggtggcagcggcaccggtgatcgagtcgatcttgccgagcaacgttccgatgctatcggtgacgttgagctggttggcgcccgcgcccgaagccacgaacgtgatcaccgtgctgttgatcgtgatggtgtcgccgacgttgaaattggaagcgatcgagtcggtgccggaggcgcccgaaagcaaggtcgcggcggtattcgccgcctgcggcgtctgcttgttgttctgcgcggcgccggtgacggaggaatcggtatacggcgcggccggcgtgcccagcaccaacggattatggccagcgctgaacgcgcccggccgcagcagctcggagcccggcaccgacgtgtcgtgcgcggtggtcagagggtaggacgcgaggttggcgcgataatcgatcttggtggtctgctgcgcaggcaggaagtcgttcttgaaccgcagcacctgcggcgaggagccggaggggttgccggtggtcgggtcgatccgcacgccctcgagataatagccggcgccgttgacgaggtaaccgtccttgttgagctggaaatcgccgcggcgggtatagcggtcgacgccgtcgaacaccggcgagccgtcggtgaagccgccgggcttttgcaccgcgaagaagccgttgccgttgatcgccatgaaggtcgcgaccgaggccgactgcacgtcgccctgcaccgagttggtcgagcgcgactgcgcggtgacgccgccggcgagctgcgcggtcagcgcggtctgcgggacgaggtcgaggaaggaggtatcgatgcgcttgaaggccgtggtctgcgagttggcgatgttgccggagatattctcaagcgcgtacgaccctgcgcgcaagccaccgaccgccgtcgtaagtgcgccgaagatacccatgacatgttctccaattcgattcccggcggctggcaatcagcagatggccgcatcggcggagcatgtcgcaaaggtcgtgccaggaaacgaaacgtaacaaaatcatgcgcttgaaaaaaatgccccggccgtttaaccggggcacaattgccgggcaggcaacaattgccgggagggagcgcagttttgaccgcgacgcgaaccggtccctgcttcgctcgaaaacgctgtcaggtcgccgacggcgccgccgggtggaacatcagcgcaaagccgtccatgcagtagcgcagcccggtcggcttcgggccgtcgtcgaacacatggccgagatggccgccgcagcggcggcaatgcacctcggtgcgcagcatgccgaaggtgcggtccgacgtagtgccgatagcgttgtccagcggcttgtagaagctcggccagccggtgccgctctcatacttggtctcggacgagaacagcggcagatcgcagccggcgcaggcgaaggtgcccttgcggtgctctttgagcagcgggctcgatcccggccgctcggtgccctggttgcgcaggatctcgtattgctgcggcgtcagctgcgcgcgccattcggcgtcggtcttctcgatctcgaatttctcggcggcatgcgccggcgaggcgcgcagccagcggaaggccgcgaagctcagcaggctggcgacggaagcaagcaggatacggcgatcgatcattaatcatctccgatgcggacgggcaaacaggttcgccaacaaatacgaaccccgccgccggacgttacatccgcccgtcggagatccgctcactttcttgcgaggcgtgaggatacggcgtctcaccctccccgatccgccggggcggcacgggcggcggcaccggccgcaccacggctcccggcggcggacggcgcggcgccggtccccgggttccggccttgagattggcctcggccagccgcgcctcgcgcagccgttccttcgcacgtgcactctcgcgatggcgcgccagggtgcccgccacggatgcagcgcccctcgcccacaagccgacgaaatgaccggcgacacgaccggtggtgccgccggcccagaccagctcgaacggagaaaacagccgccagcggtcatcgccccacagaatgctgcgcgcgatcaactgcccggcgagcgccgaggtgttgagcccctgccggccgaagccgctcgccacccacaggcctctgcgcagctgtccgatctgcggcatgccgtgcacggtgacaccaaccgcgccgccgaacgtgtcggcgatcggaaccttcccgagctgcgggaacaccgtggcaatccggcgctgcaccgccgcaccaagccgcttcggccgcgcgttccaggtggtttcgggactggcccacaacaggcgatcgccatcgacgacgcgaaaatggtcgatgccgttgctgtcgacgaccgagccggaaaaggcgatcgcctcggccagccgttctccgagcggctcggtcaacgccgcgtagcgccacaccggcagcagcgtatcggacaggcgcttcagcggcgcgccgaggtggatattgccggcgaggacgatgtgattggcacgcaagcgcgccgacggcgtcacgatgcgtttgcggatgcccgaaaagtcgatgctgacgaccggcgtctcctcgaagatccggacccccgcccgcacagccagcgcggcgaggccgtggacatatttgcggccatcgatctggaacgccttcggatagtagatgccatggaagtagcggccggtcctgagcacgctgcggacgcgatcgacctgccagccttcgacttcggtcgcaaattcctcgccaatcgtctgcaggcggccgatcagcgcttcgccgacatcgacattggagacttccagcgcgccgtcgcttgggctgatgcccgggatcaaatcctcggtggcggtggcgcgcacataatcggcgccctccttggacagcgcccatagctgccgggcatcatcgaggccgacgcgctcgatcacatccgcgatcggcaggccgaagcccggcatcacggtgccgagatggtggccggaggcgttccagccgacctggcgcccctcgagcacggcgacgctggccccgagccgcgccgcctcgcgggccacggtcaggcccgccagccccgccccgaccacgcagatgtcgacgtcgaggtcgaacgccaggcggtcgcggaacggcgaggccgccgcatcggggccgtctgccgcacttgtggaagtctcgctcatgtcgtttcttacgaaccgctgcggcgcttgtcaccttgtccagggcatgagcctgtagaattaattcgaccagaccgaatcgagatggaagtccatgcgccgtttgctgctgctgcgtcacgccaagaccgaaaccgacgcgccgtcggggcaggaccaggaccgccgtctcgatgagcgcggccaccgcgatgcggctgagatcggcggctggatcgcgcgccacccgccgttgcccgatctggcgctggtgtcgccggcggtccgcaccacgcagacctttgagatcgtgcgcgaggcgctgacgggtgccggacctgcgccgaaagtcgacttcgtgccggaactctacggcgccgatccggcgctgctgctgaccgcgatccggatggcctcggtcaccgatccgaagcagctgatgctgatcggccataatcccggcatgcacgagctggcgctgacgctgaccggcagcggcgacgaggcggccaagcgcgcgctcgccgacaatctgccgacttcgggactcgccgtgttcgacttcgcgaccgacgactggaacgacgtctccttccgccgcggcaagctcgtcctgttcgtcagccctaaactgttgaagcaggcctcgcgcggctgacgcgagcggacaccgccgcgccgccatgttatattgccgatgcgcgacagggggaccggttcgcgtcgaccacgagctactgcaagaaaaagaaggcgcgcgtccctggcacagggaccaaacggctccagaccaatcgcggacaggaggcgcagatgtacaagtccattctcgtgccgatcgacctcgccgataccgatctggcgaagcctgcgatcgcaaccgctgcgacactgtcgcaaacctggaacggcgcggtgcgtctgctcaacgtgctgccgatgacgccggtgatgctcgccgaatatgtgccggcggatttcgacagccagcagcgtgaaacatcggaagaggcgctggcgatcgtggcgcgcgaatccggcatcgcgcccgggcgcatctcgggcgtggtccgccagggcggcatctatcacgagatcctcgaggaggccgcgaccatgaaggccgatttgatcgtgatgacctcgcaccgcccggcgatgcgcacctacttcctaggctcgaatgccggccacgtggtgcgctacgccaaatgctcggtgctggtggtgcggcactgaagcgcgatcggtccggccgcaccgcgtaccatctcaacgaccgcggcaggagcgcgccgctgccgaaatatcgaaaacaaccccatgcaaagcagtcaggcggccgcttcctcgcccggccccctcgcccgcaagggatcggctcaacggatccggaccagctcgaggtcaaagttgccggccacggcggtctcgatctggcagcgcgagattccgatgtcgcgcagtgtccggtcgtcgagctggcgcagcgtcttgatcgcctcgcggcgcacccaataggtcgcgagtgcatcgccccacacgcggagcaatcggagcaattcactcaccatgctggaccgcgcgggcgctgcggcggctgaggacatcgtcgtcattatcatctccttcgacgcgcaaacggcaaggctatgccgttgacgcaaatgccgtttcagcacctgcgccgtcgtgacctcggattgcttgcgctctcctcggtgcaatcatgggcttgttccctcctaaatgatccggtacattgctcggagcaaggaaaacattgctctcggtgcaataatgtcgcggttcgaatatctgaagctggcggatgcggtggccgccgagatcgccagcggcgcgctgaaggcgggcgaccgcctgccgccgcagcgccatttcgcctatgaccgcaacatcgcggtctcgaccgcgagccgggtctacaccgagctgttgcggcgcgggctggtggtcggcgaagtcggccgcggcaccttcgtgtcgggcgaggcgcgccgcggcaatgctgccccacccgagccgcgcggcgcccgcatcgacctcgaattcaactatccgctgctgccgcaccaggcgaccatgatcgcaaagagcctcgaagggctggagcggcccgaggtgctcgagggcgcgctgcggccggcgaccagttacggcacgcgggcggcgcggacgatctcctcggaattcctggcgcgcaagagctgggcaccgaatcccgaccagatcgtgttcaccgccaatggccggcaatgcatcgcctcggcgctggccgccgtcgtgccgcccggcggccgctgcggcgttgaggcgctgacctacccgttcgtgaagggcatagccgcgcggctcggcatctcgctggtgccgctcgcgatggacgagcacggcgtccgccccgatgcggtgcaaaaggcgcaccgcgaggcgcatctgtctgcgctctacgtccagcccacgatccagaacccgctcagcatcaccatgccggccgagcgccgcgccgagctgctgcgcgtgatcgagaagctcggcctcgtcgtgatcgaggacggcgtctacggcttcctcgatgacgagatgccgctggccgcgctcgcacccgacagctgcatcgtgctcgacagcctgtcgaagaaggtcgcgcccggtctcgcgctcggcttcatcgtgtcgccgccgcgactgcgcgaaagcatcatggccgcggtgcgctcgggcggctggaccgcgtcgggctacgcctttgccgcaggccagcgcctgatggccgacggcaccgccgccgagctgtcacggctgaagcggatcgacgccggccgccgccagcagatcgcggcgaagcatctggccgatttcgagatccagaccaacccgaagtcctatcatctctggctgaccctgccgccgcattggcgctcgcagaccctggtcgccgccgcagcgcgccgcgatatcgcgttgacgccgtcgacgaccttcgccgccacgcccgggcacgcgcccaatgcagtgcggcttgcactcgccgcgccgccgatggagcaactcgacctcggcctgcggacactggcgggaatgctgagcgcgaccgaagaggatttcgactcgacggagtgacaccgctcgacggagtgacaccgtgccgagcgaccggccttcttcgatctccggccggctttattttgcatcagcgccccctgtaagtctcccgtcagcgaccggcagtagcatcgcgcgcaagaggctctgatgcgcagcctgttgacgggatatttcatgatctacgggtttcccattcagaactgggtgcctccgacatttgcggtgctcctggcctggatcgcgttttcgcgccgggtgttcaagtaatcaacgatgggtgattggctcgtcagcggcacggcagttcagaactggattctggtggcgctcgcgatcaccgcgcttgcagcagcctattcctggtggtcgaagcgctaacgcatgatgaactgtgatcgaaaggcttcggccgggcgctcgcttcacctctccctttgggagaggtcgatttgcgaagcaaatcgggtgaggggcgcagctctaacgagagagtgtaacccctcacccgacgctacgcgccgacctctcccaaagggagaggtgaacctccgctgccgatctaggttcaagccaatcccatgatgcacgctagaaaccacaggcagcatacgtcttccgggccagacgaaaatgcgcgccgtcggcgacgaagtcgacatccaggcactggttgcctcgacgatactcgccgatcgcgccgcattgcagatattcgaggttgatccgccagcgcttttcttgcggcgagtaggtcgcaaagtcgtgctgcgcgaccggcgtacctttgcaaattccggcaacatattgccgcacgtcgaggggcagagaatcgatgtgatgaggatcagccagatcatgcttgttgccgacgctgccgcccttggaaacagccggcgcgacactcaagagcatgagacaaagagcgagaagggggatccggattgtcatctgacactccagctagaagcaaatcgtacggcaatgttacagcgggttgcttacagcccgcttacaatccggccggcgagaacgtgcagattcgtgcttcaggcgaccggccatcgcgcgatgaatccccgcaccaagtacggctcgatcttgtcccattccgtcaggacacggcgacgaaattcgggaacggtgtgccagagcgcgcgcgggaccgcaaagctatccaccgtcaccagcatcttctcgacctccggccagtgccgctgcagcgtcatgggatagcgccgcgcggtccagctattgccgagacagatcacgctgctgatattggcgagcccgagcgccgcgtcgatcaccggcagcgagaagatcacgttctcgccggtgttccgcgcgcgatgctcctcgaggatccgctcggccggcacgccgcccgcgactatggcgcccttgatgatctcgcattccgagcggacatcgcccggcgtgacgccgccgctcacgatcgaccagcgcgcgaagccgtcgcgccagagccggacagccgcgtcgaccagctcggcgacatcgccgcgggtgccgaacacgaacagcagatcggcgggcttgagcggcgtctcgatcaggtgccgggcattgatcgcggcgatctcgtcgtcggacggcatccgcaagcttcgatcatccatgcccctgcccgttccgttcgcgacaccacacgccgacgatgccgcgcacgaggcaatgcacgaagtcacgtttcattgcgcttgattgcgatccggcttgggcaacggcttgggtagcagcgtgtcgggcagttgatcgaagccgtagcgccgcgggcggttgcggccgacgaagccgccgacctgccaggtgaacagcgcggcgaagccgagcaggaacagcgcgcctgtccagttcgcggtcatcaacgccatcaccagcaatccgaccatcgccaccgcaagccacgccagcacggccagcgccgcggtgtatgtcttcgacccgagacctccgaccagcctcgccgtgctgccggccgcctgcatccggcgatgcagctcgacgatgaagtcgcgatagagatggccctgcggcgcgaccagcgtcgcggtctgccaggtggtcgagaggatcgcgatccgcccgcccttggcatggtcgatgtcgacgcgaaaccgctgctgctgcatcgacaccgggcgatacgacagcttcacggcggaaatgtcggcatagtcccacacgcccgatcggccggcgatccgccacgacagcccctcatcggtcagctcgaactggtgcgccgagccgaccaaggaggccttgtaggcatagcgcacggctgcgccctcgcctgcctccgaccgcgcctgcaacgttgttggcaatttgccgttccgcctgttcggacacatccgcgcgcttgcatggagtgtcgtgcctatcctacaagcgagccatgcccgagacgacctattttccgcgttacctcatcctcggcggcgcgatgatttcaggcgtgctgctggcgctggccgtgcatatgctcggtgcgcgctatgggcttgatctcggcgggctgtggcgttccgacagccacgagttcatgccggcaggtgcggcgatcgcctggtggctgatcgcgagcgtcgggttctcgggcggctatttcaccgccaatctgatgcacagcgcagtggccggccagatcccgcagcggatgcggcagttcctgatcgtcgtcggcgtgctgatgctggccggcgccggccaggcggcctccgcaccgagcgcggtgtcgaccatctccgccgtgctcgccggcctcgccgctttgtgcctcggcgccgtgatggcgttttgcggcgcctattttgcgctgaggaagagctagcgcgtctactcgtaaacgttcggactcggaggtagagcggatgtcgctccgcttggccgcggcagacggcttatggcccgttgctgacctccggggccatcgccgagatttccgagtccgagaggacacttggttccgaggctcggatgtcgcaccttgaccccaagccgccattcgaccgtcgctcgattacaactggccggggcttctcagaagtacggcttcgcgataccgtggcacggacctatcggccggagcgtcggagggtacaatggcggtgccagtcacgcgctatgccaagagtggcgaagttcatatcgcctatcaggtctttggcgatggcgcgattgatctcgtatttgtgccggggttcatctcgcacatcgagaactactgggagcatccagatctagcccgatggctccttcgtctcgggacctttgcccgcgtgatcatgttcgacaagcgtgggaccgggctgtctgacccggtctccgaaatgccgtcactggacatgcgcatggatgatgttcgcgcggtgatggacgcggcggcaagcaagagcgcggccttgctgggcgtctcggagggtgggggcttggcggcgctgtttgccgcgacctatcctgaacgttgccagcggctggtgctgtacggcacgtttgcgcgcttcccaatttccgacgaggtcctcaagcctctcataaagtacatcgatcgagcctgggggagcggcgtaagtctgcccgtctgggcaccgtcacgccgaagcgaccaggccatgcagcaatggtggggtcgctttgagcgactgggcgggagccccgccgcgacagttgccgtccttcgcatggccgccgaaaccgacgtcagcggcgttctgtcctcgattcgggtgccgacactcgtgatccattgcaaggatgatacgcttatccccgtcgagtgcggacgtttcattgcgcagactatccccggcgcgcagtggatcgagttggccggacaggatcatctcttcttcattcacgagcagatcggcgacttcgtcgaggagttcctgaccggatcggtctcggaagccgaaagccaccgcgtgctcgcaaccgtcctgttcacggacatcgtcggttcgacggcacgcgccgagcaagtcggcgataaacattggcatgacctgctcggcgcacatcatgctacggtgaggcgcgaactcgcacgttaccggggccgtgaggtgaaatcgctgggagacggatttctcgccaccttcgacggacccgcccgcgcggtccgctgtgcttgcgccattgctgatgctgtgcggctgctgggcattgaagtccgctgcggcctgcataccggcgagatcgaaactggagacaacgacgtgctgggaatcgcggtccacattgcatcacgcatctccgcgtctgccgtcgcgggcgaagtcctcgtatcgcggaccgtgaaggacctggtctctggctcaggcctgcagttcagtgagcggggaaagcactcgctcaagggactccaggatccgatggagctctatgcaaccgtacgctgaggctggcaggaccgcagtcttcgatctgagcggtcgcagagcccgcatctggtcccaaggccgacatgccaccatctccgtttcatcgtcgccattcaagtgcgaagcggacgctgccaatttgtgaacagcgcccgagccaagtggacgccggctcgcgtcaagaaaccgcgtccgacaagaagccagtcaggccaccgaccgttccggcgcccggcgcaacatcttggcgacgtcagccgccggccgcggcgggctgaacagatagccctgcgcctgcgtgcagccttcccgacgcagcaggtcgaactgggtatcggtctcgacgccttcggccgtggtgacgatgccgaggctcttgccgagaccggtgaccgcgcgcacgatcgccatcgagtcctcgcgcgttgcaaggtccgtcacgaacgaccggtcgatcttgatcttgtcgaacgggaagctgcgcagatagctcagcgaggaatagccggtgccgaaatcgtccagcgagatgcggacgccgaagccgcgcagctcgtgcagcaccgcgagcgtcgcctcgctgttctgcagcagcactgattcggtgatctcgagctcgagccgatccggcgacaggcccgacgcatccagcgccgcccgcaccgacgataccaggttcggattcttgaactgcaccggagacaggttgacggcaaccgcgatgtcagcgggccaccctgcggcctcgaagcaagccttgcgcagcacgatctcgccgagcgggacgatcagtccggtttcctcggcgacggggatgaaattgttgggcgcgatcagcccgcgcaggccatgattccagcgcgccagcgcctcgaaggcgaccacccggtcgccctcgacgtcgcggatcggctggtaatagacctcgaactcgtcgtgctcgagcgcaagccgcaggtcacgctccagcaggcggcgcgcctgcgcgcgcgcatccatcccggtctcgaagaaccggtaggtgccgcggccgtcggccttggcgcggtacagcgcgagatcggccttctgcagcagctcgtcgggatccttgccgtcctcgggcgcgagcgagatgccgatgctgacgccgatcacgagctggtggccttcgatctcgtagggcgcggcgatccgctcgaccacgtagcttgccagcgacgacaccacggacggttcgcaattgctgcagaactgcacgatggcgaattcgtcaccgccgagccgtgccacggtgtcgtgctcggtcacgcattcgccgagccggcgcgcgacctcgcggagcagcgcatcgccgatcggatgtccgagcgtgtcgttgatctccttgaaatgatcgaggtcgaggcagagcaccgccacctggtcggtgcgcttggccaatctcgaggccttctcgagttgctcgcggaacagcgtccggttcggcaggttggtcagcgcgtcatgccgcgccatatgtgaaatctgctcctgggcctgctgccactcggtgatgtcctcgaaagtcgcgacccagccgccgcccttcatcggctggtcgacgacgcggatcgcgcggtcattgcggttgacgatccgcgtcgcgccgttgccggccctggcttcggcgacaagcgcattgcagaactcggtgggatcgccgtcccactcgccgatggaatgcaggtcctgcaggacgtcgatcagcagacgcccctgcaacggcacgcgattgcgccccatgatctcgctgtagcgctcgttgaacagcatgatgcggccatcggcatcgaacatgcacagcccctgcgacatgttctcgagcgcggtatcgagcaccaccttctgcttgtggagctcggtcttggcgcggcgatcgaggatggaggcgatcagcgacagcccgaggatcgcgaaggcggcaaccgcggtcatcaacgagagcgcgcgcggcgagaccgaaagcccgtcgggaacgatggtcggatccggaacgagcgtcacggcgcccatcgcggtgaaatgatgcgagacgatcgcaacggtcaggagaccggtcgcggccgcggtgatgccaagtcgctcgccgcgcgcggcaacgaccagcgcgaacgcgccaagcaggcttccaaatgcgatcgaggcgacgacgatgccgggggaccagacgatgcgcgcgggcaattccagccccagcatgccggtgtaatgcatcgccgcgacaccgacgccgacgatggcgccaccggcggcgaccgtccaccagcgttcgttgagcgttgcgaccgccaggccgatcgccaggatcgcaaccgcgagcaccagcgacagcagcgtgatcggaatgttgtacccggcctcgatgccgggatcgtaggccagcatggcgacgaaatgggtggcccagatgccgcaaccgccgaccgccgcatcgaggcctatccagatctcgcgggcgcggccctgtgcggcgcgggcccggtgaaacaggctgatcgcgacggcgctggcgagcaggcagatcaccccaccaaggacgaccaaccgccagtcatgttccagggtgagacaggtgagtacgcgatacatataggcccccgttatggacccataagaacaagcgcattcgtgtacgaacggtaaccgcaccgcagcaagcttccacgcatggtgaagaagccttgaatgcacggagtaccgtcgagaaaaaccgttgtcctcacacgcaattcagccttctcggcagccttggccatccggcgaccgcccgtgaggggcaagcctcgctcagggccgtgcttgtgatgaggcgccgatccagaccagcgcggcggcggcaagcaggacgccggcggagatcacgagagccgcatgcaggccggccatgaaggcggcggaccggccgaccatcgagccgaacagcgcgacaccgagcacgctgccggtctgccgggtcgcattcagcaccccggccgcgatcccggcatgctgcggctcggcgctgccgagcagcgtcgatgtcaatggcggcaccaggagcccgaggccgccgctgatcgcgagcagttgcaggcagatcgcgggatagctcgtgccgggaccgatgaacagcagcgccaggcatccggcagccgagagcgcggcgccgagcgcgatcgccgccggcgcaccgatccgctccgcaacacgcggcgcaatcaggttggccggcagcaccgcgccgagcatcggcacgaacgccagcccggttgcgaacgccgagagccggttgacctgctggaagtagaggctgagcacgaagatcagcccgtagaacgcgacgttcaccagcaggccgaccagcgaggtcagcgcgaacattcgatgactgaacagcgagagcggcagcatcggctgcgcggcgcgcgcctcgcgccagacgaacagcacggagaacacgccggcgagcaggaagcccgcgatcacgaacgggctgctccagccgagcgcgccgccttcgatcagcgcgccggccagcgtgccgagcgcggcgatcgccgcaagttgccccggcagatcgagccggtgctgctgatggcgcgcggtttcgccggcaaagcgccaggcgagccacagcccggcgaggccgatcggcaggttgaccaggaagatcgcgcgccagccgaccagcgtgatcagcgcgccgccgacgaacgggccggcggtcaatgcaaggctggcgccggcggcccagacgccgaccgcgcgtccccgcgccttgtcgtccgcataggcgtggcggagcagcgcgagcgagttgggcaccaggatcgccgcggccagtccctgcacgcagcgcgcggcgatcagcgtcgcggcatcaggcgcgaccgcgcaggcgaccgaggccgcggtgaagatcgcaaaacccgccatgaagatgcgcttggcgccgatccggtcgccgagcgcgcccgcggtcaggatgaaggccgcaaaggcgatggtgtaggcgctgaccacccattgcagctcggcgacgccgccgccgagcgagccgccgatggcgttgagcgccgtgttgacgatggtgacgtcgagctgcacgacgccgtagccgaggctcatcgcggccagcgtcagcgtcgccgcgagcccggccggctgccgttgcgacgccgcgtgctgctccggcatgcgccggaggttcagggatgtctgttgcatggtcttgacctcgctctgggcaaccaatgcgagacataggccttcgcttcccccgaacacttcgccatcgatcgaagtgtggcatcgtcgcgccgggcgggccatgtggccgcagccatcttgcgcggcgttttgcctcaatagacctacggaccgccctccgggcgtctcattccggccccaacggcggtccacagccggatcacgcgcatgcgcggatcgacttcacgctttggtaaacgccgcagccggccctgccgtccccatgctgacgcatatcgtccattcgctctgttccggaagccctgtggccgcgacgctgcggcggcaaaaccggcaaaaaaccgacgaatttgccttgaacagcggaccaagcggcgatccgttcgcagccgccgacatggcggcgactcacattccgctcagcgagaacatatgtaggcagtatgacaatgacgccggacggaagccgaagcttggcttgtcaagggctgcacaacgcatcggttttgccttatgggtcatcgcgtacggtgcgcttgcccgtcacccgtcgccattcgcgaccgggtcccactgaaatttgccgcctcgccgggaggatgaatgcttcggctgctgaccacgcttgggcgtggtttcaaggaaaagatcggctggaaacggctcggaatcgccgcgagtgtattgatcatcgcgctggcgatcacctcgctggtccacaccctgaagggggtcgataccggtgtcatcctcaccgcgctgaccgacatcgcgccgcaccggatcgcgctcgcggcgctctgtgtggtcggagcgttctgcacgctcaccttctatgacttcttcgcgctgcgcacgatcggcaagacccacgtcccctaccgcatcgcagcactctcgagcttcacaagctacacgatcggccacaatatcggcgccaccgtgtttaccggcggcgcgatccgcttccggatctattccgattacggcctctccgccatcgacgtcgccaagatctgctttctgtcgggactgaccttctggctcggcaatctgttcgtgctcggcttcggcatggcctggcacccggccgcggcgtcggcgatggacctgctgccgccggcgatgaaccggctgatcgcgctcggctgccttgccggcatcggcgcctatttcgtctggctcttgaccggcgacaagcgccgcgagctcggccagaacggctggaaggtggtgctgccctcggccaagctgacgctgctgcagatcttcatcggcgtggtcgatctcggcttctgcgcgctcgcgatgtatctcttgatgccgaccgagccgcatatcgacttcgtctcgctggcggtcgtgttcatcctggcaaccctgctcggattcgcaagccacgccccgggctcgatcggcgtgttcgacgccgcgatgctggtggcgctgccggagttcagcaaggaacaattgctggcgacgctggtggtgttccgcatcctctatttcctgatcccgttcgggatctcgatctcgatcatgggcatgcgcgagctgtggctgaacgtggtgcagccctggcaggaacgcaagcgattgagccaagcctgcacggcttcggcgaccgtgcggcaaccgatcgaaagccggcagcagcggatcaggcagctgaaacggtaacagcgacgttatctgcccccgacccgggttttcgattccggttttttgatccccgcagccgcctctcttattttcgccgcaccgctcacgtcaaaccgcgccatgattggctttttggttcgattttcgtttcgtgtgacggcctgcagcgtgctgctcggcagcgcgctcgcaacggtatcggctccggccgcaagggcgcaggataaccagctttcgatctcctgggaggtccgcaaccgtttccgcctgttccgcgaggaacgcgacttccgcctgcatgtcgaaagcgggctcggccgcagcgtgctggcctcggaacaggcgctggaactgcaaagcgacggccgcggctgggcgcgcaacatggtcaaccggctgtgcatcgacctgcagggccgcgtcagcgagccgtgcagccgcgacaacgtcaaggaaagctatctgacgccgatcgatcacccgatcgtggtgcggctcaccggcccggttccggtcggcgcgacctgcgcctggtcgttcgacgacggcgacgggccgcaatcctcgaccttcgattgcgccgaaccggtcaatctgcgcgtccgctacggccgcaccaccgtcgcgaccgtcgacgtcgccagcggctcggacgccaaccagcgcgtgacgacgccgatcgcggtgcgcgatctgctgatcgcgggcctcggcgacagcatcgcatcgggtgaaggcaatcccgatcgcccgatcgcgctctccgacgaagggttctgtttccgctcctatctcggcggcgcgcaatattaccgaccgagccgcgccggctacaaaggcggccgcgcctgcgaagcgccggacaccctcaccaactggcagcgccagagcgcgctgtggctcaattcggcgtgccatcgttcgctgtacagctaccagacccgcaccgcgcttgcgctcgccgtgcaatatccgcacatcgcggtaacctatctgccgctggcctgcaccggcgcgaccatagccgacgggctgctcggctcgcagcaggcgcgcgaatgtctgccgacgaaaaccgccaacacctgctcgggcaccgtcaacggccagatcgccgagctgcgcacggcactcgcagccgccaagcgccggcagccggaccgcgcgctcgatctcttgctgctgtcgatcggcgccaacgacatctacttctccggcctcgtcgccaacgtgatcgtcgacacgccgaccgaacgcacgctgttcagccagggcggctcgatggccagcgtcgacgatgcgcgttcagcgctggcgcgcgacctgccggctgatttcgccaagctgcgcgatgcgctgaagccgctcgtcggcggcgacctgtcgcgcgtgatctacacggcctatgccaatccggcgctggccagcggcggcgcgccctgccccggcggccgcgccggcttcgagatccatccctcgttcaacgccgatcccaagcggctcgcctcggtctcgagcttcgtgcagaacgagttcctgccgcaactcaaggcgatcgcgcagtgccagtccggcatcatctgccgcaatccgcaggccgaccgcatgaccttcgtcgatgcgcatcaggacgcgttcgcaagccatggcttctgcgcgcgcgcctcgagcgatccggagttcgatcgcgactgcttcgccgccaacggcgacagcttcgtctccgacatcgtcgccgcggcgagccagccgctgaaatgcggccgcagcgccggcgaataccgcgcctacctgccgcgtgcgcgctggatccgcgacgccaatgacagctatttcgcggcgatgacctatccgcagggcctgccgtcctcgatgcagccgaccgacatccacgacgcgacatggggcatcctgtcggcggtgtatggcggcgcggtgcatcccagcgccgaaggtcatgcggcgatggccgatgccgccgtgcctgcagccgccactgtgctgcaactgaacaccacggtgcccgaggtgctgtccgagccggtcgcaccactgccgaccacgccagaacagcgctgaacgcgcgcacggcacgaaggcgagcgcgatccggatcggagcgtagggagtcctagtgccgcttcgtcgcgggcaacggcgcaggcggcggcggcttcaccgctgcggcttgcgccggcagatatttggcgacgatcgcgggatcgagctgcgccagcgcggtgtcgggcagccgggtccagacctcgtccttgccgaacagcgagatgccgaggtagccgcgcatggtcagcgtctgcccatcggcgctcagcgtcatcttggccttgtagaccttgccgttgcgcggatcgagcacgttgccgccttcataggcaagtccgttgcgcttcatgtcgcggatcagcggaatgccgagccacggcatgtccttgcgatcgtcggtgcatttcgagcagaccggattgggctgatcgccgggcgccgaaaacatcttggcgatcatgccttcgtacaggccgttgcgctcgattaccaggaaccagccctcggtcttgccgtcttcgatcttctgccagagaccggccgccgtcggctccgccgccgaagccgcaagcggagcagttagcgaaaaggccgcggcgagcgccaagatcagccggagtctggatagcgtgttccgcatcatcgtcacctgatcgatcaaacccgactacgagcagactacggccatttcacgaagcgttccagtacccgcgccgcgcgggaaatggccgatgccccggcattggtctccgttggagtggaatcagttcacgccgagcttcttctgcaaactggatgacgaggttgtgtactggaacaccagccgcttgtccggatacacgtagcggtgcgccttctgcgccatcagcgcgccctcgtggaagccggagagaatgagcttcagcttgcccgggtaggtgttgatatcgccgatcgcgaagatgcctgagacgttggtctcgaacgccgcggtgtcgaccggcaccagattgttctcgagcgccacgccccagttcgcgaccggaccgagcttcatggtgaggccgaagaacggcagcatcgtatcgcaggcgatcgtcgacatcgcattgtcgttgcccttcaaggccgcgccggagagttgaccgttggcgccttcgagcccggtgacctggccgatcctgagatccatcttgccgtcggccaccagcgtacgcatctgctcgacgctgtgcggcgccgcgcggaaatcgtcgcgccggtgcagcagcgtgatgcgcttggcgatcggatgcaggttgagcgtccagtcgagcgcggaatcgccgccgccgacgatcaggatgttcttgtcgcggaactgctccatcttgcgcacggcatagaacaccgaggttccctcataggcctcgatgcccggcaccggggggcgcttgggctggaacgaaccgccgcccgcggagatcaccacgaccttggcttcgaactccttgccggcatcggtcttcacgcgaaacaagggatcgccgatcttctcgatgctctcgaccatctcgttgaggtggaaggtcgggttgaacggcttgatctgctccagcagctgatcggtgaggccctggccggtgacgaagggaatgccgggaatgtcgtagatcggcttctcgggatagagttcggcgcactgcccgccgatcttgtcgaggatgtcgaccagatgcaccttcatgtcgagcaggcccagttcgaacacggcgaacagtccgcaggggcccgcgccaataatcagcacatcggtcttgatcgcttcgctcatgtccgcttcttttcagttgaggtcgactggacggcttttcgcctgtccagccaagtgggccggatcgggacatgcataatagggaccgcggccggcgcggcaaccccttgccgagccttcgtaactcggctgtatggacggaaactgacggagatcgattgtcgtgaacgcccctgtccgcgtggaagacacgccgcgcctggaagatttcccctatcgcctgtccgacaacgtgcgctttgccgatctcgacccgaacgggcacgtcaacaacgcggtctatgcgagctattttgaaaccggccgcgtcacgctggtgaaggaccgcagcatgggactgatgccggccgggctcggctggatcatggtgcgtctcgacatccatttccgcgccgagctgcactggccgggccagatcgaactcgggctcggtctcgtcaagttcggacggacatcgaccactttcgatcaggtggtgttttcggaaggcagatgcgtggcgtcggcgaaggcggtcaccgtgatgatcgatgaggcgacgcgcaggccgacaccgctgccggcggaggtcaaggagaacttccgccgctgggtccgtcgcggggtgaacccggacggcgagtgacggagcttaggcctgccgttccggcgtcgacacgaccagtccgtcgagctcgtcggtgaccttgatttggcaggacagccgcgagttcggacgcacgtcgaagccgaaatccagcatgtcctcttccatcggcgacggcgcaccgaccttctcgcgccacgcttcatcgacatagacatggcaggtcgcacaggcgcaggcgccgccgcattcggcttcaatgccgggaatggcgttgcggatcgcgccttccattaccgttgcgccgttctcgatatcaatggagcgcttctcgccggaatggtcgataaagtggattttggccatgattgctcgtgctgccggaatacgccggacgatggatggaaaggtcccgggcagtcgtataacgggtcgatccgcacagcgccagcacggagaccgaaatcctgccggccggccgggatagcgtccaggcgctagcggcaagccggtggggatgcggaaggcctaggaccggcccagaatcagctcgatcgccgtgcgcgcctcggcaatcgcgaccccgagcgcggcaagcggctgggccggatcggaaccgccggccagcgcggtttcaaggttagcggcggcctcggcgacgccgaaagccccgatcgcccgcgccgatcccttcagggtatgggcatgggtcggagcgtcgggcggcaagccggccagctcaccaaggatccgggccgactgggtcgagaacatcgccagcacttcccgctccagccccggatcgcccagcgtcatgcgctgaaggtgatcgacgtcgatcggcccgccgccgggagcgagcggcggcgattgcgtccattcaacccgttcgagatgaagcggcatggcctgtccctgtcgtctcccccggggtcttcaccggcggaccgtcggcgagccaatcacgaaactggttaacgaattgttgtcgggatgatcggcaaaaccgcctgattctggacaatttccggacacaatcggccctctgcggctggaatttcgagtacccataaggccttatggcgcaaagctgttaacgatgattaagaaagtattaatcgcaagcatttcattcgcaccactctccccataggatgtttgtggatgtagcggacaagccgccgaggggggcgcttgcgctccgcttgtgggcaccggcttcgagcttgcgtggggacgatcgcaggctcgccgacgcgtagatagtgagagggcttggactgaacatggcgaacactcccaagaaggtcaaagatcccaccgaagtcgcgctttctgccatccaggaagccctcaacatcagcgaacagggcacggaaaaccgcagccccctcaacgaaggcgcggtgccgcccagcctgccgccgtcggcgccggatttttccgccacatcgttcgagtcccgtccgacttccgatcgttcggccttcgagccgatcgaggagccgcgcgccccgcgccgcgccgccaatgacgatcgcgagaccatcggccagatgctgcagaccctgcagggagggcgcgcccgcaacgccttcacgctgttcttcgtctgctccggcgcctggttgctcggcggcgccatcctcaccatcgcgttctggccggccctgcaggcatcgatggcccagggcaccggcgtgctggtgctcgccggcctcgccgcgctgttcgccgttccgatcctgctgttctactacctcgccagcctcgcctcgcacggccagcgcatgcagatgatcgcgcaatcgatggcgcaggtcgcgatgcgattctccgagccggaaaacgccgccgccgattccatggtgacggtcggccaggcgatccgccgcgaagtcgcggcgatgggcgacggcgtcgagcgcgcgatcgcgcgcgccggcgagctcgagaccctcgtcgccaacgaggtcgcggcgctggagcgcgcctattccgacaatgaagtacgcatccgcgcgctgctgcaggacatcgcccaccagcgcgacaatctggtcggccaggccgagcaggtgcgcagcgccatctccggcgtgcagatcgacctgcgccacgacatcgcgctgatctcggacgcgatcgcctcgcgcgtcgacgaggtcgccaagagcatcaccggtgcgctggaagagcgcggccagcacatcacgaccgcgctgagccatgccggcgacaacatgatcctcgcgctcggcgagcgcggcggcgacctgctcgaccggctcgaggaagccagcgccgagaccacgcgcgcggtgatggacgcctccgagcggctgaccaccagcctcaacttcaagaccggccacgtccatgacgagttcgtcgatctggccgaccgcgtccacgagatgctgaacgagcgcatcgaccgcatcaccggcgagttcgagcagcgttcgtccgccatcgtcgacggcatctccgaccgcaccgaggaggtccacgactcgctgaagaactccgccgactcgctgctgctcgagctcgagctgcgcagcaacgacctcgtcagcaagatcgacgacgccggcaaccgcctcgccggccagatcatgacgtccggcgacagggcgagcgaggcgctcgacgtcaccgtcaattcgctggtcgccaaggtggtgggccagaccgagacggcgcacgactcgctgtcgctgcagatgagcgcgttcgacgacctcgtgaagaaccacggcagcgaactcgccgagaaattcgcccgcgactccggcacgctcggcgcgctgatcacccgccacatctcggaattcgaccgcacggtgaagaccttcggcggcgacatcgtcgagcgcatgggtcagcggacccaggacatcgccgacagcctgaagacctatgtcgacaccttcgacaatcgcgtcaccgccaatggcggcgagatcaccgcctcgctcgaccagcgcctgctgcagttcgagaccacgctcggcagccgcgtcaccacgctcgacgcctcgctgaccgacaagctgtcgtcgttcgacagttcgctcgccagcaagatcggctcgttcgacggccgcctgcagtcgctcgacgacgcgatcgacagccgcatgaagacgctcgaggtcaccttcgagagccgcgccaagtcggtcaccgacaccatcgacggccatctcggcacgctcgcgacgcagctgaccgaaggcgccacccaggcgatccactcgatcgactcgcgcctcggcctgctcaccacgaccctgaccgaaggcaccgtgcaggcgatcgccgcggtcgaccaccgcatcaatggcgtcaccgagacgatcgacggccacagcatccgcctcgtcgacaccatcaacggccacagcacccgcctcgccgacaccatcaatggccacagcgcgaacctgacagacacgatctcggcgcgcttcgccgacatccagcagggcatcgagagccgcgtcggcgtcatcgccggtgacatcgacacccgcgtcgcgcagttcgaggacctgctcggctcccgcgtcgaggccgtcgccggccgcatcgagagcagcggccgccaggccagcgaggacctgatgtcccgcgccgagctgctgtcgtcgagcatcaagtcccatgtcgaggacgccgagcgctcgctgaccaacctcgtggtcaacaccagcgaaaccatccagaccggcgcgcgcaccgcgcagcaggcgctgctcagcgtgtccgccgacgtcggcaaccagctcaagctgagctcggccgaggtcgagagcgtgctgaccgccgtcggcaccagcgccgccaactcgatcctcaccagtgcccgcgacgcgcaggtctcgctggtctccgcctccggcgacgtcgcctcgcagatcaaggcgctgtcggaggacgtcgagcgcacgctgcaggcagccggcagcgccaccgccgcgtccgtgctgtcgggcgcccgcgacgcgcagaccacgctggtcagcgcctcggtcgaggccgcaagccaggtcaagtcgctggccgccgatgtcgagcaatcgctgtcgatgtccggctccgccgccgccgaagcgatcatgaccggcgcccgcgaggcccagaccacgctgatctcgacctcgaccgacgtcaccggccaggtcaaggcgctcgccagcgacgtcgagcgctcgctgtcgatggccggctccgcaactgcggaagccgtcgtcgcctccgcccgcgaggctcagagcacgctggctggtgcgtcgaccgaagccgccaatctcgtccgcacgctggcggccgannnnnnnnnncgaggctcagagcacgctggctggtgcgtcgaccgaagccgccaatctcgtccgcacgctggcggccgacatgcagcactcgctctcgaccgccggcaccgcgaccgcggaatccatcgtcgcctccgcccgcgaggcccagagcacgctggctggcgcctccaccgaggccaccgatctggtccgcaccctggcggccgacatggagcgctcgctgtcgatggccggctccgccaccgcggaatcgatcacgtcaggcgcgcgtgaagcgcagagcacgctggtcaatgcgtcgaccgaagctgcgaccaaggtgtcggcacttgccgccgacatccagcgtgcgctgtcgatggccggttcaggcaccgccgaggtgctgacggccggcgcccgcgaggcgcagaacaccctcgtcgccgcgtcgacggaggcggccaaccacgtcaagtcgctggcagccgatgtcgagcgcaccctgacgtcggtcggcaccaacaccgcccagtcgatcctcggcagtgcgcgcgatgcccagagctcgttcgtcgcgacgtccagcgaggccgcaacccagatccgcgcgatctccgtcgagatcgagcgctcgctgaccaccgccagcgccgagaccgcgcagaccatcctgggcagcgcccgcgaagcccagagctcgtttgctgcgacctccgccgatgccgccgcccagatccgcacgctctcgaccgatatcgagcgtgcgctaagctcggtcacggccaagaccaccgacaacatccagacctcggcgcagaacgcgcaggccgcactgatcaccatgtccaacgaggtctcgaccaaggtcaagacaacctccgccgacatcgagcgttcggtgctgtccgccaccagcgcgttcggctcggcgatgaccggcaagaccgacgagatcgttacctatgtgcagcagcagaccgagcgtctgtcgcagatggtcgacggccgccgcggctcgctggtcgaggcgctgaccgccaagaccacgcaacttgcgagcgatatggatcgcgccaccgccgacgcgctgaaggcgatcgaaacccgcggcctcgccttctcgcagtcgatgtcggcgcatggcggcgatgtcgcgcgcaacatcacctcggccggcgatcaggcgaccggcgcggtggcgaagtcgctcaaggagctcgagcaggcctcgcgcgcggcgatcgaccagtcgcgccaggtctcgatctcggccgtcaccgagatgcaggagaccagcaagatcctgcgcaccgatacggtggcgctgttcgagcggctgcgcgagggcaacatcctgctgcaggaagtgttgaccggcgcccacgacaacctcaactcgctggagcgcgcgctggtgacccgcgtggccgacttcgtgtccgccatgaacgacgtcacctcacgcaacggcgtcgcgacccagacgctggaagaccagctcacggtgttcaacagcaagaccggcaaggcgctggaggatctcggcgcgctgtcgagccagttcgagacccacggcaaggcgctgatcgaggcggctgccgtggtcgagcaggccaaccgctcgacgacggcctccgtcagcgagcgtaaggaggcgctggaggcgctggtcacgaccatcgacctgcgcaccaccgatctcgaccagcggctgtcgcgcttcaccgggctgctcgacgaatcgctcggcgcggccgaggaacgcgcccgcgacatcgcccgcgtggtggcggagaccgccggcgccggttcggctgcgatcagcaggcagttcgaggcggtgcgccaggccgccgagaacgagcgccagcagaccgtcgacgcgatgaacgagctctaccagcagagcaacgccgagaccgatgcgatgttcagggaatcgacggagaagttctccgcgatggtcgcggcgatgaagcagatggcgagcgagatgcacagcgagctcgaggccacccgcaacgagctgcgccgcggcgtgctggaaatgccgcaggaggccgccgagaataccgcgcagatgcgcaaggtgatcgtcgaccagatcgaggcgctggccgagctgaaccgcatcgtcgcccatcacggccgcgggctcgacgtggtctcaaccaaccgcgccagcgtccggcacgaagagccggtgatggctgccgccggcggccgcgccgacctgcggatgcgggacagcgtccgtgacaacggcaacagtgcctcgacgctgccgccgcccgatctcggcatggcgagctcgcgccgcaccgaggctccgtcggtcagcccggccggccccaacaacgccgacggctggctctccgacctgctcaatcgcagcgacgcaccgccgccggccccgcaggcccgcgatgcccagcagcgcccgcgtccgcagcagcagcccgccgccaatccgctggagtcgctgtcgctcgacatcggccggctgatggaccgcacgctggcggcggagatgtgggatcgctaccagcgcggcgagaacaaggcgttctccaaacgcctctacacgcccgccggccagaaggccttcgacgaagtggcccgcaagtaccgctccgaccgcggcttcaagcagacggtcgaccgctacatcgcggagttcgagcgcctgctcgacgaagtcgcccgcgaaggccgcggccagcaggagctggctggccacctgacctcggagaccgggctggtctacaccctgctcgcgcacgccgcgggacggctggggtgagcggcgaacactgatggcgaatagaagcggaggcctgacggcctccgttttgctgttgaccgatgcaaggctaaaattgcgccggaacgagctgagaggcttcagatgttgcgcacaggctggcgtcccgtcgtcgcgctgacggtgctcggaacagctggatttgccgcagtcgcgacggcggatccgattgaaccgtcgaagatccggaccatcaggattgcaccaccatcggctgacgaccgtggtgatccattgacggctcctccaaagtacaaccgccttcacgtgttgacggtgcggccaagactacccgacgagcagcgcgacgctgcgggccgcgagtggtcgacaacaacggtggtaagcaagcccgcggccgatgcgcacgtcgttcaaacgacgccggtcagacctgcctccgatgagctccgcaatacgtccggcggcaaatggtcgggcacacagggcctcgtcagtgccacatccgatccccaccacattcgcagcttgagcatccgcccggagcagccggagccatattcccgctatggtcgcttcgctccggaaaccctcgagccttctcaggcggcgccccagtaagaaagtggatggccgtcggtcccgaacgggcggcgcagcctactgccggcgccgtggcccgggcgctgcggcggcgggagccggcgcgggctcgggtgcggcattgttgctgccgccgaagatcacccggctcggattgcggtcgaaattgttcacggcgcggctgatgtcggcgagcgtgcggcggccgtcgttgatcaggagattggagcgcttgtcgatattgtcggcgagctcgcggatcgacttcaccatctggttcagctcgctgccgttgttgccgccggcgatcgcattgaggcccagcatcagattgtcggccttggccatcacgccgtcgaccttgaccatgacgttgtcgatcttctcggaattgcgcgccagcgcctcggtgaagacctcgaggttcttcagcgaattcttcaccgactgctgattgtcggcgacgatgcggttgacgttttgcagggtggcgcggatcgcctcggtgacgtcctgcaatgcgttggggtcggcggtcaggaccgggatgccgtcctcatcgagcggcaccggcggggcggcctcctcgccgcccttcagcgagatcgcggcgacgccggtgaggccctggaattcgagaccgaccagggtgtccttgcggagcggcgcgctgttctcgatcatcgccagcgcgaccacgcgcctggggttgtcgagcttcaccgacaccacctctcctatccggataccgttgaaattgacattgccgccgttgcgcaggcccgacgccggcccctcgaagatcacccgcaaggggctgcgctgcttggtggtgtgcaggctctggaaccacagcacgaagccgaacgcggcggcaatcaccgccagcgtgaaagccccgatcaagacgtagttcgcccgcgtttccatcaattgctcgcgttattcactcttgaattactcttgggctctcgcgcactgagcctgcatccgagcccttcgaatttcctgctggcgcatgatctcgtccgaaaaaccggtctcctcgcttcgggatcatgggctaggccacaacggctcgggcgcgcttgccgttgaaatattgctgcaaccacggatgctgcgatgccttcatgtcggcgatcgatcctgcagcaatgatcttaccgttccctaaaacggcgatacggtcgcacgcggtgtaaagactgtcgagatcatgggttaccatgaaaacggtcagccccaaagtgcgctgcaaggtgcgcaccagctcgtcgaaatcgccggcgccgatcggatcgaggccggacgtcggctcgtcgagaaacacgagttccggatcgagcgcgagtgcgcgcgccagcgcgacgcgcttgaccatgccgccggacaattccgacggatagcggtcggcaacctcaggcttgaggccgaccatcaccagcttcgccaccatgatctcgtcgagcagccgctgcgagacgcgcagatattcgcgcgccgggaactggatgttctggcgcaccgtcagcgaggagaacagcgcgccctgctggaacaggatgccccagcgccgctcgacggcgcggcgctgcgacgagctcgcggcatcgagatcgacgccgaacacttcgatgcggccggagaccttcggcacgaggccgatgatggtgcgcgtcagcaccgacttgccggcgcccgacgggccgacgaagcctaatatctctccgcgcttgacgtcgaggtcgaggccgtcgagcacacgcgtggtgccgaattgcacggtgacgtcgcggacccggatgatggcgtcgatgtcctcgtccgccatgatcacatcccgatcgaggcgaagaagatcgcgaacacgccgtccatcacgatcacgaagaaaatccccttcaccaccgaggcggtggtgtgctgaccgagcgattccgccgagccctgcaccgccagcccctcgacgcaggcgacgatgccgatcaccgcggccatgacgggtgccttgaccatgccgacgacgaaatggtcgatcgatatggcatcacgaaggcggagcaggaaggcctccggatcgacgccgccatagagccaggcgaccaggccgccgccatagagcgcggccatcgcgccgaggaacgccaggatcggcagcgccaagaccagcgccagcatgcgcggcaggatcaggacctcgatcggatcgaagcccatggtgcgcagcgcgtcgatctcctcgcgcatcttcatcgagccgagctcggcggtataggccgagccggagcggcccgcgaccatgatcgcgaccagcagcacgccgatctcgcgcagcaccagcacgccgagcatgtcgaccacgaagatgtcggcgccgaacctgcggaaatggaagatgccctgctgcgagatgatgcagccgatcaggaaggtgatcagcaccacgatcggcaccgcgcgcaagcagacctgctcgaggtgatgcaccgtcgaggtgaagcggaagctgcgcggatggatcagcaccttggcggccgcggccagcaccgcgccgagcatgtcgacgaggccgatgatggtgccgccgatcccggccacggtgcgcccgatctgctcgagcatgcccgagatcagcagcggttcgcgcacggccttggacgcggggccgacgcggcggacctcatcgaccaggctggaatagttcgcggagaggcccgcgatctcggcttcggcgccggcatcgctcaggctacggcgcagccgctcgataagccaggcgccgaacgtgtcgaggcttgcgacctgcgacacgtcgatgaagatatgagggcggctgccgcgcagtcgctcggcgtcggagacgatccgctcgagcgcaggggcaaagcgggcggtccagttgcccgccgcgcacaacgccagtccttcgccttgggctatccgctccagtgtcgggtcgccgctcacctttttgcctacccctcaagccggctggccgccgcaactgcagatctccggcggcttgccggatcggcttgtcgaatctgtcactaaccagccatagttggttgcgcgtcgcaagctacggttcaggaaatagtagactttaaaatgacttccaccccgcccggagcgatttccctcaacgtgcggatcgagcgttggccgatcgccggctcgtttacgatcagccgcggcgccaagaccgaggccgtcgtcgtggtggccgcggtcggccagggcggcctcatcggccgcggcgaatgcgtgccctacccgcgctacgacgagaagccggaggcaaccctggaggcgatccaggcgatgcaggagccccttgccggcggcatggaccgcatcgccctgcaagcccggatgcccgccggggccgcccgcaatgcactggattgcgcattggcggacctcgaggccaaacgcgccggccagcgcatctggaacctgttcggccggcctgcgcccgaaccgcgcaccaccgcctacacgatctcgctgggccctcccgaagcaatggccgaggccaccgccaaggccgcgcaccgcgcgctgctcaagatcaagctcggcggcgacggcgacggtgcgcggatcgccgccgtgcgcagggccgcgccaacctccgaattgatcgtcgatgccaatgaggcctggaccgaggacaacctcgccgccaacctcaaggcctgcgccgatgccggcgtcacgctgatcgagcagccgctgccggccggcaaggatgaggcgctggcgcggatcgagcgcccggttgcggtctgcgccgacgagagcgtgcatgaccgcgcctcgcttgccggattgcgcggccgctatgatgccgtcaacatcaagctcgacaagaccggcggactgaccgaggcgctcgcgatggcggacgccgcccgcgcgctcggcttcgagatcatgatcggctgcatggtggcgacttcgctgtcgatggcgccggcgatgctgatcgcgcaagccgcgcgcttcgtcgatctcgacggcccgctgctgctggccaacgaccgcgacaacggcctgcgctacgagggcagcctggtctatccgcccgacgccgcgctctgggggtgatggatgagtcgcttccgcgccagccacatcaccagcccaccggtcgccgccatcgccgccatcatgtcgtagacgccgagcccgaagcgcgcatagaccatgccgctgacgatcgccgtggtgctggcgacgatgccgccgcaggcggtgagatagccctgcgcgcgcgccatcacatgcaccggcacgtgatgcaccatcagccccatgatgccgacctgggtcagcccgaagcttaagccgtgtccgagctggaccacggcaagcaccgcaagtggcggatcctgcgcagtgatcgcccagcgcgcgacggcgctggcggccgcgatcatcaccagcaccgccgacggcagcgtgaagcgcggtgaggccgcgaacagcacgatctcggcgatcacgccgagcacccagagcaccgcgatagtcaggccgctgaaaccggcctgctgccaggcaatcgaggcgaagatgtaataggcgccgtggctgccctggatcagcgccgaggagacgatgatggcgaggaaggtcgggttgcgcagcaaccgcggcgaaccggccgcgtgcgcgactgcggcgaccggacggcccagcggccgcaaggtcagcccgaccagcgcgccgagcacggtcacggcggtgatgatccagatcagatcgacctccgcgacataacgcagcaggaacccgctgatcagcgcacagaccgcgaacgccgccgagccccacagccgcagcggtccgtaggtgagaccgaattgcctgacgccgcgcagcgcataggcgtcggtaagcggcaccatcggcgtccagacgcagcaggtcagcgcatagaccgcgagcagcacgaagggctggtgctgggtgccgatcacggcaaagccgaacgccgtggctactcccgtggcgatgatcgcgccgcgcagcatctggcggcgttccgccactgccgtgaccagcggcagcacggtgaagcgcgtcaccggcggcaccgcggtgatgatgccgatccaggtggcatcgatgccgatcgccttcagccacacggtgaaaaacggcagatgcacgccggtcatgccgaacagggtggcatagaatgccgcgagccttcgcgcgaatcgccgcgatgcaacttttgctgcaatggggatttgtgattcggaagacatcaattcaattgcgattcgcgcgatatcgtggtgatcgttagcgtaacgcgcagtgatttgcgcgaagagattgtgatggccgaagaagcattcgccctgtcgccgatatccgcccgcgcggcgctgccgagcgaggaggactatgccgcgatcagcgcggccttcatggagacctcgcggggccgctggttcctcggcgaatacgccaagcgcaaccgcaatgccgatacgcgcatggtgctcgatgccgtggcgcggatcgaggatagcctcagcgcgcagcggcaggccgcccaagctgccatcagggacgagcagctggcgcaggcgctggacgccttgcgcggtgcgatcgaggccgcccgggcctccgccatcacagcgctcgacggcatcagcttcgagccgaatctggcgccggtgcgcaagggcgtgcgggtgattcgggagatctcctggcggctgcgcgagatcggcaatgacggccggatctgcgacatcatcgattcgcaggccagcgcgatcgaggccggtgctgcgcagatatcgatggacgacgccaaggccgtgctggattccgccttcgcggcgctggcccgccgcctcagcgaattcgatccggacaaggcgacgacgcctgcggccgagccggtcacggccgaagcaccggttgcggaaccggccgcggccgctccttcaccgccgcccgcggccgaaagcactgccgccgagagcgccaccctcgatgcgacgctggccgccacgccgtcagcgccgcctcaggaggccgttgcgacgccgaacggcgaagccgagatgccggttgcgccgtcctccgaggtcgccgcagcaacagtcccgcagccgagcgaagcctggctcaaggctgaggctgcgctggccgaagccgaggccgccgagctggcgcgcgccaccgacgcggccgccgccgacgcccatgacgaagcagtgctcgacctgatcgcgatggagatgggcgcgcccgatccggtcgacgaagaggcgatcgccgaggaaatgcgcgccgccgaggagctgcgtgtcgccgaggcgatggctgccgagcccgagcacgaaatggttgcaccggccattcagccggagcctgcaccggcgcccgagccgaaggtcaaggtcgagccggcactggtcgctgtcgcgtcgatcgctaccccgacggcggtgccgccgcctctcccgcccaccgttgcggctgcgccggctcctgcggcagaggtctcgctcggctctaccatcatcgccagcggcctcctgaaaaagccgaacgccgccgccaacgatccgctcgcgccgatccgccgcatgacccaggccgagaagatcgcgttcttctcgtaaggcggacgcgttcgcgctacgcatccatctgctatcgagcacccacgcagcgtgacccagctcacgtaccgcgggcgcatgcgcgtctagcctccctgcgaccggtcccgcaccgggatcagcattgggagcgcgcgatggtccgcctgacatccatcatgatatcggccgcattactcggcctggtgagcctcggtggatcaagcacggcgtttgccgaggccggcggcgtcaccgtcggcaatgcaacccatgcggcggcgccgtccatcgatcaaacggtcccgccggcaacatcggccgcaacgacgccggctgcgctccgcggccccgagcagcgcgttgcgctcgtgatcggcaatgcgaattacgagaacgcaccgaaactcgccaatcccggcaacgacgcgcagtcgatggccgagctgttgaactctgccggcttcgaggtgatctccgcgaccgacctcaggcggggcgacatggtgaaggtgttgcgggatttctccgacaaggtcgcggcgcgcggcacgggcacggtcgcgatgatctattacgccgggcacggcgtgcagctcgccggggagaactacctgatcccggtcgacgcgaagatcgcggcgccgtccgacctcgacggcaattcggtgcgcctcgtcgacgtgatgggcacgctcgagaatatcccgagccggatgcgcatcgtggtgctcgatgcctgccgcaacaacccgttccccaacgtcaacgatgccggccgcggccttgccgtcgtcgatgcgccgagcggctcgatcgtcggctactccaccgcgccgggcatggaggcacaggacggcaacaacggccacagcccctacaccaacgccttcctgcggctggcgcgcgagcccaacctgccgatcgagcagctgttcaagcgcgttcgcctcgaggtcaacgcgacgaccgacggccggcagacgccatgggagagctcgtcgctgacctcggatttctatttcttcggcgacaccaccgtcgcggcatcgcgtgcgcccgcgaacgagcctgtcgtgcagatggcatcgaacctgccgaaccgctcggtgcgccaagcctatgatttcgtgctgtcggaggggcgaccggactactatgaggaattcatccggctctatccgcgcgatccgctgtgcgatcgcattcgcttcctgctcacgaactggctgcaggtcgcggcctggcacaaggcggtgcttgccaacacgccgttcgcctacaagaccttccacgacaatttcgccggcagcccctatgcgcagcaggcgctgaagctgcaggcgcagccgaaggccgtgccgccgatgcaattcacgcggctttcaaatcgtcagaccttgcagccgatcaatgcgggcctgcagggcgccggcggcaatggccagatcggcggcggcaagatcgtcaacatgcccgcgcccggggcgaagccggtcgggatgccgacctcgatcggcaagggcaaggtcgcgagccttcctgttgcaaatgccggcaagaacgcatcgagcccggtcatgaaagacagcgaccagcaccgcttccacgcggtgcggcagagcatgcaagtcgaccggatgcgatcaggcggtggtggccgcgccgtgttccacccaactccgtccggctcgtatcccggcggaatgagcggcagccatcatggcggcttcaggcgctgatcggccacaccgcacaacgaaacgggggcagagcgaccatcgccctgcccccgctgttttcaggcgacgagcttcgcgaacaggtcggcgtcgacgttgccgcccgagagcacgatgacgacgttcttgcccctggcgtcgatccgccccgccagcagcgcggcgagcccgatggcgccaccgggttcgaccacgagcttcagctcgcgataggcaaaagcgacagccgcaccaacctcttcgtcggaagcgttgacaccgtttgcgagcagcttgctgttgatcgcaaaggtgagctcgcccggcatcatcgccatcagcgcgtcgcagatggtgcgcggcgcaaccgcatgggcctcgcgatgtccgaccttgagcgacagcgcgtgatcgtcatagcccgcgggctcggcgacgatcacctgggcctgcggatatttcgccttcacggcggtcgcaacaccggcgatcaatccgccgcccgacgccggcgccacgacgatatcaggtgtgagcccgagcgcggccatgtcctcggcaatctcgcggccggcggtgccctggcccgcgatcaccaggggatcgtcatagggaggcaccaaggtcgcgccgcgcttgctggcgatgccgctggcgattgccgcgcggtcgtcgcgatcgcgatcgtacagcacgacctcggcgccataggacttggtccgctcgcgcttggtgagcggcgagtccgcaggcatcacgatggtcgcctgcatgttgagaatcttggccgccgcggccacgccctgggcatggttgcccgaggagaacgccacgacgcccccgctccgcttgtcctgcgggatcgaggcgagcttgttgaaggcgccgcggaacttgaatgacccggtccgttgcaacatctcgggcttgaggaagacccggctgccgacccgttcgttgagaacggggaaggtcaggagcggcgtgcgcaccgcgaacggcgcgaccacccttgcggcggcatcgatgtccgcggcagcgacgggtggatttaaaacggtgtccgtcatccacgatttgtatcgcggcgggatgcagccctgcaagacgctttggcgtgagtttgtttagcgcgaggttgggtgactggccggcaaggccgcgaaatggtgctcttcggcaccgaattcgaatacttccccctcgccgtcgggcgcggcagggcggatgttcatgcagcgctcgatgaacacccgagcggacgcctgccaggtgtggagcgcggcgaaatcgacgcaggcctgccgcgggatgctgagcgcttccaggcaggcatggtgcaggtcctcgtcgagcacgccgaccggcgccgcgccgatcacgtcgcgggggccggtgaccggaaaagcggcaaccggcaggccgctcgccaaggcctcgagcagcacgagaccgaacgtatcggtgcggctggggaaaacgaacacatcggccgcggcatagatctcagccaattcttccccgtggcgggcgccgaggaagacggcttcgggatatttccgctccagcgccgctcgcgccgggccgtcgccaaccaccaccttggtgccgggcaaatcgagatcgaggaatgcttcgaggttcttttccaccgcgacccggccgacgctgagatataccggctgcggcaggcagagatcgacatcgcgtggatggaacagggcggtatcgacgccgcgcgaccacagcacgacgttgcggaagccgcgctggcgcaactcggcggccagcgccggggttgccgccatcaccgcccggctcggcttgtggaaccagcgcagcgcgcgccacacccaggcttcgggaaccggcgtgcgcgccgagacatattcggggaaacgggtgtggaagctcgtcgtgaacggcaggccgcgcttgcggcaatagcggcggaccgaaagcccgatcgggccttcggtcgcgatatggatgctgtcgggcttggccgcatcgatcaggctggcgaccttggcctggtacggcagtgccagccgcaaatcgcgatagctcggcatcgcgaaggtgcggaactcgtccggcgtcaggaagctcacctcgaccccgagcgacttcgccgcctgtgccatcatggtcagcgtgcggacaaccccgttgacctggggatgccacgcatcggtcgcgaccaggatatgcgtcatgcagcgcgtgccgttacccgcggaactggcgcgatccggcgcaccgggtcggtccaggtgatgatttcgaagctgccgtcctcgtgctcggcgagcgcggtgcagctctccacccagtcgccgcaattcatgtagcggatgccgtgctcgtcatgaatcgtcgcgtagtggatgtggccgcagatcacgccgtcgcagccgtgacgacgcgcctcgccggcaagcgtggcctcgaaggcgccgatataattcaccgccttcttgaccttcagcttggcccattgcgacagcgaccagtagggcacgccaaacatcttgcggaagaagttgacgaagcgattcatctggatcgcgaagtcgtaggccttgtcgccgagatgggcgagccagcgcgcattctgcaccacgaggtcgaagatgtcgccgtggatcacgaggtagcgcttgccgtcggcgccggtgtggacggtgttctccaccacgtcgatgccgccgaaatgcgtgccgtaatatttgcgcaagaactcgtcgtggttgcccgggacgtagatcaccttggcgcccttacgcgccttgcgcagcatcttctgcacgaaatcattgtgggtctgcggccagtaccagttcgacttcagcgcccagccgtcgacgatatcaccaacgaggtagatcgtgtcggcatcgtgagagcgaaggaagtccaacaggcggtcggcttgcgaaccgcgggctccgagatggacatcggagataaacaaagtgcgaaagcgccgctcggggctctcttcactcaaggagtcacttcccatgcctgtgcacctaacagattcctgtgacaaggcgatgacgatccccgcgacctgaggctccacaaagagttaacgagaatcagcagcgcgcccctgccctgcggataacagccgcatgcgacaatctggcgacatcggcggtcgcggctgtgtgcagcgggcgttgtgttgcgcgcatatcgcggcgggacaacgcgacgattacgtagatgggtaacgggctacacggcttcaatagtacttgtggaagtgatgcaccggcccgtgaccgcggccgacggcgaagcgatcggcggcggcgatcgcgtctgatatccaggccttggcgttgcgcacggcggtctccatgtcgtcgcccttcgcgagcccggccgcgatcgccgacgacagcgagcagccggtgccgtgcgtgtttgatgtcgcgatacgcggcgccgcgagcgcgatgctgcgcgcgccttcgatcaggtagtcgatgctctcggcgccgtgcccatgaccgcccttcaccagcaccgcgcgacagcccatcgccagcaatcgtttgccctgctgctcgacgtcggcctcacttgcagcgaccggttcgttcagcagcgccgccgcttcgggcaggttcggcgtgatcagcgaggccagcggaaacagcatggtcttcagcgcatcgaccgcctcggcggccagcagccgatcgcctgatgttgcgaccatcaccgggtcgagcacgatgtgacacggcgcccagcgccgcaggccgtcggcgatcgcggcgatggtttcggcctgcgcgaccatgccgatcttgaccgcaccgacgtcgagatcggagaacacggcatcgatctgtgccgtgacgaatgcagcgggcaccggatggatgccgctgacccccgtggtgttctgcgcggtcagcgccgtgatcgccgaggcgccatagaccccgagcgcggcaaagctcttgaggtcggcctggatgcccgcaccacccgaggaatccgagccggcaatggtgagcgcgaccggcgtcatctggcggcaccggcggctgatacgaatgagaccgtcacgaaggagaccatcatgaatgggactgtagcgtgtcctagcccggacgccccctggcagcaagttcgcctgactttaccgcgagttggccttgccttgcgcctgcttgcccccttgccttggccgcccgtttttggcctatagtcgcggaaatccccggagacgactttgatggttcctttcttcgtccagatcaaatgcaagctcggccagtcctacaccgtcgccaacgcactggcggaagccgagattgcgtcggagatctattccacggcgggcaattacgatctcctggtcaaattctacgtcgaccacgacaccgacatcggccatttcatcaacgagaaggttcaggtgatcccgggcatccaggacaccctcaccatcatcaccttcaaggcgttcggcggcgctcgctaaagcatgatccggaaaagtgcgaagcggttttccgaaaagatcacgctcaaacaaaggtctaaagcgcgatgatgattcaaccaaatctcatcgcgctttagagaccaaggctctagagaccaaggctttcgcgcagccgctgaagctgcggtcggatctgctcgcaatcaagctcctgctcgaacgtcctgaacgcctcgacgctcggctcgccgcgaagcttggcaagtcgcgcggcatctcgcgcgcagacgtcggcatcggaagactgcggggcgggtacggcctgacgttgcgcctgctgcgccctgggcgcttcgggcgcggttggctgcggcggatcgctcgccacgctttcaagcaggcgctgcacctgggccttcagccgttcgcaggtcagctcgcgttgcagcttggcgatttctgcaggcgacggctcggcgcgcaatcgcgccagacgctgctcatcgcggctacaagccgtcgcgggatccgccgtgtcgcgcaccgccggcgcaggctggaccggcgggaccatcgcgacggcgggcttggtcggggccgccccggcggcagccggcgccggtcgcgaggcgacagccggcggcttggcggcgacgggcggattggcgacctgcgagggtagtgcgacccgctcggttttcggctcgggctgcggcaccagcgaaatggtggctccgccgagcgagccatagatgaacggctcctggcgccccccggtcatgctgatcacatcgtcgcgcacgcgaccgagggcgatgcggatatcgacgccaggctcggtgagatgccgcagcagcgcggtcgcataggggctgttcacgccatcgccatcgtaggacaccgagccggccttcgcggcataggccaccagcgtgtcggcgctgacgtcttccagcttgccgagacctccccgcatctgcgagcgcaggccggccgaccggacgcgcgacgggaacggattgtcgcggcacgcgtcgagcaggatcaggcgcagccggcgcaccgactgcagcgcccagatcaggcgatcaagcgccaccgcctcgtcgtcgacgtcgtagtcgcggctcaacttcgcgtcgaccggaatcaggtagttagatccgttcatctcgacgccgtggccggcataatagaccacggcaatatcggcgctctccgccgtgaccaggaagtcgcgcaccgcgcgcttgaactcgacgacgccgagatcgttgcgcgagatcaccacctcaaagccggccgatttcagcaggcccgaaatcgcggtagcgtcgctgatcgtgttgccgagcgtcggcgcgctcttataggcggaattgccgattacgagcgccacgcgccgatccgcgacagccgcagtcgcaaacaaggtcgaggccgcgaggcaggcggcgtaggcaatggttcgtcgcagcgtcgttctcaatagcgatagtacctatgcgtatgatggtgcttccggcgatacggagggcggccatcggaggtgacgttgacggtgatgacctcggagaagaccgccgggtcatgcggcgtatggctgaaatcggcgaacagcagccgcagcttgtgctggccgagcggcagcgtgatcttggcctcggtctggcccgcaccgaaatgcagatggttgaagtcgctcggaatcggctgatcgagcggcggcaggtcggcatccaccagcaagtgatgatggccggtgttcggcttgtcgaagcccgcgggcgcaacgcccatgttgagcaggccgaaacggatcaccgggttcggcggaatgtagctgccgtccctagggtagatgaaatagaccttggcgtccttgggcgatggccggcgaccggcaggcggagcggcggccggtgctgcggcagccgccggcgccgcagctggcggg

SEQ ID NO: 3 - DNA, 264097 bp, Bradyrhizobium enterica
atcgacagttcgggcggcgatggcgggttcggcggcggcggcgggagtgtgcgctgctatttcagtgcggggaagggcggcttcggtggtggcggcggcggctcgagcggcaatgacggcggcagttgcggaaataccggcggcttcggcgccggcaatggcggcaacgattctcagggtggcgcaggcggcggcctcggcgcgggcggcgcggtgtttgtccaggggggcggaactctcactgttgccggtgccttcaccgtcaacggcagcagcgtcagcggcgggactggcggcgtcggcgcaggcaatggctctgccttcggcgccggtatgttcctgcaaggtaacgggacgctgaccttcaatcctgcggccgggcagaaccagatcgtctctgatgtcatcgccgaccagactggtagcggcggcaccggtgccaatgccggcagctggggtctcgccaagacaggcaccgggacgctgacgttgacggccgcaaatacttactcgggcggcacgacagtcaacggcggcctgatcaatttcaacgccgcgagcaatttcggctcgggcagcatcacgctcaacggcggcggcctgcaatgggccagtggcaatacggccgatatctcgggcaagctgaatgcgatcggctccggcggtacgacgctcgactataacggcaatgccgtgacgctcgcgacggcattgaccggcacgggcggcgtgacggtcgcgaactccggcagcggcggtgcgctgacgttgacgacgactgaaagttatttcggcgcgacgaccatcaattccggcgcaacgctggcgctgtcgggcgtcggcagcatctcgaattcgagcgtcgtgacggtcaacggcacattcgatatttcggcatcttcggccttcctcaacaggatcacgacgctcgcgggcgctggatcggtagtgctcggcagcaaagtcttggcggttaccggtggttcaacggagttttccggcgcaatcaacggtgcgggcgcaggcggcctcgaaatcgccggcggaacgcagaccctgtccggtgtcaacggctacgtcggcttcacccagatcgatgccggcgcgacgctggcgctcaaaggaaacggctcgatcgccaattcatcgggcatcgcattcgcttcaggcgcgggtgtcggcacattcgatatctcgcagaccaacagcggtgccagcgttgccggcctgaatgataccgtcggcggcagcgtcgtgtccctcggcgccaagacgctgaccatcaccggcaataggggcccctacgacggcgtcatccaggatggcggtatcggtggcggcaccggcggcaacgtgacgatcgcctctggcggcctggcgaccttcggtggcgtcaacacctataccgggctgaccacgatcagcggcggtggccaacttgacctgaccagtggcggcagcatcgcgtcttcgaaggccgtgatcaacgacggtaccttcgacatatcgcgcgcgggtggcggcgtctcgatcaatagtctttccgggaccagtatcttcggcgccgtgaacctcggtgccaatacgctgaccttcaccaatgccaacggaacctttgcgggcaccatccgggacggcggcgcgggcggcggtgtgacgatcaccggcggcaaggaagtcctgaccggcatcaacacctacaccggctcgaccaccatcaatggcggtacgctggaagtggacggctcgatcgccaactcgttgaaagtgacggtcaattccggcggcaccttgagcggcaccggcaccgtgggttccggactcgtcgtcttcggtgggggtgttgtcagcaccgtcacattgacagatgtcaacaaccttggaggggtaatcatcagcggcggctcgaatttagtcgtggtgcgcccgaccttcggtgccccggctccgagcagcttcgtcattgcggcacccacgaccatcatgagcggcggcacgctcgcgcccggcagtgctgcagacccgaccggcacactgaccatcggcggcagtctcgccttccaatccggcgccatctatcaggtgcacgtgacgccgaccgctgcgtcatcaaccagcctcaatgcgaacgcaacgcttggcggcgcgaccgtcaatgcagtgttcgccagcggcagctacatttccaagcagtatacgatcctgaacgctgctggaggcatatccggcacgtttgcatccaacgtcgccaacacaaacctgccggcgaatttcaccgacacgctgagctacgacgcgacccacgcctatctcaatctggccctggatttcgcgccgcctcccaccgcgccaaatttcggcaacggcctgtccatcaaccagcagaacgtcgccaacacgctggtcaactacttcaacacgaccggcggcattcagacggtgttcggcacgctcgcgccggcgggcctgacgcaggcctctggcgaactggcgaccggctcgcagcagacgacgttcgatgccatgaacctgttcatggggctgctcaccgatccctacgcgaatcgcgtcggtgacgccggttcggtgccgggagcgtcgggctatgcggaggagggcaacgccggcgcctatgccgcaagccgagcaactggtgcgttcgcgatgttcaccaaggcgctgccggcgccgtcattcgtaccgcgctggaatgtctgggccgcgggcttcggcggttcgcaatcgaccagcggcaacgccatcgtcgggtcgaacaacacgaccagcagcgtgtatggcaccgcggtcggcgccgactacctggtcacgccgaacaccattgcgggcttcgcgatcgccggcggcggcacgaacttctccgtcgtcaacagcggcagcggccggtccgatctgttccaggccggcgtctatcttcgccacaccgaaggcccggcctatgtctcggccgcgctcgcctatggctggcaggacatcaccacgaaccgcacggtcagcgccgccggcatcgatcagcttcgcgccgagttcaacgccaacgcctggtcggggcggctcgagggcggctatcgtttcgtcgcgccgtggatcggcggcgtcggcatcacgccttatgccgcgggccaattcacgagcttcgagctgccggcctatgccgagcgggtgatctcgggcttgccaaacttcgtgctcagctatgccggccggagcgtgaccgacccgcgcagcgagctcggcctccgtaccgacaaatccttcgcggtgcaggacgggatcctgacgctgcgcacccggtttgcctgggcgcatgactacaatccgaaccgcttggccgccgcgaccttccaggcgctgcccggcaccagtttcgtcgtcaacggcgcagcgcaagccagcgactccgcgctgaccacggcctcggtcgagatgaactggcgaaacggctggtcggcggcggcgacgttcgagggcgagttctccaacgtcacctcgagctacgccggcaagggcgtggtgcggtatcaatggtgagagcgtttccgcttcagacagcctgacgtcacgcgcgtgattacctgaagcgtaatcgcgcgagcgaactccctctgcgatggtcggtgcatcggcggcgatggcgccgatcgatccgcacagggagatagatgatggtgagccaaccgctttatgcgaccgccaaggacggcacggaactgttcgtgcaggattggggctcggggcggccggtcttgttcctcgccgcctggacgttcaattcgagcatctggggcagccagatcgtggcgctgaacgcgaaggggtatcgctgcgtcgcgccggatcggcgcggccatggccgctccgatatgccggcgaccggatacgacctcgacacgctgaccgatgacgttgctgctgtgatcgagcagcgcgatctgcgcgacgtcacgatcgtcgcgcattcgatgggatcgatcgaggcggtgaactatctggcgcgtcacggcgcagggcgcgtggcgcggctggtgctggtggcaccgaccacgccgtatctggtccagtccgacgataatccagatgcggtgccgcgagcgatgatcgatgcccagaatgccgcaatcgcgcaggacttcccgaaatggatgggcgagaacgaggcgccgttcttcacgcccgacacacccgaggcaacgcgggcctggatcagggggatgatgctgggcgtgccgttgccggtggcgctggcctgccgcaagacgatctcctttgccgatctgcgcgctgcggcgaagggtatcgatcgcccgacgctggtcgtgcatggcgaccaggacgccagcgcgccgctcgcgctgaccggcgcgaagacggcaagcctgattgggggaagcaagttcgtggtctacgaaggcgcgccgcacgcgctgccgctgacgcacagcgcgcgcctgctggccgacctgctggccttcatcgacgcctagactggcccgcccgcgataccggcgtcggtcaagcccgcggacttttctggggatatcggctggatcgccgccgaagctgaccggtgacgagcggcgtgggaattcgcccccggcgcgccgcgagtgaccggggtgaagtccaggcggcgacggtccgattgcacaggccgcgcccggccgacgatttcctgtgttcggctgctctggcgttccgcaacgctggcgaccagcgccgggcacgcctgctccccggcccatatggttctccgcagatagccatcctcgccggcagccgggcacccttacgcgctggaacaagtgcgacccgggggatactaacctgctgctcggacaggttgacgcctcgacggcgacagctgccgggatgttcgccacaccgagccggagttcggctgatatggcgagcgcacaggggacctgatcgccgccgccgcgtcgccggaagtggcatccgcccgatgcggccaatagcccgcggcgagaacggtaaaaccgtcaaaattgcttgtcttgcgccccctgttgcgctgcgctaaagcctcaagaacaattccaatcaacgaatctgcggcacgtccgaaaccgcagcaagaaggcctcgccgatgaccggcatcctgcagaattatctcccacttgtggtctttatcggggttgcgagcctgatcggtcttgcgctcctgatcgcgccgttcctggtcgcgttccaatcgccggacccggaaaagctgtccgcctatgaatgcggattcaatgcttttgacgacgcccgcatgaagttcgacgtccgcttctatctggtggcgatcctcttcatcatcttcgatctcgaagtggcgttcctgttcccgtgggccgtggcgttcggaaaactcggcgcgaccggcttctggtcgatgatggttttcctggccgtgctgacggtcgggtttgcttatgaatggaagaaaggcgcgctcgaatgggattgagccccaccgccgcaaacccgcagccggcgatagcgcaggctccgaagggtattctcgatccgtcgaccggcaagccggttggcgccaatgatccgtttttcctcgaggtcaaccacgagctgtccgacaagggcttcttcgtcgccgcggccgatgacctgatcacctgggcgcgcaccggctcgctgatgtggatgaccttcggtctcgcctgctgcgcggtcgagatgatgcaggtctcgatgccgcgctatgacgtcgagcgcttcggcttcgcgccgcgtgcctcgccgcggcagtccgacgtgatgatcgttgccggcacgctgaccaacaagatggcgcccgcgctgcgcaaggtctacgaccagatgccggagccgcgctacgtcatctcgatgggctcctgcgccaatggcggcggctactaccactattcctactcggtggtgcgtggctgcgaccggatcgtcccgatcgacatctacgtgccgggctgtccgcccacggcggaagcgctgctctacggcgtgctgctgctgcagaagaagatccgccgtatcggcaccatcgaacgttagggtttcaggcatggacgacggcaagctcgacgcccttgggcagacgatcgtgagcgcgcttccgggcgccgccacggcgcactcggtcgcgttcaatcaactcactatcgacgtcgagattggcagaatcgtggacgtcgtgacgttcttgcgtgacgatcccaattgccgcttcgtcaacttcaccgatgcgaccgcggtcgatcatccgagccgcgagaagcgcttcgatgtcgtctatcatctgctgtcgccgacattgaacgcgcgcatccgactgcgcgggcaggccgacgagactacgcaggtgccgtcgatcatcggcgtcttcccgggcgccgactggttcgagcgcgagacctacgacctctacggcgtgatcttcaccggtcatccggacatgcgccgcctgctgacggattacggcttcgacggccatccgctgcgcaaggatttcccgctcaccggcttcgtcgaggttcgctacgacgaccaggagaagcgggtgctgtacgagccggtccggctcaaccaggaattccgcaagttcgatttcctttcgccctgggaaggcgcggactatccgcttcccggtgacgagaaggccaaggcggagccgaagccatgaacgagcaaccgcaaaatctgcgtaacttcaccatcaactttggtccgcagcatccggcggcgcacggcgtgcttcgcctcgtgctggagctcgacggcgaagtcgtcgaacgcgtcgatccgcatatcggcctgcttcaccgcggcaccgagaagctgatcgagcacaagacctacctgcaggcgattccttatttcgaccggctcgactacgtcgcgccgatgaatcaggagcatgcgttctgcctcgccgcggaaaagctgctcggcatcacggtgccgcgccgcggccagttgatccgcgtgctgtattgcgagatcggccgcatcctgtcgcatctgctcaacgtcaccacgcaggcgatggacgtcggcgcgctgaccccgccgctgtggggcttcgaagagcgcgagaagctgatggtgttctacgagcgcgcctcgggctcgcgcatgcacgcggccttcttccgcgtcggcggcgtgcaccaggacctgccgcccaagttgatcgacgacatcgaggcgtggtgcgatccgttcctcaaggtggtcgacgacctcgatcggctgctgaccggcaaccgcatcttcaagcagcgcaacgtcgacatcggcatcgtgccgttgaaggaggcctgggagtggggcttctccggcgtgatggtgcgcggctcgggcgcggcctgggacctgcgcaagtcgcagccctatgagtgctacgccgagatggatttcgacattccgatcggcaagaacggcgactgctacgaccgctacctgatccgcatggaagagatgcgccagtcggtgcgcatcatgaagcagtgcgtacagaagctcagagcagccgacgggcagggcccggtcgtggtcgaggacaacaagatcgcgccgccgcgccgtggcgagatgaagcgctcgatggaagcgctgatccatcacttcaagctctataccgagggcgtgcacgtgccggccggcgaggtctacgccgcggtcgaggcgccgaagggcgagttcggcgtctatctcgtcgccgacggcaccaacaagccctacaagtgcaagatccgcgcgccgggcttcgcccatctgcaggcgatggatcacatctgtaagggccatctcctcgccgacgtttccgccatccttggctcgctggacatcgtgttcggcgaggtcgaccggtgatgatgtccgcatccgcaccgcgcgctaattgagagtctgaacgatgtccgtccgccgccttgccccgaaggaattgcagcccgcgagcttcacgttcacggacgagaatctggcctgggccaagaagcagatcgagaagtatccgccgggccggcaggcttcggcggcgatcgcgatcctgtggcgggtgcaggagcagcatgacggctgggtgtcggaagcggcgatccgcgccgtcgccgacctgctcgagatgccgcatatccggatgctggagatcgcgaccttctacaccatgttccagctctcgccggtcggcaagaaggcgcacgtccaggtgtgtggcaccacgccgtgccggctgcgcggcgccgccgacctgatcgaggtctgccagcatcgcatccaccacgatcccttccagctgtcgaaggacggcaacttctcctgggaagaggtcgagtgcctcggggcctgcgtgaacgcgccgatggtgctgatctggaaggatacctatgaggacctgaccaaggagagcttcggcaaggtgctcgacggctttgccgccggcaatccaccgaagccgggcccgcagatcgaccgtcagttctcggcgcccgcgggcgggccgacgacgctgaaggaaaccacctgatggggggctctcaggtgcaggcacaggggatggggagggcggtttcgatgatggcctggcgcaggatcgcgctgcataccgccgtcgctgccggcttcatgttcctgctgcaacgttacggcctcagtgccacactggaatccagcctgttgtgggccatcgtgttcggcggctgcgccgccgggctcgcttactcccaagccaatcggtgatgttcggaaagttttgagcatgctcgacgacaaggaccgcatcttcaagaacctctacggcctccatgattggggtctcgagggcgcgcgccgccgaggcgcctgggatggcaccaaggggatcatcgacaagggccgcgactggatcatcaacgagatgaaggcctcgggcctgcgtggccgcggcggtgcgggcttcccgaccggcatgaagtggtccttcatgccgaaggaatccaaggacggccgtccgagctatctcgtcgtcaatgcggacgagtccgagcccggcacctgcaaggaccgcgagatcatgcggcacgatccgcatctcctggtcgagggctgcctgctcgcgagcttcgcgatgggcgcgcatgcctgctacgtctacatccgcggcgagttcatccgtgaacgcgagcgcctgcaggcggcgatcgaccaggcctatgaggccaagctggtcggcaaggacaacatcaacggctggccgttcgacatctacgtcgcccacggcgccggcgcttatatctgcggcgaggagaccgcgctgctcgagagcctcgagggcaagaagggccagccgcggctgaagccgccgttcccggccaatgtcggtctctacggctgcccgaccaccgtcaacaacgtcgagtcgatcgcggtcgcgcccgatatcctgcgccgcggcgccgcctggttcgccggcatcggccggccgaacaatgtcggcaccaagctgttctgcatttccggtcacgtcgagcggccctgcaacgtcgaagaggcgatggggattccgttccgcgagctgatcgagaagcattgcggcgggatccgcggcggctgggataatctgaaggccgtgatccccggcggctcgtcggtgcgcatggtgccggccgagcagatcatcgacacgccgatggatttcgacagcttgagcaagctgcgttcgggcctcggcaccgcggccgtgatcgtgatggacaagtcgaccgacctgatccgggcgatcgcgcgcatctcctatttctacaagcacgagagctgcggccagtgcacgccgtgccgcgaaggcaccggctggatgtggcgcgtcttgacccgcatggccgacggccgcgcccacaagcgcgagatcgacatgttgctcgaggtcaccaagcaggtcgaaggccacacgatctgcgcgctcggcgacgctgcggcgtggccgatccagggtttgattgcgcatttccgtcacgagatcgaagagcgcatcgaccagtattcgcacaaggccgatctcgacgatcagggcgttcgtgatcccgtccacatggtcgcggcggagtagagaagagacatgagcaagatcatcgtcgatggcaaagagatcgatgtgccgccggagtacacgctgttgcaggcgtgcgaggcggcgggcgccgagattccgcgcttctgctatcacgagcggctgtcgatcgccggcaactgccggatgtgcctggtcgaggtgaaaggcggcccgaagccggtcgcgagctgcgcctgggccgtgcgcgactgccgtccaggcccgaagggcgagccgccggagatatcgactcgctcgccgatggtgaagaaggcgcgcgaaggcgtgatggagttcctgctgatcaaccatccgctggactgcccgatctgcgaccagggcggcgagtgcgatctgcaggaccaggcgatgggctacggcgtcgacaccagccgcttcgccgagaacaagcgcgccgtcgaggacaagtatctcggcgcgctggtcaagacctcgatgaaccgctgtatccagtgcacgcgctgcgttcgcttctctgccgaagtctgcggcgccccggaaatgggtgcgaccgggcgcggcgaggacatggagatcaccacctatctggagcatgcgctgagctcggagctgcagggtaacctggtcgacatctgcccggtcggtgcgctgacctcgaagccctatgcattcgcagcgcggccctgggagctcggcaagacgcagtcggtcgacgtcatggacggcgtcggctcggcgatccgggtcgatacccgcggccgcgaggtgatgcgcatcctgccccgcatcaacgaggccgtgaacgaggagtggatctccgacaagacccgccacgtcgtcgacggtctgcgcacgcagcgcctcgatcggccctatgtgcgtgagaacggccagctcaggcctgcgagctggcaggaagcctttgccgccatcgccgccaaggccggccgcacggacggcaagcggatcggcgcgatcgccggcgatctcgccgcggtcgatgaaatgtatgcactgaaggagctgctggcgaagttcggctcggtcaatctggccgtgcagggcggcgacgcgttcgacgccaaggccggccgcggctcctatatcttcaacccgaccattgccggcatcgaccaggccgacgcgatcctgatcatcggctcgcatccgcgcaaggaagccgcggtgctgaacgcgcggatccgcaagcgctggcgcaccggtgggctcaaggtcggcctgatcggcgcgaagtccgatttcacctacgaccacgattatctcggcgcgggcaccgacacgctcgccgatctcgcggccggcaagcattcgtttgccgacgtgctcaagaacgcacagcatccgatcatcctggtcggcgccggcgcctacaccaggcatgacggcgccgcggtgctggcccaggccgccaagctcgccgtcgacgtcggcgcgctgaaggacggctggaacggcttcgccgtgttgcaggacaccgcctcgcgtaccggcgcgctcgatatcggcttctcgccttcggcgggcgggctgactactgtgcagatgacgactttcggcacgctcgacgtgttgttcctgctcggcgccgacgagatcaaggtgccggacggcaccttcgtcgtctatatcggcacccatggcgaccagggcgcgcaccgcgccgacgtcatcctgccgggcgcggcctataccgagaagtccggcatctacgtcaacaccgagggccgggcgcagatcgccaaccgcgccgcgttcccgccgggtgaggcccgcgaggactgggcgatcatccgcgcgctgtccgacgtgctcggcaagaagctgccgttcgactcgctgcaggcgctgcgccaggcgatgttcaagacctcgccgcatctgatgcggctcgaccagatcgaggccggcaaggccgacgacgtcaaggcgctggccgataagggcggcagcgtcgacaaggcggcgttcaagccgactgtcgaggacttctatctgaccaacccgattgcgcgggcctctgccgtgatggcggaatgctcgcggctggcgtcgggccgaatgctgacggcagcggagtgagcgtgacctgatggctgaattcttcgcaagcgcgttctggaccggcttcctctggccgctgatcatcatggtcgcggagagcctgttgctgctcgtcgtgctgctgatcgcgatcgcctacatcctgctcgccgaccgcaagatctgggcggcggtgcagatccgccgcggccccaacgtggtcggccctttcggactgctgcaatccttcgccgacctgctgaaattcgtgctgaaggagccggtgatcccgtccggctccaacaagggcgtgttcctgctggcgccgctggtgtcgtgcatcctggcgctggccgcctgggccgtgatcccgttcgatctcggctgggtgatctccgacatcaatgtcggcattctctacatcttcgcgatctcgtcgctgtcgatctacggcatcatcatggccggctggtcgtcgaactcgaagtatccgttcctggccgcgctgcgctcggcggcgcagatggtgtcctacgaggtctcgatcggcttcgtcatcatcaccgtgctgctctgcgtcggttcgctgaatctctcggcggtggtcgaagcgcagaatacccgcggtcttgcgcacctgatcggcctgccgcagctcaccatcctgaactggtatgtgtggccgctgttcccgatgttcgtggtgttctacgtctcggcgctggcggaaaccaaccgtccgccgttcgacctggtcgaagccgaatccgagttggtcgccggcttcatgaccgaatacggctcgacgccgtatctgctgttcatgctcggcgagtacgtcgcgatcaccacgatgtgcgcgctggcgtcgatcctgttcctgggcggctggctgccgccggtcaatctgccgccgttcacctggattccgggcatcgtctggttcgctctcaaggtgttcttcatgttcttcatgttcgcgatggcgaaggcgatcgtgccgcgctaccgctacgatcaactgatgcggctcggctggaaggtcttcctgccgctgtcgctggcgatggtggtgatcgtggccggcgtgctgcagttcgccggcatcgcgccgaagtgaggccgtcatgagtgtcaatgtcaacgcaactgcccgctcgcttttgctctcggaattcgtctcggcgttcttcctggcgatgcgctatttctttcagccgaagccgacgctgaactatccgttcgagaaggggccgatctcgccgcgcttccgcggcgagcacgcgctgcgccgctatccgaacggcgaagagcgctgcatcgcctgcaagctgtgcgaggcgatctgcccggcgcaggcgatcacgatcgaggccggcccgcgccgcaacgacggcacccgccgcacggtgcgttacgacatcgacatggtgaagtgcatctattgcggcctgtgccaggaggcctgcccggtcgacgccatcgtcgagggaccgaatttcgaattcgcgaccgagacccgcgaggaactgtactatgacaaggccaagctgctcgccaatggcgaccgctgggagcgcgagattgcgaagtcgatcgcgctcgacgcgccgtaccggtgaggtgagggcatgatccttccggcgctgttcttctatctgtttgccgcggtctgcgtggcctcggcggtcatggtgattgtctcgcgcaatcccgtgcactccgtgctgttcctgatcctggccttcgtcaacgcggccgggctgttcatcctgatgggcgccgagttcctcgggatgatgctgatcgtcgtctatgtcggcgcggtggcggtgctgttcctgttcgtgatcatgatgctcgacgtcgatttcgtcgagctgcgcgagggcttcatccagtatctgcctattggcatcgtgatcggcggcatcttcctgttcgagctgctgctggtggtcggcgcctgggtgatcaacccgcaggtgacgaagacgatcaccgccgcgattccgaccaatgtgagcaacaccgaggcgctcggtctcgtgctctacacgaagtacatccattacttccagctcgccggcatggtgctgctggtcgcgatgatcggcgccatcgtgctgacgctgcgccacaaggccaacgtcaagcggcagaacatcaacgtgcagaacgcgcgcacgccggagatggcgatggcgatgcgcaaggtggcgtcggggcagggcctgcaggatgccgatgcggcggagtgggtgaaatgacgatcgggctggggcactatctcgcggtcgccgcgatcctgttcacgctcgggatcctcggcatcttcctcaaccgcaagaacatcatcgtgatcctgatgtcgatcgagctgatcctgctctcagtcaacatcaacctggtggcgttctcgaccttcctcggcgacatcgtcggccaggtgttcgcgctgctggtgctgaccgtggcggcggccgaggccgcgatcggcctcgccgtgctggtggtgtatttccgcaaccgcggttcgatcgcggttgaagacgtcaatctgatgaagggctagtccggcaaatgatccaggcaatcgtcttcctgcctctgctgggcgcgatcctcgcaggcatcatcgccctgaccggcgcgcatgcgcgctgcccgagcggcgacaccatcgaccatcacgacgatgcgcatggcgacgcccatgctgccgatgctcatgcctcggcggcccatgacgatcacggccatgacgaccaccacgtctccgagccgccggcggcgggctcccggctggccgaactgatcaccaccggcctgttgttcgtctcggccgcgctgtcctggttcacgctggtcgatgtcggcttcatgcaccatgacgcacgcgtcgtgctgctgccctggatcacttcgggtgacctgcaggtggcctggacgctgcgggtcgacacgctgaccgccgtgatgctggtcgtggtcaacacggtgtcggcactcgtccacctctattccatcggctacatggacgaggatccgaaccggccgcgcttcttcggctatctctcgctgttcaccttcgcgatgctgatgctggtgacctcggacaacctcgtgcagctgttcttcggctgggagggcgtcggtctcgcgagctacctgctgatcggtttctggtatcagaagccgtcggcgaatgcggcggcgatcaaggccttcgtggtcaaccgcgtcggcgacttcggcttcgcgctcggcatcttcgcgatcttcgcgctggtcggctcgaccgatttcgagaccatcttccacgcagctcccggcctcaccggcaagaccatcaacttctttggccatcaggtcgatgcgctgaccctgacttgcctgttcctgttcatgggcgcgatgggtaagtcagcccagttcctgctgcacacctggttgccggacgccatggaaggcccgactccggtgtcggcgctgatccacgccgcgaccatggtcaccgccggcgtcttcatggtggcgcggctgtcgccgctgttcgaactgtcgccgaccgcgcaggcggtggtgatgttcttcggcgcgaccacggcgttcttcgccgccacgatcggcctcgtgcagaacgacatcaagcgcatcgtcgcgtattcgacctgttcgcagctcggctacatgttcgtggcgatgggagcaggggcctattcggttggcatgttccatttgttcacgcacgccttcttcaaggcgctgctgttcttagggtcaggctcggtgatctacgcgatgcaccacgagcaggacatccgcaacatgggcggcctgtggcgcaagatcccgtacactttcgcggtgatgtgcataggtaccctggcgctgaccggctttccgctgttcgctggctacttctccaaggacgcgatcatcgaagcggcgtatgccgcgcacaacccgttcgcgacctacgcctatctgctgacgatcgtggctgccggcctgacctcgttctactcctggcgcctgatcttcaagaccttcttcggcgagcctcacgaccagaagcattacgaggccgcgcatgagagcccgctctggatgctggtgccgatcggcgtgctcgccgccggctcgatcctggccggcctgccgttcaaggaagtgttcgccagtccgcacggcgtcgaggagtttttccgcgaatccctgaagatgaacccgcacatcctcgaggacatggagcatatgccgagctggctcgcgccgctgcccaccgtcatgatggcgctcggcctgttcgtctcgtatctgttctacatccgcaggccgtatctgccggtcgaactcgcgaaccagcagccgatgctgtaccagttcctgctcaacaaatggtacttcgacgagctgtacgactggatcttcgtgcgtccggcgaagtggctcggctacacgctgtggaagaagggcgacggctacatcatcgacggcttcggtcccgatggtgtctcggcccgcgtgctcgatgtcacccgcaatgtcgtgaagttgcagaccggctacctctatcactacgcgttcgcgatgctgatcggggcggccggattgatcacctggttcatgttcggcttgggaggccagtaaatgacaacctggcctatcctttccgttacgaccttcctgccggcggtcggtgcgatcctggtctatttgctggcgcggggcggcgacgagaccgccaaccgcacggcgcgctggatcgcgctgtggaccacgctgatcaccttcgcggtgtcgctgatcctggtggcgcggttcgacccggcctcgaccgacttccagttcgtcgagaaggcgtcctggcttgcgaccggcatcacctaccacatgggggtcgacggcatctcgctgccgctgatcatcctgaccaccgcgatcatgccgctctgcatcatcgcgagctggaagtcggtgacgcagcgcgtcggcgaatacatgatggcgttcctgatcctggaaacgctgatggtcggcaccttctcggcgctcgatctcgtgctgttctatctgttcttcgagggcggcctgattccgatgttcctgatcatcggcgtctggggcggcccgcgccgggtctacgcgtcgttcaagttcttcctctatacgttcctcggctcggtcctgatgctgctcgccatcatggcgctgtactggaacgccggcaccaccgacatcccgaccctgatgcacaccgcggtgccgcgatcgttgcagacctgggcgtggctcgccttcttcgcctcgttcgcggtgaagatgccgatgtggccggtgcacacctggctgcctgacgcgcacgtggaggcgccgacggcgggctcggtgatcctggccgcgatcctcctgaagatgggtggctacggcttcctgcgcttctcgctgccgatgttcccgctggccagccacgacttcgcgccgttcgtgttcacgctgtccgtcatcgccatcatctacacctcgctggttgcgatgatgcaggaggacatgaagaagctgatcgcgtactcctcggtcgcgcatatgggcttcgtcaccatgggcatcttcgccgtgaccacccagggcgtcgccggcggaatgttccagatggtctcgcacggcatcgtctccggcgcgctgttcctctgcgtcggcgtggtctatgaccgcatgcacacccgtgagatcgcggcctatggcggcctcgtcaaccggatgccgctgtacgcgatgaccttcatggtcttcaccatggccaatgtcggtctgcccggcaccagcggcttcgtcggcgagttcatgacgctgctcggcaccttcaagatctcgctgccgacggcgttcttcgccaccacgggcgtgatcctttcggcctgctacgcgctctggctctaccgcaaggtggtgttcggcgcgctggtcaagccgtccttgatgtcgattaaagatctcaccttccgcgaatgcgtgacactgttcccgctgatcgcgctgaccatcctattcggcgtctatccgaagccggtgctcgatatgtcggccgcctcggtccagcagctcgtcaacaattaccaaaccgccgtgactgccgtaaaggcagccgcgctgaccgtccagtaaggccctcgtcatgagcttttccagtgcaggttatcagttgcagccggtgctgccggagctggtgctcgcggtcggcgccatggtgctgttgatgatcggagcctatcgcgggcaggggacgacgcgcctcgtcaccacgctcgcggtgctgctgctggtcgtgaccggcgcattggagctctggctgcctgccggcaagctcgtgaccttcggcggcagcttcatcgtcgacgacttcgcccgcttcctgaaggtcctcgctttgatcgcatcggcggcgacgctaatcctgtcgaccgagtacctgtcccagccgtcgagccgtaccttcgagttctcgatcctggtgctgctctcgacgctcggcatgatggtactgatctcggccggcgacctgatcgcgctctacctcggcctcgagctgatgagccttgcgctctatgtcgttgccgccagccagcgcgacaatgccaagtcgagcgaggccggcctgaagtatttcgtgctcggcgcgctgtcgtcgggcatgctgctgtacggtgcttcgctgatctacggtttcaccggcacggtctcgttcgccggcatcgcggccgccgccaccaccggcagcatcggcatcgtgttcggcctggtgttcctgctcgccgggctctgcttcaaggtctcggcggtgccgttccacatgtggacgcccgacgtctatgagggagcgccgacgccggtgacggcattcttcgcgtccgctccgaaggtcgccgcgctcgcggtgttcacccgtgcgacgctgaccgcattcccgggcatcgtcagccagtggcagcagatcctggtgttcgtggcgatcgcctcgatggcgctgggctcgttcgccgcgatcggccagaccaacatcaagcgcctgatggcctattcgtcgatcggccatatgggctttgcgctggtcgggcttgcctccggcaccgtcgagggcgcgcagggcgtgctcatctacatcgcgatctatgtcgcgatgacgctcggctccttctcgatcatcctggcgatgaagcgcaacggccagccgctggagcagatcagcgatttcgccgggctttcgcgcaccaacccgctgatcgcgtttatcttcgcgatgctgctgttctcgctggccggcgtcccgccgctcgccggcttcttcggcaagtggtatgtgttcgtcgctgcgatcaaggccaacctgttcacgctggcggtgatcggcgtgctgaccagcgtggtgggtgcgttctactatctgtcgatcgtcaaggtgatgtatttcgaccagccgctcggcaagctcgacccggttcgcgtcgagctgcgcaccgtgctggcggtcgccggcatcttcaacatcttcttcttcgcctatccgggcccgctcgtcagcgtggcgacggcggcggcgaaatcgctattttaacgcgcatggttccggaacaggatgctggctttcggaacggatcatgcgcataagtccgacatgacgttcacgctcggacctcgggccatcgcggcgggccataagcttgccaccttcgaccagatcggctccaccaatgccgaagcgatgctgcgcgcccgcgacggcgagcaagggccgatgtggttcgtgacgccggagcagaccgcgggccgcggccgccgccagcgggtctgggtcgcgccgcccggcaatctcgccagcagcatcctcgaggtgaccgacgttcagccggcggttgccgccaccctcggctttgccgccggcctgtcgctcgacgccgcgctccggaaggtcggtatcgaggcggcgcttcggctcgggcctgatagccccaaattcaccctgaaatggccgaacgacgtgctggccaacggcaacaagctgtcgggcatcctgctcgaggccgaagccatcggcagccggctggcggtcgtggtcggcatcggcaccaacgtcgtcgcggcgcccgagggcacgccgacgccggcggtgtcgctcgcggcgctcggcatccagatcggcgcggaggagctgttcgccgcgctgtcggacgcctgggtcgagtttcgcggcatctgggacgacggccgcggctttcccgagatccgcaggctgtggctggagcgtgccgccgggctcggcgagaaggtcgcggtccagaccggctcggcgaccctcgaaggcatctttgatacgatcgacgataccggctgcctgatcgtccgcaccgctgatggacagcgcatgcccgtgacggccggcgaggtctatttcggcaccgcagcctcggtgagggcgaactgatggcgcgacccgacgaactcacctttgcaccgctcggcggcgtcggcgagatcggcatgaatttgtcgatctacggcctcggcaaccgccagcagcgctccttcctcgcggtcgatctcggcgtctccttcggcgacgaggagcatctgccgggcatcgatctgatcatgccggacgtccgcttcctggagaaggagcgcaacaacctgatgggcctcgtgctgacgcacgcccatgaggatcatttcggcgcgatcatcgacctctggccgaagcttggctgcaagatctacgcgacgcagttctctgcggcgctgttcgaggccaaatgcgccgccgagcgcaatccgccgaagatcccgatcaccgtgatcccgtcgggcggccgggtcgatatcggcccgttcaacgtcgaattcattccggtcgcgcattcgattccggaatcgcacgcgctggcgatcaagaccgacgtcggcaccgtgctgcacaccggcgactggaagatcgatccgaccccggtgatcggccagccgaccgacgagcggcggctgcgggagctcggcgacgaaggcgtgctggcgctggtcggcgattccaccaatgccgtgcgcgacgggcgctcgccctcggagaccgaggtcgccgctaccatcaagaagctggtcaaggccgccaagggccgggtcgcggtcacgaccttcgcctccaatgtcgcccgggtgagggcggtagtcgacgccgcgaacgcggccgaccgcgaggtggtcgtagtcggccgcgccatggagcgtgtggtgcaggtcgcgcgcgaatgcggctatctcgacggctcgcacaagttccgcagcaccgactattacggccatttcccggccgacaaggtgctggcgctgtgcaccggcagccagggcgagccccgcgccgcgctggcccggatcgccaacaacgatcatccgcaggtgaccctgaacaagggcgacaccgtgatcttctcctcccgcaccattcccggtaacgagaaggcggtcggcagcatcatcaacgggctggtgacgcagggtgtcgagatcatcaccgatcgcgagcacctggtgcacgtctccggccatccgcgccgcgacgagctgcgcgacatgatctcctgggtacggccgcagctcctgattccggtgcatggtgaggcgctgcatctcgccgagcacgccaagctggcgcgcgccgccggcgtccccaaggtgctgacctgccgcaacggcgacctcgtcaagctggggccgggcgagcccggcatcgtcggcgaagtgccggccggccggctctataaggatggaaccatcctggaggattccaagtcgcgcgccgtggtcgagcggcggcggatgggctttgccggctgcgccttcgtcgcgatcgcgatgacccagcagggcgaaatggccgacgatcccgaggttgatctcgtcggcatgccggagaacaatgccgccggcgagctgctcgacgacatcgtgttcgacgtggtggtcgcgacgatcgagggcctgccgaagccgcggcggcgtgatcccgatgcgctgggggaatcggtgcgccgcgcggtccgttccgcgctgagcgagcagtggggcaagaagccgatctgcatcgtgcacgttttgacggtttgacaagcggcttcgaaccgcgcgcttcgacaagggagaaagagatgctgggacggctcaatcacgtcgcgatcgcggtgaaggacgccaagcaggccgcgaagatctacggcacggctttcaacgccgagatttccgatgccgtgccgctgccggaacatggcgtcatcaccgtgttcgtgacgcttccgaacaccaagatcgagttcatcgagccgctcggcgaggcctcgccgatcgccaagttcgtggagcgcaacgccgacggcggcatccaccatgtctgctacgatgtgcccgacatcatcgcggcgcgcgaccgcatgatcgccgagggcgcacgggtgctcggcgacggccaacccaagatcggcgcgcacggcaagccggtgctgttcttccacccgaaggacttttccggcgctctggtcgagatcgaacaggcctaagggcgatggcgtatcagatcaccaccgggcttgcggtctacttcgtcctttggtggctcgtgctgttcctgacgctgccgttcggcatacgcagccagcacgaggatgggggcggcgcgcccggcaccgatcccggcgcgccggttctggcgcggatgggccgcaagctgttgtggaccacgctgatctccgcggtgatcttcgcgatcgcgatgtgggcctattatgccggttatctttcggtcgagcggctgtcgaagctgatggggatgccgttctaggtttggtccggccggaaccactccggtgaagggccggagatcgcctcgcttcgacggcgccggtcgcggtcgtgttcgacatcacgcggatttcggccctgccggggccaaccgagccggccgtgctcgcgaagcgctccagttcgggccagcgcttgagcaccccagcgatgctggaaacgcgcttcgtccccgctatcgcctgtacggccgcgatctcggcgctaggcgggggatcggacaacctgaagcgtaccgtcggctcgcccagaccggcggcaaggaagccggcgtgcacgcgctcgatcatgtcgacaagcgggtccttgcgactggcggcaaagaccgagaacacggcgacgaacatcgatgaaccctgcaagccgactagtagcgtacgtgagcaaagtgacctgcgggaacactgtcccggggtatcgcttcgctcgcgcttgctacgagcgagggcgcggctcgaaggaattgcgtgacgggccagaggattacgtgaacctgaccccgatgcggcgctcccggcgccaggcgacccggcatggacggttggtgtgatcgctggggatcaccaggttgaaggtctctgggatgccgaccggactggtgacttcgagcgcggctcctgtctccgagatgttgcggatcacacagtcgatggcaccaccattgaattcaattgagccgggcttgagcacgcgatgccggagcgccccgcggttgttttgcatgacctgaaccacgtccggcgtggccgccacggcttgtccggccgtctgcttccgcagtccttccgcgtggcgcgtcgcgaccgcgatctgctcgtcggtcagggtcggcctgagccggccccacgccagcttgaagcggacctgaccgtccttgaaatcgatcgcaggacctctgtcgccgctggctggtggccggccatagacgttgcagccccaccaccattgccggctgtcctgctgccgcatgatcctgcccaccgggaggccgcgccagatcacctcatagtcgtcgtcctgctggacaccatcgaccatggtgtgacgcagcgaaatggtctcggtgtcgtcggtcattgtgcgacttgcttgcggtcgatgcctgtgctgcggatcgacaagtttcgacgtccgcaggttacatccagcgtgacgggacgcaaatcccgtcacgcacggacattccgccgcgggatacgactggatacattgacatgaagtttcagaaatgagggggaccggttggattgaaatggaacatcgcaggctatgcgctggccgccggccgcgtttgctgcaactatgatccttccgggtggaaggccgacaccggcgcgatcccggaacgggagcgaggatcaaccttgccccgaggcaatcgaaggaggggccacatgaacctgcaggcgcaacccggcagctccggggccggtcagtatcgaatcttgcgcgaggccgatctgcgggactatctcgctgggctgccggccattgtcgcgaaactcggcggcgcgccggccggctggtcggtcagcgaggtcggtgacggcaatctcaacctcgtcttcatcgtcaagggcggcagcggcggcatcgccgtcaagcaagcgctgccctatgtccgactggttggcgagagctggccgctgccgctgtcgcgggcgcactacgaacatctggcactggtgcatcaggcacggttggcgccgggcctcgtgccggcggtgctgcatcacgacgcgccgcttgcgctcaccgcgatggagctgctcgagccgcacatcatcatgcgtaaggggctgatcggagccacgcgctatccgcgctttgtcgaggatatctcgaccttcctggcacagacgctgttcttctcgtccgatctcgcattgtcggcggcggagaagaaagaggggatcgctgcatttgccggcaaccatgcgctctgcaagattaccgaggacctgatcttcacagacccctatcgcatcgccgagcagaaccgctggacctcgccctatctcgacgcgaccgcggccgccttccgcgaggacctcgacctccatgtcgcgatctcccggctcaagctgaagttcatggtgagcccggaggcgctgctgcacggcgacctgcataccggctcgatcatggtcaccgaaagcgagacgaaggtgatcgatcccgagttcgcattctatggcccgatgggcttcgatatcggtgccgtcatcggaaacctgctgatggcctatctggcctccgccggccacgagcgctcggtgggcgagcgcgcatcgttcgaggcgtggttgctggaaaccatcgagggtgtctggaccgggttttcgcgaaagttcctcgagctgtggcgcaacgaggcgaggggcgacggttatccggcgtcgctattcgacagcgaggcaggcgctgcgcggctggaggcggaacggcaggcctacatggcgcggctgttccaggacacggtcggttttgccgcggccaagaccatacgccgtatcctcggcctcgcgcacaacatcgatttcgaatggatcgcggacgagaagcagcgcgcgatctgcgaggcgcgcagcctcaagctcgcgcgcaacatgatgttggaggcgccgtcctacacgacgatcggcgcggtcacctatgccgcccgcgaactgcgccactggcagcccgattttgccagatgaacgggacgtaccgatcgtcgtgtaagataagccgcaacggcatcgactagctttcggccggacgcacgaagcagagaatgccggcctcaggcgtgaaacagaccacggcgcggttcgttgggttgtcggttctgtcgatgatcctgttcggcgggacccgcagccagaatggagacgacagcttccagcgacgatcgatcaatacctcgtagccatcccggtcctgccggaactcgaccgttcggcaatccgcaatcgagcagcacgacgcgccggtgcccggttgcttcaggctttcaaaccatggggcaagcgcgggattagggttgtcgggcggcgctgcacccgcggcctggctcagggcaagtccaactgcaacggcgattgtcctgccgaacctcccgctgatctcgcgatgtgccgctgatgctgacaaaggcgtaaccctccgctgcgcgccagagactagcgccagttcggcccggcctgttcggaaattttcgacgaacgagcacgccacatattcggccgtcgtcccggcgaaggccgggacccataaccacaggcagtcattattgagcgacgccggagcgacgagtccccttcacaacatccgccgcggagtatgggtcccggccttcgccgggacgacgccgtgactagggccgcgtgcgaacaattcgtcaagaaatcaacatacctaatccgccgcttgctcccgcagccgctgcgcgtagacgttgatgatcagcgcagcgagcaggatcaggccgcggatcaggattttcaggaagctgtcgatgttgacgtggtcgaggccgttgttgagcacgccgagcacgaacaggccgacgatggtgttgccgatgccgccgcggccgccgaacaggctggtgccgccgaccaccacggccgcaatcgagtccagcagataggtgtcgaattcgttctgctgcgcgctgccgaaatgcgcgacgccgagcatgccgccgattcccgagcagaccgccgagatcaccatcacggcgccgaggatgagcttgacgttgaggccggcaaattcggcggcctcgcggttgccgcctaccatgtagacgtagcggccgaaccgcgtgtaggtcagcaccagatggccgccgagcagcatcaccgcagcgacgatcacgatccaggggatgccgccgatcgagcccgagccgagcgtcgtgatcaggtccggcaccttgtaggcgatctggccgcgcaccagaagcgccgagacgccggccgcgatctgcatcatggcgagcgtcatgatgaaggaggggatgccgatcacggtcagcccgagcgcgttgacaaggccgagcagcgcgcacagcgccagcgccagcaggatcgcgacgatgcccggcatcggaacgttggcgatgttgacgtaggattcctgcagcgtgaagtacgccaccgcgatgccggtgacgttggcgatgctggcgatcgacaggtcgatctcggcgcacaggatcacgaaggtgaggccgaccgcgatgatgccggtgaccgacacctgcgtcaggatattgccgacattgtcgatggtcgcaaacgacgggctcgcgatcgcgaagaaggcgctgaggaagatcaaggtcaggaacggcgcgatgttgcgcatctgcgagcgcaggaacggcgccagtccgcgcggccgctggtgatccgctcgtgccgtcgcgccctcagtgctcgtcatcattccactccatcatgctgcctcgagcagccgatccttactgacggcttcgccggcgaattcgcgcaccaccgcgccgcgcttcagcaccagaatgcggtccgcgagcgacagcaccgtctccggctcgctcgacagcacgatgatcgccagtcccttggcacggagatcgcgcacgatgttgatcacgtcgttcttggcgccgacatccatgccgcgggtcggctcgcacagcaccagcaggcgcggcgggtaggtgagccacttcgccagcgccaccttttgctggttgccgccggagagcatgccgagatcgaggccgaccaccggcggcctgatctgcaattgctcgacctggcgctgggcgatggcgcgctcgcgcactggcttgagcagcagcgccgagatccgctcgaggatgctgatcgagatgttcttgtagaccggctcctggtggaacagcatggcgcgccggctctccggcaccaatgccacgccggcccgccgggcggccgcggtgctgcggaaggttttcgcggcgccgtcgaccgcaagcgtaccgccgtccggcttgagcttgccgaacaggatgcgcgacagctccaattgtccgcagcccatgaagccgtagatgccgagcacctcgccggcgcgggcctcgaacgagacgtcctgcagggtgcggccgagcgaaagctggtccaccctgaggacggccgctccggcgctcgcttgcgggagcatgaggtcatcggtgtagctgtgctccagcgcctcgccgccgcggccgatcatggcctcgatcagcgcgcccttggtggtgtcggcggatgcggtctcggcgatcttgcgcccgttgcggaacacggtcacgacgtccgagacccgcaggatgtcctcgatgaaatgcgagatgaagacgatgctggtgccttcgtcgcggagcttgtgcagcgtcgcgaacagacgctcgacctcgggcggggaaagggcggaggtcggctcgtcgaggatgatgatgcgggcgccggagaacagcacgcgggcgatctcgatcaattgctgcaggccgatcggcaggtcgccgagccgcgtcatcggatcgacatcgatgccaaaccgggacagctgctcgccggcctcgcgcgccatccgccgccactgcactaggccgaggcggttggtcggctggttgccgaggaagacgttctcggcgacggtgagatcaggtgcgacgctgagctcctggtgcaccatgccgatgccggcggcatgcgcgtcgcgggtggagcggaaacgggtctccttgccgtccagcatgaagcggccggagaattccggatgcacgccggcgatgatcttcatcagcgtgctttttccggcgccgttctcgccgacgagaccgtggatctcgccggcgtgcagcgcgaagtcgaccccacgaagggcttcgacgccgccgaaggccttcgtgatctggttcaactcgaggatcgccgagcgtccctgcgacatgcggcccgctcagatcaggaagtgatcctccatccattgcatgccggcggcattggccttggtcacgacgggaccgtcggtcacgacgttcttcggaatgccctggccgctcttctcgccgccgaccacggcagcaacgccggccacgatcgcgccgccatggatgcggcaggacgggttgcggacggtggcgaacatccggccttcgctgaccgcctggatcgccggcggcatggcatcgacgccgccgatcaggatgttggtgcggttgcgcgccttcatgatgttgtaggccgcgagcgccatgtcgtcgttatggaagaatgccgcgtcgatctgcggatacttcgtcagataggtttcccagagccgggcggtcttggagacgtcccagtcggcgggctgggtatccagcacctcgatgttcgggaactgcttcacgaccgagttgaagcccttggcacggccctgcgcgccggtgtggccgagcgcgccctgggtcatgatgaccttgcccttgccgccgatcgcgttgcacagcgcctgcgtcaccgaggcgcccatgaactcgttgtcgggggcgaggaacgaatggacgttgatctgatcgagcggcgcaatcagcgtgtccatgtcgatcaccggggtgccggcatcgatcatcttctgcaccggctgggtcagcgtgccgatgccgaacgcctggatcgcgacgaagtcccatttctgcgaggccatgttgtcgatggcggcgcgttgcttgacggcgtcgagctggccgtcgaaccaggtgacctcgacattgaacagcttgccccagaactcggcggcctgcttgccctgtgcgcaccacgtcgcctgcaggccggcattggagaatgcagccttcagcggcttttccgagcgtcctgtttcagctgcgagcgcggacgtcgtcacgcccattccgccgaacaggccggccgcagctccacctgccgccgccatttgcagaaggtcgcgccgcgtcgtcgacgccttgtccatccccttgtcggtgcctggcattgattgctccctcatgttttttgaccgtcagcgtcagttgcacgcgccgcggataaagggagtgtgtcacaatcggaacggtgacgctacgccctcgcgtcgacgggatgttgctgctgctgcacgatcgccgcgatgtcgcggagcaacttgtgccacgcagcatcgatgtcccccgaccattgctcgccaagaatgtcgcgaaggcagtccgcgatcaccgcgaagaacgcgacgaacagttcgcgcggcgtgccgtaagcgtcatgtgagaacacctcggattcgatcaggcgaaaacgcccgctgcgttcgcccgcgaaatcgaggatggcttcgatcgtcagctgcagcatcgagcctttcaccggctcgctgccttcggtgcgaaacatcgcctgtgcttcgggatggtcgcgaaacaagcgccgatagaccaacggcgtcagatcatcgcaagccgctgctgcgagttcaaagctgcgttcgattggattggatgatgaggtcatagcggtttgcgatcatcacacaaaaaaagagcagggcgccaagccctgctccaaaaattgtgtcgaccctatttgccccaaaaattcgatttgatcttgattgatggggtgacgctgcttgtgcgcgtcgggctcctcccgagacttggaccaccaggacacacctcgcggctgacctgcgcgggaattggtagaccatctttccagccttgtcatcattttcggcaacgattgttcaaatttcgagcaatttgcgaaatgattgggatggtgccactgccggttgtgacattggtgtgaaaacacgtggtagggtaaggagatacgaccgcttgtgaggcagccgcgacaccaacgtcacgttcggcaaattccgcgagctggaagaagccgggcgtgtccacgatctcgactttcgacgcccgtggtggttagttccgtctcggatgggttttgcgatgcgccggccgcttaagaaatttttgcccatagttctggttgccctgctggtgcagatttttgcgccgatcggggcctgctgggcggcgagccttgcagcctccgatccgctcgcggccgccaccatctgccacggcaatgccggctccggcgtcgggcagtctgaccagaccggtcatgatgcccacgacggctgttgcttcgcatgcagtgtcctgcagaccggtgcccccgttgataaccccgaggtcgctgcccggccggtcgagcgcgcgccgagccggatcgcctggcttgatttcgcctcagaccttgatcgttcgcccgccggcttctcggcacaagcccgcgctccgccgctgttttcctgacgacgttctcgctgccggtcgcgcgtcccgcaccggcgagtgcccttgagcaagccggccagagagccggtgtcaggattcatccatgtttcggtttcgcgccctcggtggcgtcagcgtcgcggccattcaggccacgttgttggcgtctgctgatatggctcatgcacaaaatggcgaaccgggggtcttgccacccgtcagcgtcgaggcgccgcgcccagcgaagccggctgcgcgcaagcccgtaaaccgctccgccgtcgcccttcggcatcggaccgcgccagcggctgcggccgcgccgaaccgaccggtcgtggtcagcgccgccggggcgggcgcccatgcctcgctcgggacgccgccagccgtggcccggttccagctgccgcagaagtccttcagcatcacctccgggcaggtcgacgagaccgtcaacctcaaggaccccgaggacgcggtcaaatacatgccgagcctgttcgtgcggaaacgcaacgacggcgacaacatggcggtgctggcgaccaggagctggggcgtcaattcgagcgcgcgctcgctgatctattacgacgacctgctggtgtcggcgctgatcggcaacaacaacaccagcgcctcgccgaagtggaacctgatctcgccggaggcgatcggccggatcgactatctgaacggcccgttcgcggcggcctatcccggcaactcgatcgggggcgtgttgctgatctcgtcgaaaatgcccgacaggccgtttgcggtggccaaggagacggtctcggtgatgccgtggagccagtacggcaccaaggacacctatgtcaccagccaaaccagcgcggccgcgggcaatcgcgatggcaagctgtcgtggctggtgagcgccaactatctcgacagctttcagcagccgctgacctacacgacgagcgcgacgatcccggcggggactgccggcgcgtttccggcgcgcaacaagcagggcgtgccggccaatgtcatcggcaccggcgtcctggcgcattcgcagcagacatcggccaacctgcgcctcgcctacgatgtgtctccgctggtgcaggcgacctattcactcggcatctggaacaaccatcaggtttccgatccccagacctatctgcgatccctcgcgacgggcgcgccgaccttcgccaacaattcgggcttcgccaccggcaagtacgtctgggaccagacccatctgagcaacgcggtcgcgctgaagagcgacaccaagggcgtctacgacttcgacctgtcggcctcgagctacaactacctgcaggacacccagctcaatccgttcaccgtcgcggcaaccggcgtcggcttctcgccgaacggcaagatcacgaggatggacggcaccaactggcagaatgctgatgccaaggggatctggcggccgttcggctatgacgggccgcacgagatcagcttcggcgttcacggcgatcgctaccggctggaaaatccggtctacgcctcgtcgatctggaacgcgacatcgtcgaccggcaccggcgcgctctactcgacgggcgtcggcgaaacccggaccggtgcgctgtggttgcaggatgcctggaagatcaacccgagcctgaagctgacgctgggcgggcggctggagagctggcaggcgctcgacggcttcaacctcaacaccacgacgaatgccgcgggcgggatcacgtcgaccgcggcggtcaaccagcccgggctgaactcgaccaacttctctccaaaggcgtcgctgtcgttcgacccgaacaaggattggaacatcacggcgaatttcggcgaggcctatcgctatccgacggtgaccgagctttatcaaaacgtcacgatcggcggcgtcgcgaccttcgccaatccgttcctcaagccggagcaggacttcaccggcgagttgaacatcgagcgcaagtggaccgacgggcgggtccgcctgacgctgttctccgagcgaaccaacaacgcgatcatctcgcagaccaatctggtgaccaatccggtctcaggggcgcagacgccgaccaccgtcgtcagcaatgtcgacgcaatccggatgcagggcgtcgaactgtcggccgaaaaggacaatttgttcgtgaccggcctgcaactgttcggcagcgtcacctatgtcgattccaagatcctcgcagacgcaagctgggcgggcgtcaatccgctgaccaacttgccgaccaccgtggtcggcaagcgcgttccctatgtgccggattggcgcgccaagatcggcatgacctaccggccgaacgagagctgggcctacaccgtcgcagcgcgctacagcggcaagcaatattcgacactcgacaacaccgacatcgtctcccacgtctatggcgcgttcgacaatttcttcgtcgtcgacatgaagatccattacaacgcgaccgcgaacttcgcgttcgatttcggcatcgataacatcttcaacgagcagtacttcctgttccatcccttccccggcaggacgttcgtcctggccggcaaatacaccttctgagctggcgggctgtcggcaacaacacaaaggagattcgacgtgagaaaaacactggctgggcttgctgcaatcttcgcgcttgccctgatcgcgcctgccgcggccgaggacgtcaaggccggcgatctcgtgatcacgcaggcctggacgcgcgccacgccgaacggcgccaagatcggcggcggctatctgacgatcgagaacaaggggacgacgcctgatcgtctggtttcgggcacagccgatgtcgccggcaaggtcgaggtccacgagatgtcgatggacaatggcgtgatgaagatgcgtgcgctcgacaagggtctggcgatcgagccgggcaagacggtgaaactcgcacccggcggctatcacctgatgatgttcgacctgaagaacccgctgaagcagggcgacaaggtgccggtcacgctcgaattcgagaaggccggcaaggtctcggtctcgcttgacgtgcagcccgtcggtgcgcaggcgccaggcggcgatcactccggccatggcgaccattccggtcacatggacatgaagaagatgtgagggcgccatgcggtcacacacaatcctcattgcgatggtggcgctgctcgcagcggcgccggccgttgcgcacgtcacgctggaaggaaagcaggcgcccgtcggctcttactacaaggcggtgttcgccgtaccacacggttgcgcgggatcggcgacgaccaagatccgggtacagattccggaaggcgtgatcggggtgaagccgatgccgaagcccggctggaccctcgatacggtcaccggcaaatacgccgccgaatacgactatcacggcgcaaaactctccgagggcgtcaaggaagtggcctggagcggtggtaagcttgccgacaagaattacgacgagttcgtgatgcagacgtttctcaccgatacgctgaagccgaacacggtgctctatttccccgtcgtgcaggaatgcgagcagggcgtcagccgctggatcgacatcccggccgaggggcagggtggcggcgggcacgagcatggcagcaagacaccggcgcccggcgtcaagctgctgccgaagccgtaaaccgtgcggctgctcgcaggtcatgttgtcggaagtctcgccgcgctactctcggcgctgtttctgacgctgtgtcttgcgaccccagcccatgcgcatgccgtcctgatcgcagccgagccggccgacggcagtgtggtcgcggaagcaccgaagacggtggtgctccgcttcaacgaagcggtggcgccgacggcggtcagcctgctcgacgccgcgggcaagccgcgcgacgtcgcgatccacgctgtcgatgaatcggtgatggtgacattgcccgcgggcctgccgcagggcacgcaggtggtcagctatcgcgtggtgtcgcaggacggccatccggtcgcgggctcgctgttgttctcgatcggcgtcgtcaccggctcggcggcgccgtccggcgacggcctgctccatgcgctgatctggctggcgcggctcgcgctctatctcgggctgtttgccggcgtcggcggcgtgttcttcgccgcctggatcgggcagggcccggcgggcgagcggctgatcatgtggtcgctcaagatcggcctggtcggtgcggtcgcctcgcttggcctgcagggtgtcgacctgctgaacctgccgatcaccggcctcctgacatgggcggcgtgggccagtgccgccggcaccagcctgtttccggctctgctgctcgccatcgccgcgatgctgatcgcagcgattgcctggcgcagcccatcgttccgcgcggcgttcgtccgcaccgcggtcgcgatgatctgcgtcggcctgtcgttcgcggtcagtggccacgccgccactgcctccccgcaatggctgacgcgcaccgcgctgttcatccacggcattggcctggccttctggatgggcgcactcgcgccgctggcagtgctcgcctggcagcgcaaggactcgctgttgcgggtgctcaggcgcttttcaacggtcgcagtgccggtcgtcgccttgatcgccttgtcgggcctggcgctcgcgatcgtccagctcgaaagttttgcggcgctgatcgacaccggatacggcaacatcctgctggcgaaacttgtgctggtggcgctgctgctgacgttcgcggcgctgaaccggctggtgttcacgcccgcgatcgagcgtgaattccaccgcacgcggccgctgcagcgctcgatcgcgctcgaattcgtgttgatgatcgccatcctcggcctcgtcgcattatggcgcttcacgccgccgccgcgcgtgctggcgatgtcggacgacgttccgctcgcggtccacatccataccgaggccgcgatgttccaggtgctgatcgcgccgggcaaggtcggccagaacgatttcgtgctgcagttgatgaacggtgatgccagcccatttgcggccaaggaagcgacgctgacgctgagtttgccggatcgcggcatcgagccgttggaacgcagcgccgcactgggtccagacggctattggcacgtgaagaaggtgccgttgtcggtcccgggccgctggcacatgcagatcgatgccctggtgaccgatttcaagaaagtgacgctggaagacgatttcgaggtcaggtaaacgctcgatcggtgcgccggatacctcggcggtgcgcaattcgctgcaatggccgaaattcgcctgatttgaagggtttttgacctgaagcggccttgtgttttcacagccgatccggtttcactgcagctctcttccgatgcatcactgattcccgagtaacgccatgcgattgtcgcggtttttcctgcccatcctgaaagaaaacccgaaagaggcggagatcgtctcgcaccggctgatgctgcgcgcgggcatgatgcggcaggaggccgccggcatctatgcctggctgccgctcggcttccgggtgctgaagaagatcgagcagatcgttcgcgaggagcaggaccgcgccggcgcgctcgagctcctgatgccgacgctgcagcttgccgatctgtggcgtgagagcggccgttacgatgcctatggcccggagatgctgcgcatcctcgatcgccacaagcgcgagctcctgtacggaccgaccaacgaggagatgatcacggagatcttccgctcctacgtcaagtcctacaagaacctgccgctcaacctctaccacatccagtggaagttccgcgacgagcagcgcccgcgtttcggcgtgatgcgcggccgcgaattcctgatgaaggatgcctattcgttcgacctcgacgaggccggcgcgcggcgctcctacaacaagatgttcgtggcttacttgcgcacctttgcgcggatgggcctcaaggcgatcccgatgcgggccgagaccggcccgatcggcggcgacctcagccacgagttcatcgtgctcgctgacaccggcgagtccggcgtcttcatcaaccgcgatgtgctggacctgccggtgccgggcgaggacgtcgattatgacggcgatctcacgcccatcatcaagcagtggacctcggtctatgctgcgaccgaggacgtccacgaggccgcgcgcttcgaacaggaagtgcccgaggcaaagcggctgaacacgcgcggcatcgaggtcggccagatcttctatttcggcaccaaatattccgacaccatgaaggcgatggtggccggtcccgatggcgtcgatgtgccgatccatggcggctcctatggcgtcggcgtgtcgcgtctggtcggcgcgattatcgaagcctgtcacgacgatgccggcatcaaatggcccgaggccgtcgcgccgttccgcgccgcgatcctcaatctcaagcagggcgatgctgcggtcgacggcgcctgcgagcagctctatcgcgagctcgcggcgaagggcgtcgacgtgctctacgacgacaccgatcagcgcgccggcgccaagttcgccgcggccgatctgatcggcatcccctggcagattctggtcggcccgaaggggcttgcggagggcaaagtcgaggtgaagcgccgcagcgatggctcacgcgagaacatgagccccgccgacgtggtcgcgaagctcgcgggttaaagtttattcacgctgcgtgatcggcggggtaatccggccacatttggcccgaatcatgggattatcgagagatggatgagaccatgagcgaaccagtccgtaccccgccttttgcgccattcgaatggctgctgtccggacgctatctgcgcgcgcgccgcaaggaagggttcatttcggtcatcgccggcttttcgttcctcggcatcatgctcggcgttgccacgctgatcgtggtgatggccgtcatgaatggcttccgcaaggaattgctcgacaagatcctcggtctcaacgggcacctgctggtgcagccgctggaatcgccgctgaccgactggaaggatgtcgccgaccggatcagccaggtccagggcattcgcctcgccgcgccggtcgtggatgggcaggggctcggatcgtcgccgttcaacgccgccggtgtctttatccgcggcatccgtgccgacgatctcaacaacctcacctcgatcgccaagaacatcaagcagggcacgctcgagggttttgacgaggggcagggagttgcgatcggccgccggctcgccgaccagctctcgctgcatgccggcgacatgatcacgctggtctcgccgaagggcgcggtgacgccgatgggcaccacgccgcgcatcaagccgtacaagatcaccgcggtgttcgagatcggcatgtcggaatacgactcgaccttcgtgttcatgccgctcgccgaggcgcaggcctatttcaaccgcaacaacgacgtgtcttcgatcgaggtgttcaccaccaatccggacaagatcgacacctaccgcaagctggtgacggaggcggccgggcggccggtcttcctggtcgactggcggcagcgcaactcgacgttcttcaacgcgctgcaagtcgagcgcaacgtgatgttcctgatcctgaccatgatcgtgctggtcgcggcgctcaacatcgtctccggattgatcatgctggtgaaggacaagggccaggacatcgcgatcctgcgcaccatgggcgcctcgcaaggctcgatcatgcggatcttcctgatcaccggcgcctcgatcggcgtagtcggaacgctgaccggctttgcggtcggcatgctgatctgcctgaacatcgaatcgatcaggcagttcctgtcatggctcaccaacaccgagctgttctcgcccgaactgtacttcctctccaagcttccggctgaggtcgatttcggtgagacgctcgccgtcgtgatcatggcgctgacgctatctttccttgcgacgctctacccgtcgtggcgcgccgcgcgcctcgacccggtcgaagcgctccggtacgaataaggagcccacatggcggagggggcggaagacgtaccggtcgtctatcttcatgatatcaagcgggaatacaggcagggcgaggcgacgctgacggtcctgaacggcgccaagctcgcgctgtggcccggtcaatcggtggcgctggtggcgccgtcgggatccggcaagtcgacgctgctgcatatcgcgggcctgctggagagtcccgatgacggcgaggtctatgtctcgggcacgccgacctcgcagatgtccgacgtcgaccgcacgcagattcgccgctccgacatcggcttcgtctatcaatcgcatcggctgctgccggagttctcggcgctcgagaacgtcatgctgccgcagatgattcgtggcctcaagcgctccgaaaccgtgaagcgggcgaccgagatcctcgcttatctcgggcttggcgaccgcatcacgcatcgaccggccgagctctcgggcggcgaacagcagcgcgtggcgatcgcgcgcgcggttgccaacgcgccgcgggtgctatttgcggacgagccgaccggaaatttggatccggcaacggccgatcacgttttcaacgctctgatgcaactcgtgaaggcgacccgggtcgcgatgttgatcgcaactcacaacatggagctcgccgcgcggatggatcgccgggtctcgttgtcgaatgggcaggtcgtcgagctcgagtgagccgcggctctcacgcgcgaagtggctgacggttcgcgtgaaggacgtacaccaagatcaggagctgcaaggctttttcgttccgcttcaattggggcggcaacgcgctcatcctcaatggacggaacggcgcgctctgccaggcgctcgcgagcggccgttgttcggcggcccgacatagtaggggttgtcaacgcacgacgccggcaggcccgccgccgaggcctggcactgcgccagtgacgtgtagccgcactcgatctgcggaccgccccgttggtagttggttttgcagaccggcgaggtcgcatcgtatcgctgggcgttcgccggtgcgcccgcgacggtacccagaaccaagagtgccagaatcaggcagcgcatcggaatctcccgccggccggctgccggcgacgctcatgtgagtatccgcgctgaccggcgccataggcgcgtgcgcgcgagtgcgtcgaatcgcggtcccgcgcggacgccagtccgatcagcggtcagtgaagaacaggtcgaagaaattgccctcgcgacgatcgcgcggggggatgtgcagataggagcgcgggtcgttgtcgccggcataatagggattggcgatgcagttctgcccgatgcccgaggccgtggccaggcacgcttcataggacgggtaggagcagttgctcaggccgggatagcggtcgccctggatacagaatgggtagcgcacgccgacggcatgcgcgggcgccgtaccgaacgaggtgaacgcgaccaccgtcgccgccgcagcaagaatcatcgtccgcatgtgcattccttgtcgctgcgaagattcgatgttggcgacgatccaaatcggacaagctggttccggtcaacacgatcttgcgtctcgcagtacaagcaattttgaattgtgaaaattatgcggcagctatgtggcaaaagttccaagaagtgcatgtaatacagtattaacttcaaatttgagcgaagtcgtttggccctgcctgttgcagcgaagttacagcaattccgccgggggctgctatgagggtgtctcgcggccttgggggcctgtagacaaagttggaacgggaaaaatgaagaagattttgcttgtcaccgccagcatgattgcgctcagcgcgacggctgcttccgcggctgacctcgcggctcgcccttacaccaaggctccgccgccgatcgtctccgctgtttatgattggaccggcttctacatcggtatcaacggtggttggggccagagccacgacaaccgttcggtcgatggcatcggcagcgccggcagctacgacgccaacggcggcaccgtcggtggccaggtcggctaccgctggcaggccggcggctgggtgttcggtctggaagctcaaggcaactgggctgacttcaagggcagcaccggcaacctgctcgtcccgggcggcaccgttcgctcgaagacggacgcgttcggcctgttcaccggtcagatcggctacgcctggaacaacgtcctgctgtacgccaagggcggtgctgcggtcaccgatcgcaactaccagttcctggcaccgggcggcgcgctggcgtcctcgaccggctacgacacccgttggagcccgacggtgggcgttggcctcgaattcgccttctcgcagggctggtcgctcggcgtcgaatacaaccacatcttcgaagacacccacggcgcgaccttcgtcaccccggctggtgtcggcgtggctggcttccacaccggtggcgacaccgacatggtcctcggccgtctgaactacaagttcggtggcccgatcattgccaagtactgattgatcgcttgatccaagcgacatcgaaaaccccgggcttcggcccggggttttttgttggcttgctgcctgctcctccatgattgcagggaaggcggggatccggccgaagccgagagcgagagccctcactgctcaggcggaactgtcccgtgcccgccaaggcaggccgggaattgttgccgatgaagggccgggcgcctgttagtcgaaatcggcgaagtcgagcccggcgttggccttggatgcgtcattgatgcagtccgaatacgcgcgccagcgttccacaaacccatagccttgggcctgctgcgccgccttcgccttgcattcggccttgatgtgcttgacgacggcctgctgtcgcttggacgtcttttccgcgctggcgggcgtcatggtcagaacgaccgccgcgatcgcaagtgcgttgactgcaagtcgtgctgtagcggtggtacgaggcattgcgatgctcccgcgagacgattgatcgagatttcacgctgaagccggagcactcagcgcctcgatcctaggcctcgcccgggcgcgttcctttgctcacacggagtaccggaattgtacggggttcaatgtcatgagccgctgagtcgcctgccgccgatgagcggcctcgtcaggcctgccaagcctgccaacctcgcgagattaactatcaggatcactttccagaccgaaccggcgccctcgcttgactccgagaacaaaaaaggaacaatgttctgcatacgttccagttcagggagagcggccatgttgaagattttcgtgcaggaagctgcagcgctggcatcgatcacgctgttcgtcggtatgatcgcggtttgggctcagctgatcacccagttctgaagaatatccccttggagacaggggcatggctggcccctcgtggctccgttgcaatgccccttggggataagcgggacgacctgccgccacgccgcgttcggcgtggacttggcagggtccaggctccacgatgggggcgcgagtcgggtctgatgctgtcgagttccggctttggcactcgcgccaccctggcccaaagagatcccgtaagcagccatgccgaatgccggattcgttcatcttcacgtccattccgcctattcgctgctgaagggctcgatcaagatcgccaagctcggcgagcttgcaaaggccgaccgccagccggcgctggcgctgaccgacaccgacaacatgttcggggcgctggaattctccgacaagatggccggctacggcatccagccgatcgtcggctgtgaggttgcggtggatttcggcgacgtcgaccccaatacgcgaagcatcctggcgacgaccggacccacgcgaatcgtgctgctggcggcacgcgagcgcggataccagaacctgatgcggctgaactcgcgggcgttcctggagacgccggtgaaccagacaccgcacatcaagctcgactggctcaccgacgccgccgacgacctgatcgcgctgaccggcgggcccgacgggccgatcgcgctggcgctgcgcgccgagcaggcgacgctggcggccacccgctgcgaacgtctggccagcctgttcggcgaccgcctctatatcgaattgcagcgccacggcgtcgacaaggagcgccgcaccgagggcggcctgattgatcttgcctatgcgaagggcctgccgctggtcgcgaccaacgagccgtatttcgcgagcactgacgactacgaatcgcacgacgcgttgctgtgcatcgccggcggccatctgatcgccgagaccaaccgcgagcaattgaccccggatcaccgcttcaagacccgcgctgaaatggcggtgctgttcgccgatattccggaagcgctggcctcgacggtggagatcgccgagcgctgctcgttccggcccaagacccgcaagccgatcctgccgttcttcaccgtcggagccgcacagagttccgacgccgccgccgacgaagccgccgagctgaagcgacaggccgaggaagggctcgccaaccgcctgcgggtgcacggtctctcgccgggcatgacggaggaggattacagcaagcggcttgccttcgagctcgacgtcatcacccgcatgaaatacgcgggctactttctgatcgtgtcggacttcatcaaatgggcgaaggcgcagggcattccggtcggaccgggccgcggctcgggtgcgggctcgctggtcgcctgggtgctgaccatcaccgacctcgacccgatgcgctttgcgttgctgttcgagcgcttcctcaatccggaacgcgtctcgatgccggacttcgacatcgacttctgccaggaccgccgcggcgaggtgatccagtacgtgcaggagcgctacggccgcgaccaggtggcgcagatcatcaccttcggaacgctgcaggcgcgcggcgtgctgcgcgacgtcgggcgcgtgctgcagatgccgtacgggcaggtcgacaagctgaccaagctggtgccgcagaatcccgccgctcccgtgacgctggcgcaggcgattgaaggcgaaccgaagctgcaggcgttccgcgacgaggatccggtggtggcgcgcgccttcgacatcgcgcagcgcctcgagggcctgacgcggcacgcctcgacccacgccgccggcatcgtgatcggcgaccggccgctcagcgagctggtgccgatgtaccgcgatccgaaatcggacatgccggtcacccaattcaacatgaaatgggtcgagcctgcgggcctcgtgaagttcgacttcctcggcctgaagacgctgacggtgctcgacgtcgcggtgaagctgctcaagcagcgcgacgtccatgtcgatctcgccacgctgccgatcgacgatgcggcgagttaccagatgctcgcgcggggcgatgtggtcggcgtgttccaggtggaaagccagggcatgcggcgggcgctgatcgacatgcggccggaccgcttcgaggacatcatcgcgctggtggcgctgtatcgcccgggcccgatggcgaacatcccgacctattgcgcgcgcaagcacggcgacgaggagccggaatatctgcatccgatcctggagccgatcctgaaggagaccttcggcgtcatcatctatcaggaacaggtgatgcagatcgcgcagcagatggcgggctattcgctcggccaggccgacctgctgcgccgcgcgatgggcaagaagatccgcgccgagatggacaagcagcgcgacatcttcgtcgccggcgcaatgaagaacggcgtcggcaagggccaggcggagacgatcttcgagctgctcgccaagttcgccgactacggcttcaacaagagccatgcggcggcctatgcgctggtgtcgtaccacaccgcctacatgaaggcgcatttcccggtcgagttcctcgcggcgtcgatgacgctcgaactcaacaacaccgacaagctctccgaattccgttccgaggcgcagcggctcggcatcaaggtcgaggcgcccaacatcaaccggtccggcgccaccttcgaggtcagcgaaaatacgatctactacgcactcgcggcgctgaagggcgtcggcatccaggcggtcgagcagatcatcgaggagcgcaacaagaagggcgccttcacctcgctcgccgatttcgccgcgcgggtcagcccgcgtgcggtcaacaagcggatcatcgagagtctcgcggccgccggcgccttcgacacgctggagcgcaatcgcgcgcgggtgttcgcaggcgccgatgcgatcctcgccgcctgccagcgcagccacgaggcggcgacctcgggccagaacgacatgttcggcagcgcgccggacgcgcccagcatcatcctgccgcaggtcgagccctggctgccggcggaccggctgcggcgtgaatatgatgcgatcgggttcttcctgtcgggccatccgctcgacgactacgccactgcactgaagcggcttcgcgtacagtcctgggcggaattctcacgcgcggtaaaaaccggcgccaccgcgggcaaggtcgcggcaaccgtggtgtcgcgcatggagcggcgcaccaagaccggcaacaagatgggcatcatgggcctgtcggatccgaccggccatttcgaggcggtgctattctccgagggcctcgcgcagtaccgtgacgtgctggagccgggcgcggccgtgctgctgcaactcggcgccgagctgcagggcgaggacgtgcgggcgagggtgctgcacgccgagccgctggaccacgccgcggccaagacgcaaaagggcctgcgcatcttcgtgcgcgacaccaagccattggagtcgatcgcgcgccggctcaacatgccggaggccgtggccgcgcccggcggcactgcaaagccggcggcggtcaagcctgcgccggcagccgcgccgccggcaggcgccgccgacggcgacgtctcgcttgtgatgatgctggatctcgaaaccgaggtcgagatgaaactgcccggtcgctacaaggtctcgccgcagatcgccggcgcgatcaaggccgtcgccggcgtcgtcgacgtgcagacgctataggcgcgcacgcgctcctgcctcctgaggcagttgatccaccgttgccaagcctttagccgttgcaacttaacggtgtatcggcttagtgtcgtgcggggctggttttgggggtcgaatgttctggcggggaatggtggcgttggccgcggctgcgctgttgtgcggctgtgaaacgacgcagaggaatgggctcgactatgcagcgatgacgcagaaggtgggtccgccaaaggcgggacacgggcgcatcgtaatgctccgggaaaaggatttcggcaacattgtcgacagggcgtttgagttccagctcgacggtacgccggtccagggcctcaggaccggaacctacgtctatgtcgatcgtccggcgggccaacaccagtttacggcgagcgaagccggctttcccggtgtgacccagcgggacgtcacgatccagtcaggtcagacccatttctatgtggttcgaatgagtgagcgaaagagcgccatcctggcatcgtcagcgaataccggactgctgggtcttgcactgagcacagccatcacctcgggctacaagaatcccggcccgctcgatttcctgcccttggaggattccgcggcccggaccacgatcgcggagctgcggttggccgaataggggccatttcggctcgatttgggtccatccgaccggtgtaaccggccgtatttccttgcttctggcgcaaatcaggctatatagcgcgccatctcacacggaaacatggctcaaaaggccgtccggtggcagccgggccataaggctcgtctgctcacacgtttccggaggaaccaaccggagaattatcactatgtcgctacccgatttttctatgcgtcagttgcttgaagctggcgttcactttggccaccaggcccaccgctggaatccgaagatgcaggattacatcttcggcgcccgcaacaacatccacatcatcgacctcgcgcagaccgtgccgatgctgcatcgtgccctgcaggcggtcagcgataccgtcgccaagggcggccgcatcctgttcgtcggcaccaagcgctcggctcaggacggcgtcgccgacgctgccaagcgttcggcccagtacttcgtcaattcgcgctggctcggcggcacgctgaccaactggaagacgatctcggcctcgatcaagcgcctgcgccatctcgacgacgtgctgtcgtccggcgaagccaactcctacaccaagaaggagcggctgacgctgcagcgcgagcgcgacaagctcgaccgttcgctcggcgggatcaaggacatgggcggtcttcccgacatgatcttcgtgatcgacaccaacaaggaagacatcgcgatccaggaagcccagcggctcaacatcccggtcgccgcgatcgtcgacaccaattcggacccgaagggcatcacctatgtggtgccgggtaatgacgacgccggccgcgcgatctcgctgtattgcgacctcgtggcgcgcgctgccatcgacggcatctcgcgcgcacagggcgattccggaatcgacatcggcgcttcggccgctccgatccaggaagaccttccggccgctgcgccgtccggcttccaggggctggccggtccgcgtggcaccgccgacaatctcaagaagctcaccggcgtgtccggtgcgatcgagaagaagctcaacgacctcggcatcttccactactggcagctcgccgagctcgatcacgacaccgcgcacaagatcggcgaagaagtcggtctgccgagccgtgccgacgcctgggttgcccaggccaagacgctcgccgaagcggaataacagttacgcggcgtggccgggtctgacccggccgccgcttctattccacgaacaacgattttcctgtcgctgacagcggcgccatcgggcgccgcggtttctgtacaggcaagaaggacatggaacgatggcaacgatctctgcagcaatggtcaaggaactccgcgagtcgaccggcgcgggcatgatggattgcaaggcggcgttgaccgagaccgacggcgacatgacggcggcgcaggactggctgcgcaagaagggcctgtccaaggctgccaagaaggccggtcgcgtcgcggccgaaggcctgatcggcgcgctgaccgccggcaccaagggcgtgctggtcgaggtcaattcggagaccgacttcgtcgcgcgcaacgagcagttccagggcctggtcaagatgattgctcaggtcgcgctgaagcacggctccgacgtcgaggccatcaaggccgccaaggttggcgacttcaccgtggagcgggcgatctcggacgcgatcgcgaccatcggcgagaacatgtcgctgcgccgcgccgcttcgctcgaggtgagccagggcgtggtgtcgagctacgtccacaacgccgtgatcgagggcgccggcaagatcggcgtcatcgtggcgctggagtcccccggcaagaccgacgagctcgccgtgctcggccgccagctcgccatgcatgtcgcggcggcgaagccgctggcgctcgaccctgccgggctcgatccggagaccgtcaagcgcgagaaggacgtgctggccgacaagtaccgccagcagggcaagccggagaacgtcatcgagaagatcgtcgattccggcctgaagacctattacaaggaggtttgcctcctcgatcaggccttcatccacgacagcggcaagtcggttgcccaggcggtgaaggaagctgagggtaaggtcggcgggccgatcaaaatcgccggctttgtgaactatgctctcggcgagggaatcgagaagcaggaaagcgacttcgccgctgaagtcgcagccgccagcggcaagaagtaaccgctgacacccggcgtccggcgcgttgcgccggaggcctgcctgcgcgggacaagaaagcgatcgcatcatggccgagccgatctatcgtcgcgtggtgatcaagctgtccggcgaatatctggccggctcccacggcttcggtatcgatcaaccgacggtcgatcgcgtcgcggacgacctgatcgcggcgcgcaagctcggcatcgaggtcgccgtcgtgatcggcggtggcaatatcgtgcgcggcgtcgaggtgtcctcgcgcggcgtatcgcggccgaccggcgacaccatgggcatgcttgcgaccatgatgaactgcctcgcactcgaggcggcaatcgagcgcaaggggacgccggcgcggaccttgtcggcattcgtgatgccggagatttccgagctgttcacccgtagtgcgacgcacaaatatctcgccgagggacgcatcgtcctgctcggcggtggaaccggcaacccgttcttcaccaccgataccaccgccgtgctgcgcgcggccgagatcggggcgcaggcggtgctgaaggccaccaatgtcgacggcgtctataacgccgatccgaagaaggaccccaaagccaagcgcttcgaccgcctgacccattcgcaggcgatcgagggcggctacaaggtcatggacgcgaccgctttcgcgcttgcccgcgagacgtcgctgcctatcatcgtgttctcgatcgcggagcccggttcgatcggtgcgattctgcgcgggtccggacacggcacggtcgtcgccggctgattgccgcgcctccgggtccagattttggacccgaggacgtcgacagccggtttctaatgaagggagaacgtcatggccgcagctggttttgacatcaacgacgtcaagcgccgcatgcagggcgccacacaatcgctcaagcacgagctcggcggcctgcgtaccggccgtgccgcggcctccatgctggagccggtccaggtcgaggcttacggctcgcatatgccgctcaaccaggttgcgaccatcagcgtgcccgagccgcgcctgctctcggtgcaggtctgggacaagacgatggtgaaggcggtcgaaaaggcgatcgtggattccaatctcggcctgtcgcccgcgaccgaaggccaggtgctgcgcttgcggattccggagctcaacgaggagcgccgcaaggaactcgtcaaggtcgcgcacaaatacgccgaagcggccaaggtcgccgtgcgccatgtgcgtcgcgacggcctcgacgtgatcaagaagctcgagaagaatcacgagatctccgaggacgatcaggagcgcctgtccaacgaggtgcagaaggcgaccgacggcatgatcgtcgaaatcgaccaactgcttgcggccaaggaaaaggaaatcctgacggtctgatacgcatccgggaacagccgatgtcgaacgccgccgccccagcaactgacggaccggatcgctccggcagtccgttgcatgtggcgatcatcatggacggcaacgggcgctgggccgcgtcgcgcggcctgccgcgcgtcgagggccatcgccgcggcgtcgaggcgttgcgccgtgtggtgcgtgcggccaacgagctcggcatcgtctatctcacgatcttttcgttcagctctgaaaactggtcgcggccggcgagtgagatcggcgatctgttcggtctgctgcggcgcttcatccgcaacgatttggcgacgctgcatcgtgacggcgtgcgggtacgcgtgatcggcgagcgcgacgggctcgatcccgacatctgcgcgctgctcaacgaggccgaggagctgacgcgcaataacgacaagctcaacctcgtggtcgccttcaattacggttcgcgggcagagatcgccgcagcggcacggcgccttgcgcgcgaggtcgccgaaggcaagcgcgacgccaactcgatcgatgccgacacgctcgggcattatctcgatgcacccgacattccggatcctgacctgatcatccgcaccagtggcgaacagcgtctgtcgaacttcctgatgtggcaggccgcctatagcgagctggtgttcgtgccgatacactggcccgatttcgacaaggcggcgctcgaaggcgcgattgcggaatacggcaaacgcgagcgccggttcggcggcctcgccgcgaaaaccggctcgtgaccgaaggcgaagccgcgcctgcggcagcaagcgagcagccgtccacggcagcgaacgagcaggcctcgcgcaacctcgtgatgcgcgtggttgcggcgctggtgctggcgccggttgcgatcgcgctggcctatctgggaggggtcgcctggtcactgctggtgacgctggcggccatcggattgttcgcggaatggcttctggtcaccgggttcggacgcgagctccgcgtcgtgatgccgggcgccgtcgcgctgctgcttatcggactttgcctgatggccggtcgcatcgatgcggccctggacatgctcgtggtcggtgcggtcgccgtcgcgttgacctcgggcgcacggcgcggctgggccattgcgggtttgctttatgcagcagcggccgagatcgcatcggtcgtgctgcggctcgatccggtgaaaggtttcgccgcgctgatgttcgtgttgctggtcgtgtgggtcacggatatcggcggctatttcgcgggccgcggcatcggcgggccgaagctctgggtgcgggtcagcccgaagaagacgtgggcgggcgcggccggcggcttcgttgcgagcctgctggttgcggcctgctttgccgccttcgagatcggcacggctgggtcgctactggcgctcggagccgtgctatcggtggtgtcgcaattcggcgatctcttcgaatccgcggtgaagcgccggttcggggtgaaggattcgagccatatcattcccggccatggcgggctgctggaccgcctggacggatttgttgcggccgtcattgtggcggcgattttcggctttctccgtggtggcgccgatggcgtcggacgcggtcttatggtttggtgatgagatgagcgcagttccgttgcgtaacaacaaggccgtggcggcatcggccgcacggaccgtgaccgtcctcggtgccaccggctcgattggcgacagcacgatggatctgttgcgtggcgcgcgcgaccgttaccgggtcgaggcgctgaccgcgaacagcaacgtcgaggggctggccaagctcgccaaggagttcggcgcgcggttcgctgcgattgccgatccggcgaagctttccgagctcaaggacgcgttggctggaacccggatcgaatgcggggccggggagagcgccatcatcgaggcggccgctcggccggcggattgggtgatggcggcggtcagcggtgcggccggactgaagccggcgcttgccgcggtcgatcgcggcgccaccgtcgcgctcgccaacaaggagtgcctggtctgcgccggggacatcttcatggagcgggccaagaaggccggcgcctgcatcctgccggcggattccgagcacaacgcgctgttccaggcgttggcttcaggcaatcgcgaggagctgacgcgggtcatcatcaccgcgtccggcgggccgttccgcacctgggctcccgccgacatcgagcaggcgacgctggagcaggccctgaagcatccaaactggagcatggggcagaagatcacgatcgattccgcctcgatgatgaacaagggcctcgaggtgatcgaggcgtcgtacttgttcgccctggcgcccgacgagatcgacgtgctggtgcacccgcaatcgatcattcacggcatggtcgagttctcggatcgctcggtggtggctcaactcggcacgcccgacatgcggatcccgatcgcgcattgcctcggctggcctgatcgcgtggtcggcccgtcagccaagctcgatctggccaagatcggacagctcaccttcgaggcgccggacttccagcgcttccccgggctgcggctggcttacgaggcgctgcggctcgggcacggcgcaacgacagtctacaatgccgcgaacgagatcgcggtcgcagcgttcatcgccggcaagatcaagttcggcgcgatcgcccggctggtcgaggcaacgatgaatgattggatcaggtcggggaatcagccaccactgcactcggcggatgatgctatttccgttgaccatatcgcgcgaaataaagctgccgccctattgcctcaaattgccttaaaggcaacctagagggttggggacggagcttgatcgctcttgtcaaggggaagtcggatgcccgagtattttcttcatagtatcaatgcgttgagccatgggctcctcggctatatcgttcccttcctcttcgtcctcaccatcgtcgttttctttcacgagctcggccatttcctggtcgcacgctgggccggcgtgaaggtgctgaccttctcgctgggctttgggccggagcttgcgggattcaacgaccggcacggcacgcgctggaagatttcggcgattccgctcggcggctacgtcaagttcttcggtgacgacagcgaggcgtcgacgccgtcgacggagacgctcaacgccatgacggcggaagagcgtgaaggcagcttccaccacaaatctgtcggcaagcgcaccgcgatcgttgcagccggaccgatcgcaaacttcattctcggcgccctgattttcgcgagcatggcgctgtactacggcaagcccagcacgatcgcccgggttgacggtctggttgccgagagcgttgccgcgaatgccggcttcaaggttggcgacgtcgtcgtggatatcgacggtagcgccatccagagcttcgctgacatgcagcggatcgtagcatcgaacgctggttcagagcttggcttcaaggtcaagcgggacggcgcgatcgtctcgctcaaggcggcgccggcgctgaaggaggtcaaggatcccttcggcaacgctcacaagatcggcgtgctcgggatcgagcacaaggctcaggtcggcgaagcgtccagcgctccggtcggcgtctttgaggccctgaagatcggcgtcgagcaggtctggtacattattgccagcacgttcaagttcctggggtcgctcttcgtcggaaccggcaatccggccgaagtgagcggtgttattggaatcgcgaagctatcgggccaggccgcgagcgccgggttccagttcgtggtcaatctttgcgccatcctgtcggtctcgatcggtctgttgaacctgtttccgatcccgcttctggatggcggacaccttcttttctacagcgcagaggcgctccgtgggcggccgctttcggagcggacgcaggaggtgggtttccgaatcggtctgggtttggttctgatgttgatggtgtttgcgacgtacaacgacatcctcagaatcgccgggtcctgaaacggggcttttctgtggcgttgccgatgggcaacgtcttggtatgaaaatggaaatgttctgctgtagtaagtttgccctcttggcaaagttggctacaagctgagcggcaggttgggaatctgtcgggtcgttggggaacggtccggcattgcgaaagataagggcgcgttgcgcatgatgtttggaatgcgagtgaggggggggctgttcgccgccttggtcatgttcgccgcgccagcggtggccaccttggcggccgttgctgtctctgcgcctgcgcttgcgcagacggtcgattcgatcacggtggaggggaaccgtcgcgtcgaactcgaaaccatccgctcctatttccatcccggaccgggcggtcggctgggccaggcccagatcgacgatggcctgaaggcgctgatcgagaccggcctgttccaggacgtccatatcgatcagcggggcgggcgcctcgtcgtggtcgtggtcgagaacccggtgatcggtcgcgttgccttcgaaggcaacaagaaggtcaaggacgagcagctcaccgccgaagtccagtccaagccgcgcggcaccttctcgcgtccgatggtgcagtccgatgccctacgcatcgccgaaatctaccgccgctccggccgctacgacgtgcgggtcaatccgcagatcatcgagcagccgaataaccgcgtcgacctgatcttcgaggtcaatgaaggcgtgaagaccggtgtgcggtcgatcgaattcatcggcaacagtgcctattcggcgtcccgcctgcgcgacgtcatcaagacccgcgaatcgaatctgcttagcttcctcggcggcaacgacgtctacgaccccgaccgggtcgaggccgaccgtgacctgctgcgccgtttctacctcaagaacggctatgccgacgttcaggtcgtggccgcgctgaccgaatacgatcccgacaagaagggcttcctggttaccttcaagatcgaggagggccagcagtaccgcgttgcgtccgtcaacttcacctcgtcgatcaacacgctcgatccgaacgcgctgcgctcctattcgcgcgtcaatgtcggctcgctctacaacgccgaggcgctggagaagtcggtcgaggaaatgcagatcgaggcgtcccgccgcggctacgccttcgcggtggtccggccgcgcggcgatcgcaatttcgacaatcacacggtgtcgatcaccttcgcgatcgatgaaggtccgcgcacctatatcgagcgcatcaacatccgcggaaacagccgcacgcgcgactacgtgatccgccgcgagttcgatatctccgaaggcgacgcctacaaccgtgcgctggtcgaccgtgccgagcggcggctgaagaacctcgacttcttcaagaccgtgaagatcaccaccgagcccgggtcctccagcgatcgcgtcatcctggtcgtcgaactcgaggagaagtcgaccggcgacttctcggtgtcgggcggctattcgaccaccgacggcgcgctggccgaagtcagcgtctccgagcgcaacctgctcggccgcggcctgttcgcgaaggcgtcggtgacctacggccagtacgcccgcggctactcgctgtcgttcgttgagccctatctgctcgactatcgcgtcgcgctcggcctcgatttctaccagcgccagcagctgtccaacagctacatcgcctacggcaccaagacgctgggcttcagcccgcggctcggcttcagcctgcgggaagacctgtcgctgcagctgcgctactcgatctaccagcaggaaatcacgctgccgtcgacgttgaacaactgtaacaacgtgccgctgctgccggatggaacgccgaatcccgcgttcaatccgacccccgcctatgcgaacctgaacgggatcagcctggtgtcgaccaatgggctgggctgcttctccgatggtgaagcctcgctgccggtccgcaaggagctggcgggtggcaagaccctgacctcggcgctcggctacacgctcaactacaacacgctcgacaacaacaagaacccgaccgacggtctgatcgtcgacttcaagcaggactttgccggcgtcggcggcgacgtcagctacatcaagagcgcgatcgacgcgaagtactacaccccgctggtgtcggacatcgtcggcgtgatccacgcccagggcggtatcctgaacaagctcgggagccaggatctgcgcatgctggatcatttccagatgggcccgaacctggtccgcggcttcgcgccgaacggcatcggtccgcgtgacatcaacccgtacggcacgatggacgccatcggcggcaccaagtactggggcgtgtcggcggaactgcagatgccgttctggttcctgccgaaggaagtcgggctcaagggcgcggtctatgccgacgccggcgggctgtacgactacaagggcccgacctcgtgggcggcgacgggcgaagtcaaccagcccggctgtatcaagccgacgaacaacccgccgtctccgggcacctgccttggtctgagctatgacgacagcaaggtggtccgtacctcggtcggtgtcggtctgatctggcagtcaccgtttggtccgctgcgcttcgactacgcgatcccgctgaccaagggtgcgtatgaccgcgtgcaagaattccggttcggtggcggtacgactttctaacaccgccactcggccggactgcgacggatggaatggcgcagccgatcttcttcaagagtcctccttcgtcatcgctggctgaaattgccgcgctgacgaaggcgcaactggtcgaccccgagaggggcgcgcaacagatcagggggctggcttcgctcgacgaggccggtccgatgcatctcgcgtttttcgacaatctcaaatacgccgatcagcttgccgcgaccaaggccggtgcctgcctggtcagcccgcgcttcgaggcgcaggtaccgaagggcacagcggtgctgcgggccgcaaagccgttccaggtgttcgtcgaactggcccgcgaatggcacgcggatgcgctgcggccgcaatcctggttcaataccgagggcatcgccccgtcggcgatcatcgatcccaccgcgcgtctcgaggacggcgtcatcgtcgatccgctggtcgtgatcggcccacgggtcgagatcggctctggcaccatcatcggcgccggcgcggtgatcggcgccgacgtcaagatcggccgcgactgcaatgtcggcgccaagaccaccattcagttcgcgctgatcggcaacaacgtcttgatccatcccggctgcaatatcggccaggacggctacggcttcatcttctttgggccgaagggccatgtgaaggtgccgcagaccggccgtgtggtgatccagaacaacgtcgaggtcggcgccgcctcgaccatcgaccgcggttccctgcgcgacaccgtgatcggcgagggcaccaaaatcgacaatcaggtccagatcggccacaatgtcaccatcggccggcactgcctgctcgcggcccagatcgggctcgccggcagtctgacgatcggcgacaatgtcgcgctcggcgccaaggtgggcatcaacaaccacctcaagatcggcgacggcgcccaggtgacggcgatgagtgcggtcaaggacgacatcccggccaacggccgctggggcgggcatttcgccaagccgaccaagcagtggttcagggaaattatcgcagtggagcgcctggtgcgcgacaacgaagccaagggcaaggaacaggagtgatggaggaggcaccggtcaaattcgagctggtggatatcaacgatatcctgaagacgctcccgcatcgctttccgatgttgctgatcgaccgcgtgatcaagatccgcaccgactacagcggcatcggcatcaagaatgtcaccttcaacgagccgccgttccagggacatttcccggatcgcccggtgtaccccggcgtcatgatgatcgaggcgatggcgcagaccgccggcgtgatcggcatcaagtcggtcgaaggcaccgagaagccgcgcgcggtgtatttcctcaccatcgacaagtgcaaattcaggaagccggtgctgccgggcgacaccatcgagtatcacatgcgctcgctcggtcgccgcaagacgatgtggtggtttcacggcgacgccaaggtcaacggtcaggtggtcgccgaggctgatgtcggcgcgatgctgacggactaaacttcaggtcgccgccgtcacgacgtcctgcaagcataccggccgtccgcgccggcgatgcgcaggacgcggttgaggaagacgcccatcgacggcgcgatcatcagcgcgtcgtaggtttcagcaggcacgccgcaatagtgctgatacctgcccctgaccgcgaccagcagtgtccgcgcgccggcgctgtagcagacccgctggacgatcgtgctgcgattgatgtcgcagcagtcgaagtgcgagagatcgatggtcgtgctgttgccgaggtcgacggtctccgggccgatcggcgcagagaacaggctgaggatcagcgcggcggcccggaccatggctcggttgcgaccttctcgtttgcaacaggcggtcatgatacgtcactggacagggcggtcaaagtcgcgctaacgaccgcccaaatcgacagcgtagcgctttggcgccattaacgaattccggatcgaaacttcatgagcatgatcgaccccactgcgcggattgcggatggcgctgtgatcggggccggcaccgagatcggtccgtactgcatcatcggccccaacgtcgtgctcggtgagaactgcaagctgatcgcgcatgtcacggtcagtggacataccaggatcggcgccggctgcgtcatctcgccgtttgccgcgctcggcgggccgccgcaggatctcagctatcgcggcgagccgacccgtctcgaagtcggcgaggcctgcacgatccgcgagggcgtgacgatgaacgtcggcacgatcaagggcggcgggctcacccgcgtgggcgatcgcggcttcttcatgaacaacagccatgtcggccacgactgcatggtcggcaacggcgtgatcttcgcaacgtcggcgacgctcggcggtcattgcgagatcggcgacttcgtctatatcggcggcctgtcggcggtgcatcagttcacccgggtcggctcgcaggtgatgatcggcggtgtttgcggcgtgcgcggcgacatcatcccgttcgggctcgccaacggccagtacgcagtgctcgaaggcctcaacatcatcggcatgcgccgccgccagttcaccaaggcgcggctcgcaaccgtgcgtgcgttctatcagaagctgttccacggccccggcatcttcgccgagcggctggcttcggtgcagccgctggcgagcgaggatcccgcgatcgcggaaatcctcaccttcatcgagggcggcaagctgcggccgctctgtcttcccgccggcaccaattgagcaggggatggccgccagcatgacgtcagcggctccctcgctttcctcgccggtcggcgtgatcgccggcggcggtgccatgccgttcgcggtcgccgatcaactcgccgcgcgcggcatcacgccggtgctgtttgcactgcgcggcgcctgcgatccggcacgtgcgcagcggtttcgccaccgctggatctcggtcggtcaactcgggcgggcgacgcggctatttcgtgatgaaggctgccgcgacctgatcttcattggcaccctggtgcgcccggcactgtcggagatcagaatcgactggggcacgctgcgcctgctcggccatgtcgtccgcgcgtttcgcggcggcgacgatcatttgctgtcgagcgtcggccgcatcctcgagcagcaagggttccgcatggtcgggatcaaggatgtcgcgcccgatctcctgatgcccgagggcgccgtgacccgcgtgacacccgacagcgccgcgctcgccgatatcgcgcgaggccgcggcgtgctcgatgcgctcggtccgttcgacatcggccaggccgcggtggtgatcgacggtcacgtggtcgccgtcgaggacatcgagggtaccgacgggctgctggcgcgggtggcgcggctgcgcgccgaggggcggatccgtgccaaggccggccgcggcgtgctggtgaaggcgccgaagagcaagcaggatctgcgcttcgatctgccgaccatcggcccgcggacggtcgagggcgcggcgacggcggggatcgccggcatcgccgtgatcgccggcaacacgctcgccgccgagccgcaggccctgatcgaggccgccgacgccaaggggctgttcgtcatcggactggcgggctgatgcaggcgcgtagtcccagcaccgatcgcaagatcttcctcatcgccaccgaggaatccggcgaccgtctcggcgccgcgctgatgaaggtgctgcgccagcgcctcggcgatagcgtgcagttttccggtgtcggcggccgggcgatgaccgcggagggtatcgctccgctgtttccgatcgaagaactctcgatcgttggcctttccgccgtcgtgaagcaactgccgaaaatcctgcggttgatcagccgcaccgccgacgcggcgctcgccgacgcgcccgatatgctcgtcatcatcgacagccccgacttcacccatcgcgtcgcccgccgggtccgcgcgcgcaatcccgacatcccgatcgtcgactacgtgtcgccgtcggtctgggcctggcggccgggccgggcgcgggcgatgcgcggttatgtcgatcacgtgctggcgctgctgccgttcgaaccggaggagtatcgcaagctgcagggaccgccctgcagttatgtcggtcatcccctgaccgagcagctcgcctcgctgcgcccgaacgaggaggagcagaagcggcgcgacgggcagccaccggttctgctggtcctgcccggaagccggcgcagcgagatcaggcatcatctggcgctgttcggtgctgcgctcggcaagctcaaccggcaaatcccgttcgagctcgtgcttcccaccatgccgcatctcgaggcgatggtgcgcgaaggggtcgcctcgtggccggtggcgccgcggctcgcgatcggcgagatcgagaagcgcgccgcattccgcgtcgcccgtgcggcgctcgcgaagtccggcacggtgacgctggagctcgcgctatcagggattccgatggtgacggcctatcgcgtcggcgccgccgaggcgttcatcctgcgccgcgcgatccgggtgtcgtcggtgatcctcgccaatctcgtcatcggcagcgatatcatccccgagttcctgcaggagaactgcacgccggacaagctcgcggaggcgctggtcgacgtgatcaaggattcgcccgagcgcctgcggcagctcgtcgcgttcgcgacgatggacggcaagatgtcgaccggcgagcagccgccgagcgtccgcgcagccgacatcgtgctggcggaattgggcctgcgttcgagctaaccgaagtcgctcggggcaaacgaaaacggcgccatcgggaatgatggcgccgtctcgatttcgctcaggaacgaagcttacgtgcgcttgtcgatctgcacatagtcgcggcgcgcgacgccggtgtaaagctggcggggacgaccgatcttctgctgcggatcctcgatcatctcgctccactggctgatccagccgacggtgcgggcgaccgcgaacagcacggtgaacatcgagaccgggaagcccatcgccttcagcgtgatgcccgaatagaagtcgacgttcggatagagcttgcgatcgatgaagtagggatcgctgagcgcgatcctctcgagctccatcgcgaccttgagcatcggatcgtcgccgtgcccggtctctttcagcaccgcgtgacacatcttctgcatgatcttggcgcgcgggtcgtagttcttgtagacgcggtggccgaagcccatcaggcggacttcgctgttcttgtccttcaccttggcgatgaagtccggaatgttttcgaccttgccgatgccgtagagcatgttgagcgcggcttcgttggcgccgccatgcgccgggccccacaggcaggcgatgccggccgcgatgcaggcgaacgggttggcgccggaggagccggcgatgcgcaccgtcgaggtcgaggcgttctgctcgtggtcggcgtgcaggatgaagatcttgtcgagtgcgtcggcgagcaccggattgatcttgtagtcctcgcagggcaccgcgaagcacatgttgaggaagttctcggcaaaggacagcgagttcttcggatagatgaagggctggccgatcgtgtacttgtaggccatcgccgccagcgtcggcaccttcgcgatcatccgcatcgaggcgatcatgcgctgccgtggatcgttgatgtcggtggagtcgtgatagaacgcggcgagcgcgccgacggcagccaccatgattgccatcggatgcgcgtcgcggcggaagccctggaagaagcgggccatctgctcatgcaccatcgtgtgatggatcacgcggtggtcgaagtccttcttctgcgccggggtcggcagctccccgtagagcagcaggtagcaggtttcgaggaaatcgccgtgctcggcgagctgctcgatcggatagccgcggtattcgagaacaccggcatcgccatcgatgtaggtgatcttcgactggcagctgccggtcgaggtgaagccggggtcgtaagtgaacaccccggcctggccgtagagcttgccgatgtcgatgacatcgggcccaaccgtgccgctcaggatcgggaaatcgtagttcttgttgccgatggtgagtgtggctgtcttgctggattttgcgtccatcgtgatatccccgatgaattcgttgcgaaaaccgaccatgcccagtcgctaaattgcggcccatggccgggcggaacggcttgtggagaaagcgtcccgggatgggtagctcattgccatgtgcgctgcaagatggaccctggagggggtccatgcaggattacgccgcctgatcgccgagacgggcaagacactcctggcgtcccagcacggccagcacgtcgaagatgccgggcgacgtcgtacgcccggtcagcgccacccgcagcggctgggcgacggcgccgagtttcagattgttctgttcggcgaaattccgcatggcggcctcggtggtttccgccgtccagtcgttcacggcttcgagcgcggtgcgcaggcggccgatcaatgcgcgcgtttccggcgtcagtagcgccacggctttcggatcaagctcaagcggccgatcggcgaaaatgaaataggcgcccgcgatcagctcgagcagcgtcttggcgcgctccttcaggctcggcatcgcccgcagcaattgcgcgcgggtggtgtcgttgagcttggccttcagcgcggcgccctcgggcacataatccagcacactctcgaactgggtcacgagggattgatcgtcgctctgccggatgtagtgaccgttgaggttctccagcttggcgaaatcgaaccgcgccgccgagcggccgatacccgggagatcgaacgcgtcgatcatctcctgggtcgagaagatctcctggtcgccatggctccagccgagtcggaccaggtagttgcgcaaggcggccggcagatagcccagcgcgcgataggcatcgacgccgagcgcgccgtggcgcttcgacagtttcgagccgtcaggaccgtggatcagcggaatgtgggacatgctcggcagctcccactccagcgcgtcgtagatctgcttctggcgcgccgcgttgatcaaatggtcgtcgccgcggatgatgtgggtaacgcccatgtcgtggtcgtcgaccacgaccgcgagcatgtaggtcggggtgccgtcgccgcgcagcaggacgaggtcgtcgagattctcgttctgccagaccacgcggccctggacctgatcctcgatcacggtctcgccggtctgcggcgccttcaggcggatggtcggcttgacgtccgtaggcgcggtggccggatcgcggtcgcgccacatgccgtcatagagccgggtgcggccctcggcgcgcgccgtctcgcgcatcgcggtgagctcctgtggtgtggcgtagcagtaataggcccgcccggcggcgagcagaccctcggcgacctcgcgatggcgggcggcgcggctgaactggtagatgacgtcgccgtcccaatcgagctcgagccatttcaggccgtcgaggatggcgtcgatcgcctccttggtggagcgttcgcggtcggtatcctcgatccggagcagcatcttgccgccgagcttcctggcatagagccagttgaacagcgcggtgcgggcacctccgatgtggaggaagccggtcggtgagggggcgaagcgggtaacgacggaattggtcatgatggtgcagggcgtatgtgtgaacggcggtggtgtatagcaggaaccgaacataactaaaggctcgagcgggcattttggcgggcaaaccgggcttggcccggcggcccgaatttggcagaagatcagccagactcctccagggaaccctttgatgacgactgacacgacggcagaggcagggcgcgacttcatccgcgacatcgtccaggccgatctttcctcccacaagcacaaccggatcgtgacccgctttccgccggagccgaacggctacctgcatatcggccacgccaagtcgatcgcgctgaatttcggcatcgcgcaggagttcggcggccagtgcaatttgcgcttcgacgacaccaatccgaccaaggaggagcaggaatacatcgactcgatccaggccgacgtccattggctcggctacgattggggcaaaaacctcttctatgcgtccgactatttcgagcgtctgtacgattgggccgagggcttgatcaaggcgggttatgcctatgtcgacgaccagtcgcaggaggagatccgcacctcccgcggcacgctgaccgagcccggcaagaactcgccgttccgcgaccgttcggtggaggagaatctcgacctgttccgccgcatgaaggccggcgagtttccgaacggcacccgcgtgctgcgcgccaagatcgacatggcggccggcaacatcaacctgcgcgaccccgtgctctaccgcatcctgcacgcccaccatccgcgcacaggcgacaaatggtcgatctacccgagctacgactacgcgcatggccagtcggacgcgatcgagggcatcacccattcgatctgcacgctggagttcgaggatcaccgtccactctatgagtggctgctcgacaagctgccggtgccgtcgaagccgcgccagtacgagtttgcgcggctgaacctgacctacacgctgctgtccaagcgcgtgctgacccagctggtccgtgacggccacgtctcgggctgggacgatccgaggatgccgaccgtcgccggtctcaagcggcgcggcgtgccgccggccgcggtgcgcgagttcatcaagcgtatcggcgtcgccaaggccaacagcgtggtcgatgtcggcatgctggaattttgcatccgcgaggagctgaaccgcacggcgctgcgccgcatggcggtgctgcggccgctcaaggtcgtgatcgagaactatccggaaggccaggtcgaggagatcgaggcgatcaaccatcccgacaatccggatgccggcacccgcaaggtctccttcggccgcgagctctatatcgaacgcgacgacttcatggagaacccgccgaagaagttcttccgcctctcgcccggcaacgaggtgcggctgcgctatgcctacttcatcaagtgcaccggcgtgatcaaggacgccgccggcgagatcatggagctgcgcgcgacctacgatcccctgaccaagggcggcaacgcgcccgacggccgcaaggtgaaggcgacgatgcactggctgccggcagcacaatcgaagccggccgagatccggatctacaatcagctgttcgcaaacccgagcccgaacgccgccgatttcgctgccgacctcaacccgcagtcgctggaagtgctcagcgatgcccgggtcgagccggcgatcgccgagggcaattcgcccgatccgatgcagtttgagcggcagggctatttcgtgcgcgatgcagattcgacgcaggacaagctcgtattcaaccgcaccatcggcctgcgcgacaccttcgccaaggaagtcggcggcaagagctaggacggtccggcgcggacagcagacggaggggatcgatgagtgaagccaacgagatcgcctccgccgtcatcacgaactggtcggcgggttttggcaagctcgatgcggaggcgcttgccgcgctttattcgaagagcgcgttcttcttcggctcgaacccgacgctctatcgcggccgcgacggcgtcaaagcttattttgacggcttgccacgctggagcgcgccacgcgttcagttcagcgatgtggcggcggagcgcgtgaacgccgatctcgtaaacatggcggggatcgcttcgtttttcctcgacggcgatgcgccgtcgctcgccgtcaagatcacctgggtgatcgcgcgcgaggacggcgactggaagatcgcctgccatcatgtctcgtcgcaggcgtcgctgatctaggcgctcagcagagcccagcggtccgtgccggttcacagccttcggttgcgcgttgcggtttcgttcccgtagtcgggtgactgcggcatccgctagcctgtcgaccggcagggatcgcaagcggaatggcggagcagggtacgaccccgggcggcaaacgcggctacgcgggcacgtggccgccgcgcgccgctgtcccggccggcggttatctgccggtgtccgccagcagctggcggcccttcgtcgagacgctgcggcaatgggcgcgggcggagaccggcgccggtcgcttgttgccgtgggtgccggtggcgttcgggaccggtattgcgttctatttcgcggcagagcacgagccggtgctgtcggtttcggtgatcgtcgcaattgcgctctgcctggtagccgttctgctgcgacggcacaggatcttccccgccatcgtgatgctggctgcggtcgcggcaggctttgcgaccgcgacatggaagacggcgcggatcgcccatggcgtgctggcgcggccgatgttctcggtggcgctgaccggcttcgtcgagacgcgcgacatccgcgagaagaccgaccgtttcgtgctgcgcgtggtctcgatggagagcccgcgcgacaacacgaagttggagcgtgtcaggctttcggtgaagaaaggcaccgcgcccgaggtcggcagtttcgtcgaattgaaggcgcggctgatgccgccgctcgggccccagcgcccgggttcctatgatttcggccgcgacctgtatttccagggtatcggtgcctccggcttcgtgatgggcgcgatcaagacctcggagccgccggcggccggtggcttcgcgctgcgctatgctgcgatcatgcagggcctgcgtgacgccatcgatgcccgcatccgcactacgctcgatggcgatcagcgtgcgatcgccaccgcgctgctcaccggccgccgcgatgcgatcacgacgccggtcaacgacgcgatgttcatttcggggctcggccatgtgctgtcgatctccggctaccacatggctgtcgtcgccggcgtcgtgttcttcacgatccgcgcgttgctggcgctgtttccggcgctgacggcgggacatccgatcaagaagtgggcggcggcggccgcgctcgttgccgcggcgttctatctgctgctgtcgggcgcggaggtcgcgacccagcggtcgttcttcatgacggccgtggtgctgatcgcggtgatcgtcgaccgccgcgccatcaccttccgaacgctggcggtggcggcgctgatcgtgctcgcgatcgcgccggaggcgctggtgcatccgagcttccagatgtcgtttgccgcgacgctggggctggtggcgctggtgcagatcgggctgccgaacctcttggcatcgcccgaccattcggtcaccgcgcgccttgcgctgtggggcgggcgtgagctcatggtgctcacgctggcctcgctggtggcggggctcgcgacgacgccctacgccgcgttccacttccatcgcgtcacgccctacggtctgctcgcgaaccttgcggcgatgccggtggtgtcggccgtcgtgatgccggcgggtctgctcgggctcctcgcgatgccgttcggcttcgacggcgtattctgggcgatcatggggttcggcatcgactggatgatcctggtgacgcaatgggtcgcggcgctcccaggcgccgtcggccggatggcggctttcggcgtcgggccgatgatcgcggcgagcgccggtctgatcctgctcgggctgctgcgcacgccactgcgttggtccggcgcggtgttgctggtggtggcgtcggtctgggcggtgcgggtgccgcagccggacgtgctggtttccgccgatggccgcaacgtcgcggtgcggggcggcgacgggcggctgcatctgatgcacagcgccaaggacgctttcctcgtgaaggagtggctggcggcggatgccgatgcgagggccgccaccgatccgtcgctcggcgagggcgtctcctgcgatcccagcggctgcgtgacgcaagggaccggcggtgccttcgtcgcgctggcgacccggccggaggcattggccgacgattgcgagcgtgccgcgctgatcgtggccacgcggccggccccgcgggactgctccgcttccgtgatcgacaccgagcggctgcggcgtcacggcgccctgatgctgcggcggatcagggacggctacgccatcgaggcggtcaggccgggcgggatcgaccggccgtggtcgccggcggttcccggcgacggtgaaagcgagcccatattgcgcgtgcccgctgcggcgccacggccggccgtcgacgcgacgccgtccgaggtggacgtgcagggcgaggattagcccggaccgggcgacgtgccggagggcagctcgaacaggccgaggtggtactcgtcggagtcggggccgccatcgggcttcttgacgagggtaaacaccgcctcgggaaactgctcccagaccttcaggtcgtcagccgtgaccgtcagccaaccgaaccggaacatgtagcggcccggttccgtgacgcgtccagccttttgccaagtgaccttatcgaccaccgcgcacgtcctccgtgcacgatgatgcgccaacccgtccgccgacgcaaatgccgtccgtcgacacaaatcgccctacgcgccccggaacccgacgtccgggggcgctcgaaatcgcttaggtcatctgccgccgaatggatccttccgcggcgacgatgcgttcaacccaaaaacagcgacgcgaatgcggagggccgccgctccacaaccttcggcttctgttcgatctgcggatgcaatgccggcaattgtagcacactgacgcgctgtccctcgacaagctgagtcaccagcacgtggctgccgtcggggaattcgaccgcgtcgtgatggcgatccggcacgtcgggctcgacttcgttgaacacgccgacgcggaagttcatcgtcttggtccagatccagcggctgtcgtagcgaacgttctcggcgaaagcgagctcggtgcccggcagcatgcagaccgcgacagtgggatcgttctccgaagcaaagccgcgggtcgaggtgccgcggaaagtcgtcgtgatcagcgtctctccgacaatggcggggcgcgatgccacggcgtgcagactgtagtcacacatcggatggctcctcattgaggtagcgacccgtgcctctccatgaggcatagggcctctaccagagtggacgatagcgaacgagtgtctgctcgtttctgggcgattgtacgactgctccgcgaacgcgccgatcacaaacacgcgacgctgcgtgagaggtatcggagcgcatcagccagcctgcacgagaagccgcgcgtgacgctatctttcaaggaacggtccgatgtgccgctcgttcctcgccgccgcaagtatttgcattcagtacttgcggtagaggccgatcagcttgccctggatgcggacccggttcggcggcaggatgcgcacttcataggccgtgttggccggctccagcgcgatcgacgctccgcggcggcggaagcgcttcagggtggcttcctcctcgtcgatcagcgccaccacgatatcgccggtgttggcgacgtcgttgcgctggatcagcgccatgtcgccgtcgaggataccggcatcgaccatcgaatcgccgcgcacttccagcgcatagtgttcgccggcgccgagcatgtcgggcggcacgctgatggtgtggctacgggtctgcagcgcctcgatcggcgtaccggcggcgatccggcccatcacgggcacggcgaccggccggttgccgtcgtcctcggcgatcggcggcgtgctggtgcgcttgccgagggtgccttcgatcacgctcggggtgaagccgcggcggccattgccgccgccggccgacagctcgggcaatttgatgacttcgatggcgcgggcgcggttgggcaagcggcggatgaagccgcgctcctccagcgcagtgatcaggcggtggataccggacttcgagcgcaggtcgagcgcatccttcatctcgtcgaaggagggcggcacgccggcctctttcagacgttcattgatgaaacgcagaagttcgtactgtttgcgcgtgagcatctcgagtattcccccggttgatagcgtcgttcgattccgagactcttcagtggggcctgcacgccgggcctgacctccgaagcacggtgctcattgcaagcactccctcgcggcctcccgattgtagacaccagtactcgaaacaaatcatgaacggacactatatgttcgatatgtgttccgcaaccacttaatttcaggtgaacgtatcgggcaacgcacaacgagcgggccgcgaaagccctcactcgggcagcgtcaggatctcgcattcactgcctttgatggcagcaggcgcaaacggcggacgcacgagaagtgcccgcgccgcagcaagattcccgagcagcgacgagtcctgctgcatgacaggcgttgcgatcagcgtgccgtcatcgttctcctcgagacgtgcgcgcagatagtcctcgcgctgatcattggcggcgaggtcgcggccgagcagggcggtggtgcggacatgatgaatcgttttccggccgctcagcgcccgaatcaacggcaccaggaacaggaaggcgcagacataggatgacaccggattgccgggcaggccgatcacccgcatcgcgcctaaccggccatgcatcatcggcttgccgggccgcatcgcgatccgccagaacgccatcctgacgccctcggcctccagcgactgcttgaccaggtcgtggtcgccgaccgaggcgccgccggtcgtaatcaggatgtcggcttcagtctcgcgcgcccggcggatgccggccgtggtcgcctccaacgtgtcggcggcaaccccgaggtcgacggtctcggcgccttcggcgcgcgccagcgcccgcagcgcatagccgttggagtagacgatctggcccggaccgggcttcgagcccggcatcaccagttcgtcgccggttgccagcaccgcgaccttcgggcggcggtggaccgcgagctccggatagttcatggccgcggcgagcgacagggcgcgatccgacagccggctgccggcggtgagcagcacgtcgccctcgcggaagtcgacgcccgcggcacggatgtgccgtccggtggcagccgcctctgttatcgcgatgtggtcgccgtcgacccttgtgtcctcctggatgatcacggcgtcggcgccgtcggggatgacgccgccggtaaagatccgcaccgcttcgccggctccgaccgtccgctcgaacggccggccggccgcaacttcgccgatcaccttgagccgggccgagagactggccgcatcggctgcacggacggcgtagccgtccatcgccgacatcggcagcggcggctgggtgcgcagcgcggcgaggtcgcgcgccagggtgcggtgataggcggcatcgagcgcgaccatctcctgcggcagcggctcggcgccggcgaggacggcagatagggcatcggcaaccggcatcagggccatgctcggaactccttcattcccaaggttcaaatcccaagcgcttcgaatcccaagcgcttcgaatcccaagcgcctcaaatcccaagcgcctcaaatcccaagcgcctcaaatcccaagtgcggtgagtgccccggccacgtcatccgtcgatgtcacgtggatggcacggaggccgcgcgcccgcgcaccctcgatattggcggccaggtcgtcgaagaacaggatccgcgacgccggcaccccgatggcttttaccacatgatcgtaggcctcggcgtcgggtttgcggaagccgatgctcgacgacaggaagaccgttcggaaatggctgagcagctcggcatggatgaccgagaaatgcgcgacatgagccggattggtgttggagaaggcatagagcggcattcgcttggcggcggccgcgagcaggggagcgatgcccggcatctcgccggtgaagatcgtgttccagccttcgaggaactgggcgtcggtgatgtcgataccgagcgtccggcgcaggtttgcgaagaatgcggcgtcgtcgatccggccgatctcgtgatgcctgaagctgtcgtcgacgacgaagcggctggcgagttcggccggtgcgcagccggcatgctgcgcccagcacgccatcaccttgtcaaagtcgatgtcgagcacgacgcggccgatatcgaacagcagcacgtcgatggaatcgggagagagttgcgaggtcattgcgtgaaaccgtgtacgagaattgcgggcgggcggcaatgtccccgatttgtgctgcaggcatgcgacgttggacagcacggcacttgggatgacaccgactatgttgcccggtctgtctcggcgccgtcacctgctgatccgggccggcaacgcgcaacgccgcccgcattgaaatatgacgggcggcgctggttctagccccaggagggatgacaaaatcctgaccgtacggatacgcatgagaaaggaacagggttcactgctttggccccgtacgattccggtcatccgaaggtgcagagcaaagcgtttctatacggtctaggatggcgcgactgagttgctctggcctcggcgacccccctcgctggggccctttcttgatgccctggcgtcgccatgaaccttcgcaaagcgcgatagctgttagagcgtcgtcgtctatcgccgcacccgtgtgtgggctatcacggccatctgatcaccgcacaggagccgccgatgcgcttccccaccatccttttcgttctcacgctcgccgcgaaccccgtggcggccgaggagctgtcgggcacgctgctgaagatcaaggagaccaggaaggtcacgctcggctttcaggaagcgtccgttcccttcagctatctcgacgacaatgcgcggccgatcggctttgcgctcgatatctgccttcggatcgtcgatgctgtgaagaaggacctcggcatgccggatatcgcggtcgactaccttcccgtcacctcgtcgaaccgcatccccctgatggtcaacggcacgatcgatctgcactgctcggcgactaccaacagtgcggatcgccagaagcaggtgaccttcaccaacacgcacttcctgagcgcgacgcgctttgccgccaagaaatccctcggcatcaacacgatcgacgacctcaaggggaagtcggtcaccgccgttgccggctcggtcaacttggcgcagctcgtcaaggtcaatgctgaccgcaagctcggcatcaacgtcctgccggccaaggaccaggccgaggcgttcctgatgctggagaccgatcgcgcccaggcctatgcgctcgacgacgtccaactcgcggtcgcgatcgcgcgatcgaaggagccggcgctctacatgatcagcgaggaggccttctcgaaggcggagccgttcggcgtcatgctgcgccgggaggacgcgccgttcaaagcgctcgccgaccgcgccaccgcggagctctacaagagcccggagatcgaggtgatgtacaggaagtggctggaagcgccgaccccgccgaaggggatcaactacaacgtgccgatgtcgcctgcgctgcgcaatgcgttcaagaatccgagctcgagctacgatcctgatgtgtacgaggttacgaagtagcagggagtaggatgggtggagcgaagcgatacccatcattcttgccgcggatgagtgatgggtttcgtttcgctcgatgcgacgcggtgcagcctggttctacgcttggccagtgacgcgaccggaatacggatcgtcgcgccaagccaccgatctgtggaacggcttttcgcgtccggtgccaaaaatgaaatagcgtctcatatacatcggcggtttttctcctaaggttgcgggcttgtaactgctgatcaggagcaaagccggtgaccaggccgttttctctctcgcgacgttctgcgctcggcgcgctcgccggaagtctgctcgcgggtggtgttcgcgcggaaaccggggcgggtgcgggcgccgatctcggcggcgtcacgctccgcgtcgcctattacaagggcggctggcggccgctgctgcaggccgccggcgaggacaagacgccgtacaagatcgaatggaaggagctcaacaacggtgtgctccatatcgaggcgttgaacggcgatgcgctcgacgtcggttcgggcagcgagattccggcgatgttcgccgcgcgccagaatgccaaggtgcgtttcatcgctgtcactcacgaggatctcaatatccaggtcacggtggcggcgaaggatgcgccgatccgttcgatcgccgacctcaagggaaagcgcgtcggctatgtgcgcgcgacgacggcacattatttcctcgccaagcagctcgaggaagcaggccttgcgttcagcgatatcgaggccatcaatctgacgccgtcggacggttacacggcgttcgcctccggcaagctcgatgcctgggcgatctacggctacaacgggcagctcgccatcgcgaagcagggcgcgcgcctgctcaagaccggcgtcggctatctctcggggaatttcccgatctatgccaaccccagggcggtcgacgatccgctgcttcacgcggcgttgaccgatttcttgctgcgtatccagcgcgcctatgcgttcgccaacaagaactttccggtctacgccgcggcgcaggtggccgagacgcatctgccgttgcaggacattctcgaccagttcgcccgccgcagcgacgacttctcgctcgccggcgtgacgcctgacgtgccggacacccaccagaaggtcgccgacaccttcctcaagctcggcgtgctcgacgcgcgcgccgacgtcggaaagttctgggatacgagcttcaacgatgccatcgcggccggggcggcgcgactcgcgcggctgtaatggtcgtcgctggaacgtagccaaattgggctagatggtgccgggcggctcccggagaggtgccatcccgtcgactcaagaatccagatcgcgtgaagctccagatatttgtggcctcggcgtgagcgccgcagccgcaggacgtggcgcgtgcctctgcggcaacgatcaaagaactgccaccgaacggcgcacagctgaaaaagttccagggggccacggccggctgcgccgtgctggcattcggaccgaaaaggttgcgggccgcgcggcggccgttccatgatgacgtcgaccgggtcgaacctcgcgcaggtcgcggagatggcgctcggaccgcattctgttgtcaattttgcaaccaattttttctcatgctgattgttgttcggagctgacattgaatcacgacacgttggccaagctcaccgtcaccatcattgtcctggtcgcgctgctggtgtggcgtgttggcgatcagaggaaggcgagtgcgtgcggggcgaactgcccgacggacatgtcggcgaaccggaaactcgcgcgatagggggtcagccgacgcgcgcgcttatttgccgataccgctgccgcatcgcttgtcgcgcctcgcatgggctatcggtcatcacgcggtgcgtatatcgtcggcgatgagcacagagcctgccaggttcagtccggcgcgcgccggctcacgacgccacatgaggaagcgatgtccgagaagctgctgttttcgccgatgaccatccgcggcgtcacgctgaagaaccggatcgtggtgccgccgatgcaccagtattccgccgagaagggctttccgaccgattggcatctgatgaatgccggcaagttcgccgccggcggcgccggcctcgtgatcgtcgaatcgaccaaggtcgagcgccgcggctgcggaacgatcggcgatctcggcatctgggacgacaagttcatcgcgccgctcagccgtctcgccggcttcatcaagcagcagaacgcggtcgccggcatccagctcggccattccggccgcaaggcgcgtgcaagccgcccctgggagggcgatcgtccgctcgaacgcagcgccgagatcgaggattgggatgcctggacgccggtggcgccgagcgcgatcgcccatagcgagcgctggccggtgccgcgggcgctcgggacgcaggaggtgagggatctggttgcggcctgggggcaggcggcacggcgcgcgcacgaggccggcttcgacgtgctcgagttgcacggcgcccacggctatctcgtgcatgaatttctctcggagcgctccaaccagcgcggcgacgagtatggcggctcggaagccaaccggatgcgcttcctgatcgaggtgaccgaggccgtgcgcgcgcactggccggatcacaagccgctgttcgtgcggctgtcggtcgaggacaatgccggctggggtccggcgcagagcgcgcggctggcgaccatcctgaaggccaaaggcgtcgacgtgatcgactgctcgtcgggcggaatcagcgaggtggcgccgattctcggcaaggagatcaaatacaattatcaggtgccgctggcggaatatgtccgcgcccacgccgatatcatgaccatggcggtcggcttgatcatccatggtgaccaggccgagcagatcctgcgggataaacaagcagatttgatcgcggtcggccgggaaatcctcaataaccccaattggccgatggatgcggcgttgaaactcggggttgaggggccatttcgcaatgttcctgcgcagtttggctattggctgggcacgcgggccaagcgcggattcgggacccggccgtcgacctggcaggccgggttgcaggaggctgggccggaggccgaccgggagctgacttgagactgatttggtgctgactaagttgttgatttggcgctgaccagggcatcgtgacaggaccgtaatggtccggtgacgaggcggccttgatccgaccaaaaagccgttgtgtggtgctccgcgtcggggtgaggtgggccgtatgttgcgaaacgttgccggccgctagcgaagggatcacggataatgcgcaaacattttggcttcttcctcgggacggttgcgggagcgtgtctcaccctgctcgtggcctcgccgcagggggcgcatctgttcgccgtcgccaatgccgccgcgcattccgacaacacctattcgcagctcaatctgttcggcgaggtgttcgagaagatcaagaccgactatgtcgagaagcccgaggactccaagctggtcgagggcgcaatcaacggcatgatctcctcgctcgatccgcactcccgctacatgaacgagaagggctgggcggagatgcaggagaccacgcatggcgagttcggcggactcggcatcgaggtcacgatggaagacggcttcgtcaaggtggtggccccgatcgacgacacgccggcctcgcgcgccggcatcatgtcgggcgacgtgatcacctcgatcgacgatgagcagatccagggcctcacgctcgaccaggccgtcaacaagatgaagggcgcgcccaacagctcgatccggctgaagatcgtccgcaaggacgccgacaagccgatcgagctctcgatcacccgcgagatcatccgcgtccgcccggtgaagtatcacgtcgagggcggcgacatcggctatgtcagaatcacatcgttcaacgagcagaccaccgatggcttgcgcaaggcgatcggcgagatccagaaggaggtcccgcaggacaagctcgccggctatgtcgtcgacctccgcaacaatcccggcggcctgctcgaccaggcggtgtcggtgacttcgaccttgatgcagcgcggcgaggtggtctcgacccgcggccgcaatccggaagagacccagcgcttcaccgcccatggcggtgacatgaccaagggcaagccgctcgtcgtgctgatcaatggtggctcggcctcggcctcggagatcgtggccggcgcgctgcacgaccacaagcgcgcgaccctgatcggcacccgctcgttcggcaagggctcggtgcagaccatcattccgctcggcgccggcaatggcgcattggcgctgaccaccgcgcgctatttcacgccatcaggccattcgatccaggcgcttggcatcaagcccgacatcgaggtgctgcaggacgtgccggacgagttcaagacccgctcggaaatcaagggtgaggcgtcgatgcgcggccatctctcggccgagggcgccgagcagaccggctcgcagtcctacgttccgccggatgagaagaacgacaaggcgctggccgcagccttcaaccagctgcgcggcgtcaccgtcaacgccgatgccaagaatgccgacaccaagaccgcgcagaagcggccggtgccgaactagccactacgccgcgccggcgacaggttttcgccggcgcgtcgcggccgcgccggcggcggggccttggcggtgtccggccagcagctcgcggatctgcgcggccggcttcggcgcactgaacagatagccctgcatctccgaacagccgagctcgcgcagcaattgctgctgctgcgcggtctcgacgccttccgccgtcgtggtcatgctgcgctcggccgcgatgttgacgacagcctcgacgatgccggctgagccttgcggatcggcgatgtcggtgacgaagcagcgatcgatcttgatcttgtcgaacgggaagcgcttcagatagctcagcgacgaatagccggtgccgaaatcgtcgagcgcgatccggatgccgatggcgcggagctggtgcattgcggcaagcgccgtctcgtcgtcgcggatcagcaccgcctcggtgatctcgagctccaatcggccggctgacagccccgacgccgcgagcgccgcgatcaccttgagtgccagcgtgccgctgcggaactggatcggcgagacgttgacggcgagcctgatctggtcgggccagttcacggcttccttgcaggccgtcatcagcacccattcgccgagctggttgatcaggccggtctcctcggcgatcggcacgaactcggccggcgagatcatgccgcgcaccggatgccgccagcgcaccagcgcctcgcagccggtgatctcgttgctgcgcaggtcgacgcagggctggtaatacacttcgaggccgctgccggccgcgatggtctgccgcaactccatctcgagctcgcggcgggcgcgggcatcggcgtccatcgccggctcgaagaagcgcgcgacgcgccgaccggccgacttcgccgcatacatcgccaggtcggcgttcttcatgatctggtccagatcggtgccgtcccttggcgccagcgcgatgccgatgctggcgtcggtcgtgacctggtggccgaggcattgatagggcgagcggatcacctcgtagatgcgcgcgaccaggtcggtgacctcgaactcgctcgtcacgccggtctgcacgatcgcgaattcgtcgccgccgagccgcgccacgaagtcgccgtcgccgatcacgccgctcagcgtccgtgcaaccgacttgagcagttcgtcgccgaccatgtggccgagcgagtcgttgacgcccttgaattcatcgatgtcgatatagagcaccgcgagctggctgtccggggtgacatgggccagttcgcgcttgatctcttcgtggaacagcgcccggttcggcaggtcggtgagcgcgtcgtaatgggccagatgcgtaatgcgttcctcggcacggcggcgctcggtgacgtcctcgtgggtcgcaagccagccgccgtcggccagcggctcgttgacgacctggatcgagcggccgtcgggcgtcgcgatcaccatcgtgttgcggacgccgacgtcgcgcagcacgaggttgacgtagcgctcgacgtcgccctggaacgagccggtcaaatggcgatgcacgatgacgtcgcggaagctgcagccgggcttgatgacgtcggccgacagtccgtacatctcgatgtagcgcttgttgcagatcaccagccgctgcgtggcatcgaacagcaacagcccctgcgtcatgttgttgacggcggtgtcgagccgcagcttctccagcgtcaggcgctgctgctgggcgcgatgctgctggatcagcttgcgcaccaccagcgtcagcaggatcgcgatcgccagaacggatgccgcggcgaccgcgatcagcatgccgatctgctcgcgccagttggcgagcgccgcctccgtggtggtcgtggcgaccacgacgatcgggaatttggtcagcgcccgcgacgacagcaggcggtccttgccgtcgaccgggctcgccatccttgtggtgctctgcggcagctcgaacacctgctgttggttggcgggaccgttgcggaaattcttcccgatcatttcctcgacatggggatagcgcgccagcagcgtgccgtcgcgatggtgcatcgagatcgcggcgccttcgccgagcacaacggtagagaagaatttctcgaacgtcgccggctcgatgccgcggccgaccacgccgaggaattcgccgtgcgggccggtcaccttgcggacgatggcggtggtccagtttccgctgacgcggctgaccaccggcgcgaccatcatgtccggcgagtaggggctggatttgaagatgttgaaatagtcgcgatcggcgatcgaagcctgcggcagcggcagggcgcccgagctgttgatcagcgcgccgtcggcgtcgaacacgttgaggctgccgacattggacagcgcgtccatcttggacttcagcatcgcatggatgtcggcggacgacatccggcgcctgtaattctcagccgtcgcgatcccgttgtcgcgcatgaacgcgatcaggtcgcgctgcaccacttcgagatcgtcgagctgctggtcgaaatgccgcgccagcagcagcacggtgttctcgagctcgcgctcgctgttgttcagggcgcgctcgcgaaaattcccggccatcaaggtggcgccgatcgcgatcgcggccatcagcacggcgccgccgaggatcagccagcggatcgggccgctaccgatcaccgaggcgatgttgaacgaggcgctgccgttttgattcatctgtcgctatcgtttccaggcgtttcacccggaagtaggtttcgtgcacctccggcccgcgaaagtcgtagccaaacgaaatggagcgccggttagcgaggttggttaacgaatagttgcctgcgcgagtgggcagcacggcttacggcgttaacgcaactgatttccatccgaccgacgagatgtggaaattgccgtgcatgaagctttacggggtcggcgcgccgtttcgggggtgactgaaatcgggacaaaaagtttcacgaacgaaactgcaaattctgccggtcgcgatccgatgcgacggaatcctttgccgtgtgcgtgatcgccgcaagagtccgtttacgatctaagtccatgacgctgctcgatgtcatcgtcggcacgttgcttgcgtgtcgtcgcgctcagtgcagtgcgtgagagggccatgaagaaactcctgcggaatttttgcgccgacgagaccggagccaccgcgatcgaatacgggctgatcgcgaccggcatcgccatcgccatcatcgctgcggtgaagggtgtcggcaccaagctctcgggcaccttcagttcgatcagcggctcattgaagtagctggagaaccggcgatcacgcgccggcgcgatagtgcccggacttgccgccgatcttctcgatcaggtgaatgccctcgatgcgcacgccgcgctcgaccgccttgatcatgtcgtagatcgtgaggcaggcgacggacaccgcggtcagcgcctccatctcgacgccggtcggcccggtcaccttgacgctggcgcggacgatgcagccgggcagcttgcggtcggttgcgatgtcgatcgtgaccttggtcagcgccagcggatggcagagcggaatcaattccgaggtccgcttggccgccatgatgccggcgatccgcgcggtggccagcacgtcgcccttcttggcctggccggattcgatcagcgccagcgtcgccttgctcatcagaacgcggccttcggcgaccgcggtccgttcggtcgcgggcttcgccgagacgtcgaccatgcgcgcctcgcccttggcatcgatatgggtgagggccgtgccggagcctgacggctcggcctgggcttttgctttggacttccgcgccatcgcgtcagcgcgttgcggtggcgcgcggggcggcctgccgcgtcagcaacgcgcgggtggccgcagtgacgtcctgctggcgcatcaggctctcgccgaccaggaaggttgacatcccgacgcgctcgaggcgggcgagatcctcaggcgtgaagatgccgctctcgccgaccatcaggcgatcgtgcgggatcagcggcgccagcgtctcgctggtcgcgagcgtggtctcgaaggtgcgcagattgcggttgttgacgccgatcatcggcgagcgaagtttcagcgcacggtcgagttcgacgcggtcgtggatctcgatcagcacgtccatgccgtagccgagggcggcatcctcgatctccttggccgccacgtcgtcgagcgcggccatgatgatcaggatgcagtcggcgccatgggcgcgcgcttccgccacctgataggtgtcgaacatgaaatccttgcgcagcaccggcaggttggtcgccgcacgcgccgcgaccatgaagtcgagatggccctggaacgagggcgcatcggtcaagaccgacaggcaggcagcgccgccgacctcgtaggcctttgcgagcgccggcggatcgaagtcggtccggatcagccccttcgagggcgaggccttcttcacttccgcgatcagcgcgtagtcgccgcgtccgtgcttgtccgtgagggcgcggacgaagccgcgcggtgccgcggccgatttcgcctgcgcctcgatatcggcgagcggacgcgcgcgcttggcgacggcgatctcctcgcgcttgtaggcttcgatcttggtcaggatgtcggacatctctgcactctcaaccgttcgaaaccgcaaccagatgcttcagccgcgccgcggccgcgccgctgtcgagcgactgggcgccgatcgcaaccccttccttcaagtccttggcgcggccggccacgatcagcgcggcggcggcgttgagcagggcgacgtcgcgataggcgctcggcttgccctggagcacgctggagagcgcgatcgcgttggcgtcggcatcgccgcccttcagcgcctcgccgccgacgcggccaaggcctgcctcctcgggcgtcacctcgaacgtcccgatctcgccgttctcaaggctcgcgacgaaggtcgggccggtgagggtgatctcgtcgaggccatcggagccgtgcacgacccagaccttgtccgagccgagattcttcagcacctgcgccaacggctgcacccactgccgcgagaacacgccgaccatctgccgcttgacgccggccgggttcgacagcggcccgagcaggttgaagatggtgcgggtggcgagctcgacccgggtcgggccgacattcttcatcgccggatgatgcgagggcgcgaacatgaagccgatgccggcttccgcgacgcagcgtccgacctgggccggcgtcaggtcgagcttgaccccgagcgaggccagcacgtcggcggcgcccgagcgtgacgacagcgcgcggttgccgtgcttggcgacgggcacgccggcgccggccacgatgaaggccgcgcaggtcgagacgttgaccgatccggagccgtcgccgccggtgccgacgatatcgacggcctcggccggcgctttcaccggcagcatcttgccgcgcatcgcggtgacggcgccagtgatctcctcgacggtctcgccgcgcacccgcagcgccatcaacagcccgcccatctgcgagggcgtggcctcgcccgacatcatgctgtcgaaggcggaggccgcttcttcacgcgtcagcgtggcgccggtggcgacttttccgatgatcgatttcaggtcgtccattcgcgggctcagggtctgttgttggagcttgatctgcggacagcgcgccgtcgcgctatccggatcatgctcaattattcgcgcctgtcacctgtgcgaaggctgcctggttgacggtcacgccgatgtcggactcgatcttgctgacatattgcgcgacctgctcgtcgctcagcgagcgccgcagcgcctcggtgagctgcttggccgcgtcggaagcgaagtcgaccggcggcaccgtcacgttggtgacgcggaacacgacccactggctgccgccagcggtcgacgtttgcccgtcgccatccttggcggtgcggaacgctgccgcgatcacgccggccggcgaggcctcgcggttgaagttcgccgatgtctcgaccttgacgccggcagcggccgcctcatcggcaagcttggcgccgctgtcgagcttctgtacgatctcggtcgccttggcgcgcagcttggcggagatctggtcgtcgcgccacttggcctcgacctggtcgcggacctcgtcaagggtgcgctcgcgcgacggcgtgatgccgagcacgtcgtaccagacatagccgttgttgaactggatcgggtcgttgtcgacgccgacgtcgctgttgaaggcctgcgacaccacgtcgaggccgcgcgggatgtttgacgcgacctggccgttcggcaggcgccccgagcgatcgaccgcgtcgatcgtgacggcggtcagtttcagcttctgcgccgcgtcgatcacgctggagccgccgccgcgctcgtcttccatcttgtcgcgcagctcggcgaccttggcgcgggcgcgctcggtcgcgatctcgttcttcacctgtggtgcgaggctctcatagctcggggtcacgccgggctcgatcttgccgaccttgaccagcgcgatgccgaagcggccctggaccggctggctgacttcgcccgcaggcagcgagaaggccgcatcgccgacggccggatcgaggatcgccgacttcgcgaccagtccgaggttgacgtcggccggactgagcttgcgctcgttggcgatgtcgtcgaacgaggtgcctgacgtgatgcgggcgcgggcggcctgcgcctcgccggcgtccggaaacacgatctgtgagacctcgcgcttctccggcgtgctgagccggtccttgcgctcctcgaagatcttcctggcatcctcgtcggacacggtttcccacttgccgatttcctccggcgtgatcgcgacgaaagcgatcttgcggtattcgggcgcacggaactggaccttgtggtcctcgaaataggcggcgagcgcctcgggcgagggcggatcgatggtgccggcctgtgcggcgccgagcgtaacgtaatcgatcgagcgctgctcgttctggaagcgggtcagcgcctcgaccatcgatttgggcggttcgatcccggacgagatggtgcccgcgatctgccggcgcaggccgacgcggcgctgctcggcgatgtagcggccctcggtgtagccgaagttgcggatcacggactggaagcgctgcggatcgaactggccgttgaggcccttgaagttcggatcgttgtagatcgtgcgcagcacctcggcatcggattgattgaggccggtgcggcgcgcttcctcgtccaacgcggcttccgcaagcgtctgctgcagcacctgtcggtcaatcccgaaggcgcgcgcctggtccggcgtcagcggacggccgaactggcggccgagctgctgcaggcggtcggtatagatctggcggaactgctcggccgaaatttcggtcccgcccaccttggcgaaggtcgactggccaaaccccttaaagatgtcggcaatgccccaaattccgaaactgacgatcaaaacgcccatcaccgcggccataatcgtcttgccgagccagtttgatgaggctttccgcattcctcgaagcatgggtccaacttgttttgcaggaggggaaccggatcgtgcccaagtgggaccaaaagtcgggacttcttgtccggcagcagggcgtcaccgaattgaaaaggcttataaagtggccgaagcccccccgcaacctcgggcgcgcgggcgcaagcgtcgcacggcaggcgcgaagccgcgctctggaagtcgccgctcggctctgatagcgcagggggacgcctgaatgatgggaaatccgacatgaccgacgccatccggccgctgatcgccggcaactggaaaatgaacggcctgaaatcctcctttgccgagttcgacgcgatgctggccggcgccggcgatgtcgccgggaaggccgatctgctggtctgtccgcccgcgacattggtcggggcctttgccgacaaggcgcggggctcgaaggtcgccgtcggcgcccaggattgccatccgaaggcatcgggcgcccacaccggggacctctcggcggaaatgttcaaggacctcggcgccacggccatcatcgtcgggcattccgagcggcgcgccgaccatggcgagaccgacgccttgattcggcagaaggcggaggccgtctggcgcgccgggctgaccgcgatcgtctgtatcggcgaaacgcgcgagcagcgcgacgccggccagacgctcgatgtctgcggcacccagctggccggctcgctgcccgacggctcgaccgcggtcaacctggtggtggcctacgagccggtctgggcgatcggcaccgggctgacgccgaccgccggagatgtcgaggaagttcacaggtttatccgaggtcagctcaccgatcgcttcaagggcgagggaaacaagatcaggatcctctatggcggctcggtcaagccgtcgaacgccgccgagctgatggccgtcgccaacgtcaacggcgccctggtcggcggcgccagcctgaaggcatcggactttctggcgatcgctgcgggctgctagcgggacggcgctccacccacgtcattgcgagcgaagcgctgcaatccatttgtggatcgatggattgcttcgtcgcttcgctcctcgcaatgacgcttcgggctacgttgccgcgccgatccgcttccagtagatcaacgtcccggtgaggccgccatgcggtttcagcgcgtagtccgggatcaggccgctgagctgaaatcccattttttcgtagagtggggcggcaccgtcctcttcggcggtgtcaagcaccagcagcgtgcgtccgtgcgcgattgcaagctgctcggcggcgcgcagcaaagccgttgccacgccgcggttgcggtgggtgaggcgtgtcatcatcttggcgatctcggcgcggtgcggctggttcggcggcagcttgagcagcagggttaccgtggcgaccagatcattgccgtcgaatgcgccgagcacgattcgctcgccgcgcgccgcggcgccgagcgaatcctgccagaatgtgtcggcgtcgtccggcgatagcggatgcatgaagcttacggagccgccgctggcgacggtttcgatcaacagctcgctgagcgcatcgcgaatcccgggttcatcggcgagtggcttgatggcgaagtgcggcatgcatcagctccgggcaagggcgaccacataggtgcagccggtgttggtctcgttggcgaaggtcgtttccgccggcgggccgaagccgaagcaatcgccggtcgcgagcagatggcgcgcgccgccttcggtgatgacgaggcttccgctcaagacccagaccagctggcggatatgggcataggacgaggcgggcagggtgacggattgcttcggcggtaactcgacccgcaccagctcgaccggatgatcggggcggctgaacacctggcggcgcagatagccggtttccggatcgcgccagagcggctgcgtcgcggcacgcgacagccgctcaccctggccctcggcgcgcagcatcaggccggccagcgtgaggtcgaaggccgatgcgaggcgcaccagcacgaccgcggtgggactgacctcggcgcgctcgatcttgctgatggtcgccttcgagacgccggcgcgttcggcaagctcggccagcgaccagccccggccatcgcgttcgagcttgatccgcagcgccaggcgttggctcaggtcgtctaccaaagtatccattcgtctattataatggaattggctggtaccgatcaagatgcggcggagtgcgatcggcgtcgcttgtgatgtcagccgatgcgactatctcgggggtgacaatgcccggtccaatcgtgtaacagagcgcgacttcacgaaaaccgcaaagccgatagcgccgtttgtctggccgcttggcggcttatgacggaaggcttgcgatgcagactgtcgttatcattattcatctcatgatcgtcgccgtcatgatcggcgccgtcctgctgcagaaatccgaaggcggtggcctcggcatgggcggcggagccggcttcatgtcgagccgcggcaccgcgaatttgctgacgcggaccaccgcgatcctcgcggtcggcttcttcgtgaccagcctgttcctgtcctggtacgccggctacgaccgcaagccgagctcgatcatcggcaccggcgcaccggcgcagacccagccggccggcggcacgccgctaacgcccccgacctcgggcggcatcctcgattcgctgaagaagaccgacgagcagcagggccagcaggctccgagcggcccgcaggcaccacggtcgcaataaagcggggtggccatgcaggatgcaccgctggcgtcctgcatcaggaatacccatcaatagtctgaaatcgctctcaatttagcataacccacagcccggtggtttgtttgccgggaacagctgattcgttttgcgaatcgcaggaagcggcttaaaggtaaagtcccatggcgcggtacatattcatcaccggcggcgtggtctcctcgctcggcaagggtctggcttcagcggcgctcggcgccttgctgcaggccaggggctacaaggtccgccttcgcaaactcgatccctatctcaacctcgatcccggaacgatgtcgccgtatcagcacggtgaagtgttcgtgaccgacgacggcgccgagaccgatctcgatctcggccattacgagcgtttcaccggtcgcccggccaccaaggccgacaacatcacgaccgggcggatctatcaggacatcatcaccaaggagcgccgcggcgactatctcggcgcgaccatccaggtggtcccgcacgtcaccaacgcgatcaaggaattcgtgcttgatggcaacgacgagtacgacttcgtgctggtcgagatcggcggcaccgtcggcgacatcgaaggcctgccgttcttcgaggcgatccgtcagctcaagaacgagctgccgcgcgatcatgccgtctacattcacctgacacttctgccgtacattccaagcgccggcgaactcaagacaaagccgacgcagcactcggtcaaggagctgcgctcgatcggcatccagccggatatcctgctgtgccgcaccgaccgcgaaatccccaaggaagagcggcgcaagctcggccttttctgcaacgtgcgcgagagcgccgtgatcgaggcccgcgacgtcgacaacatctacgccgtgccggaggcctatcacgccgccgggctcgacgacgaggtgctggccgcgtttggcatcacggcgaagcttccaccggcgttgcagagctggcacgtgatcaatgagcgcgtccgcaatccggaaggcgcggtgaccatcgccatcgtcggcaagtacaccggcatgaaggacgcctacaaatcgctgatcgaggcgctgtcgcatggcggcatcgccaacaaggtgaaggtcaatctcgactggatcgagagcgaggtgttcgagaacgaggacccggcgccgttcctcgagcacgtcaacggcatcctggtgcccggcggcttcggccagcgcggcgccgagggcaagatccgcgcagcgcagttcgcgcgcgagcgcaacgtgccgtatttcggcatctgtttcggcatgcagatggccgtgatcgaggcggcgcgcaatctggtcggcatcgagaacgccaactcgaccgagttcggcccgaccaaggagccgctggtcggcctgatgaccgaatggctgcgcggcaacgagctcgagaagcgctcgcagagcggcgacctcggcggcaccatgcggctcggcgcctatcctgccgcgctcaaccgcggcagccgcgtctcgcgggtctatggcggcgcgaccgaaatctcggagcggcatcgtcaccgctacgaggtcaacaccgcctacaaggaccgcctcgagcagcacggcctgcgtttctccggcatgtcgcccgacggcgtattgcccgagatcgtcgaatacgaggaccatccctggttcatcggcgtccagttccaccccgagctgaagtcgcggccgtttgaaccgcatccgctgttcgcttcgttcatcgaagccgcggcgaagcagagccggctggtctgagacgctataagttttggttgaatcggcttggcgcggtcttgcttcaccgctccccggcggggagaggtcggattgcgcagcaatccgggtgagggctcttgctctctcgatagaccgcaacccctcacccgatttgctgcgcaaatcgacctctcccaagggagaggtgaactttcgacgccgctacagctcaacctcgtctcatcaggctttaggtgtcagctgcgccgtcacacggcggcgcagtcctcgttggcccggcgctcttgcttgatcggtgtcacattggtgccggccgcaggcgctgtgtcacgcgtcaacagcctgtattgcggacgtcgcgtcagccggtagaccgcggcgggtggcacgttgagaagcgcgcgatcgaccagcgtcgcgcgcaggccgagccggtcgaggatcggccgccggatcgggcagcgcatcccataggtgaattgatagaacgcggcgccgggacgcatatagctgaacgcgccgccgacgatcgagatcaccttgcgcggcgacatgttgagcagcggcaatccgctgaccaccgcgccgaccggcgcgccgtcatacagccgttccgacgccagccttgctgcgtccatccacagcacgcgcgcgccgggaaagcgcagctgcagcagccgcatgaaatccgagccgtattcgatcagcgtcaggtcctgctggcgcacgccgcgcttcagcagctgataggtgaaggcgcccgttcccgggccgagctcgagcaccgggccggtgttggcgttgatgtcacgcgtgatcagttcggcgagcgccgcgcctgacggtgcgatggcgccgacgcggccgggggctgccatccacgcggtgaagaaagagagcagatcatgtgccattgggattcccagcaaagtgtcgcagcgccgcgactcgattgcgtggcgcgctgtcttctttgcgggacctgcattgcgtcagcattgcgcaatgttgctggaaagctctcgggcatcacgatgcgtacggtgccggcggcaatgtgaggcggaagcacgcgccgcccctcggtccgtcgagcacggagacgtgaccgccatgcagcctcgcgatctcgcgcaccatgttcagcccgaggccggcgccgcggtcttgcggcgcaagacgatagaacggatcgaatatccgcgtgcgctgatcccggggaatgccgtcgccttcgtccgtcacgtcgatggtcgtggcgctgccgacatggatggtgatggtgccgcgacggccgccatgctggatcgcgttctgcacgagattggtcagcgcgcgctccagcgcggcgcggtcaccgatcgtgtcgacccgatcggccgcgctatcgagcgacaattcgtagccggccgcgatcgccagcggcgcgagatcggcagcgacattgcgcgcgaccgcgacgagatcgacgcgcccgaacggattgcggcactggtcgaagcgctggatgtcgagcagctgctcggccaatgtcgcaagccgcgccgagtcctcgagcagacgggtcttctctggccctgaaggcagcgactccagacgcgtgttgaggatcgcgatcggcgtgcgcaattcatgcgccgcgtccgcgacgaagcgctggtggcgcgaatagccgtcgtcgagccgcgtcagcgcgtcgttgacggcggttaccagcggcgcgacctcgagcggcaggtggtcggccgacagccggctgccgcgctgacggaagtcgatccggcgggcttcgtcagccgcggtctcaaggccggcaaaggcgcgccgcaccaccatcggcgttgcgatgaaggtggcgcatgccatcagcaataggccgggcagggtgctggccaggcacgtcaccgccatcaccaacaacgccttggtgccggtcatccgtccctgcgtcgcggtgagaatctgaacgtttcccgcatccgtattgacccgcttgagccgcgccgcgggcttgcccgggctgtcctccagcatctgatagccgagccgcgcctggctgatatgatcgagggcattgccgatccgcgcgaaatccggcggcacgtcgccttcggtcagcgtgtgcccgtcgcggtcccggacggcgaaccaaagatcgggaaactcggcgcgcagcttgttgagatcgtcggtcgaacgcagcacgagttcgccctgcgcgttgcgcgcgaccgccgcttgcacgacgtcgatgatgcgttcctcgtcccggttgaccagcaggaagccggacgcccacagcgcgccgagcaccgtgagcacgagtcccgtcagcaggacggcttgcagcgcgaccagccgccagctcagttgcgagcgcaagcaatagtggtcggcgggttcgctcatgacacctgcttgagcaggtagccgacgccgcggatgctgtggatctcgacgccggcgtcggtatctgcgagcttgcgccgcagccgcgagacatgggcatcgagcgcgttcgactggatctcgtcctcgaaattgtagacggcttcctcgagcgtcgcgcgcagcacggtgcggccgagccggcgcagcagcgtctcgagcaccagcagctcgcgccggggcaggtcgagcgggcggccgttgacgctggcctcgcggtggctgcaatcgaacgccatccggccggccttgatgatctcgagctgcaggccggcgggccggcgcagcacggcacgcagtcgcgccagaagctcctcgaccgcgaacggtttcgccagatagtcgtcggcgccgctgtcgagcccgctgacgcggtcggcgaggtcgccgcgcgcggtcagcacgatgatcggaacgccgtcggccttggcgcgcagctttgggatcagcgtgaggccgtcgccgtcgggcagctggcggtcgagcaggaccgcgccatgcacgtccgcggaaatcgcctcctcggcctcggcaagggtcggcacgtggtcgaccaccatgtcgtagcccttcagcgcctgcgacagcgcggccgccatctccgcctcgtcttcaaccagcagtatccgcatgtcctctcagtcctgctcccaacagccggttttagggcaagtcacattgcaacaacattgcggaaatggccgccgcgggcgagcaggggtgccatgttggcgccccctcaagacagcccggaacccgctggctataaccgtccgcaccacatctgggaggaccgccaatgatctacgagacccgcgtctatcgctgcctgccgggccggctgccggcactgctcaagcgcttcgagaccgtcacgttgaagctctgggacaagcatggcatcaggcaggctggcttcttcacgacgctggtcggcgaatccaaccaggacctgacctatctgctggcctgggaatcgctcgccgagcgcgagaagaaatggaccgcattccagaccgatccggaatggatcgccgcgcgcgccaagaccgaggaggacggccagatcgttctcaccatcgaaaaccagcttctggtgccgaccgcgttctcatcggtgaagtaacgccgactgccgtcgaagcaatccattggcatcgcatttgcgagcgatggattgccttgtcgcttcagcgcaaaatagcttcgtcacgccgggacgtcgccagttgcgtaagccttgcgggggaggctgcacgatttcggaatactggaaatatatccctgatttgcccgacgggtcaagccaccttgtcgacagctaccttcgaacgccgaaagtcgcctgctcctttgcatggggttgttttcgatattttgacagcgccgctgcggtggcgcgttattgcgggcagcctgaggtctggtcgccttcgcggaccatcggcttgccgttgatgaagacgccgtggctccccgaggtcgccttgccgccgcaatgcgtgcggtcgcccatcaccaccgccggtttgccgttgatcaggacgttgggcacgccctcgaccagcggaccgccattgctggtggtgtcgccgctgcgggcggccggcttgccgttgacgatgacgccggcggcgccgcttgtgacgacgccgggctggctgctggcctggccatgggccaggcccgagatcgccgacatggcggccacggctccgatgacaagcgaaatgcgcatgttctgcctcactgggaatccgttccgcgtcagtctacaggggcggttggggcaggattgtgatagcacggcgcacctacggcgtcagcgcaaccccctcatggtgcgggatggcttgatcgatccggcgcgggattgcatggtcgctaccaaacaggatgcagcattttgaccaatcaggtttccacgcaggccgccgcaccgatcgttgccgtcggatcggccaagttcggcaatgccttgcccctctcgatcatcgccggtccctgccagctcgagagccgcgcacatgcgcttgaagtggcgtccgcgctgaaggagatcgcggcgaggctcaagatcggcctggtctacaagacctcgttcgacaaggcgaaccgcaccagcgcgtcggccgcgcgcggcgtcgggctgaagcaggcgctgccgatcttcgccgagatccggtcctcgctcgggctgcccgtgctgaccgacgtgcatgagcccgaccagtgcaccgaggcggcgcaggcggtcgacgtgctgcagatcccggccttcctgtgccggcagactgatctcctcgtggcagccgccgcgaccggcaaggtcgtcaacgtcaagaagggccaattcctggcgccgtgggacatggcgaatgtggtcagcaagatcaccggcgccgggaatgccaatgtcctggttaccgagcgcggcgcgtcgttcggctacaacacgctggtgtcagacatgcgcgcgctgccgatccttgcgcgcaccaccggcgcgccggtgatcttcgacgccacccattcggtgcagcagccgggtggcaagggcacctcgtcgggcggcgaacgcgaattcgtgccggtgctggcacgcgccgcggtcgcggtcggcgtcgccggcgtgttcatcgagacccatcccgatccggatcacgcgccgtcggacggtccgaacatggtgccgctccgcgacttcgaagccctcgtcaagcggttgatgcagttcgacgcgctggccaagaccgcggcctgacggaggtgacgacgacatgaccgcaaccagcggcatgccgccggccctcaacgtcatcacgctggcgaccttcgcggcgagcctgtcggtacgcgcgctcgatccggtgctgccgcacgtcgcggacgatttcggtgtcggcatcgcaaccgcagcgagctttgccgcggtgttcgccttcaccttcgccgcggtgcagccggcgatcggcgccgccgcggatttgttcggcaaggcgcggctgatgacgatctgcctcgcgctgcttggcgtcgccaacatcctcggtgcgctctcgacctcgttcccgatgctgttcgtcacccgcatcctcgccggcatcggctcgggcggggtgtttccggtcgcgctgtcgctgaccagcgatctcgtcggccccgacaagcggcagctcgcgatcgggcgaacgctcgcgggctcgatgaccggcaatctgctcggcgcgacggcgtccggcctgatcggcgatttgctcggctggcgcggcgtgctcgcggtgctcggcggcctcgtgatcatcgtcgcgctggcggttgcggccggcttccgcggcgctgccctcaatcgcccgccgcgaaccagcctgaaggcgctgcgccacggctatcgcaccatcttcaccaacccgaacgcgcggatctgctactcggcggttttcgtcgaaggctgctgcgtgctcgggctgtttcccttcatcgcatcgttcctgttcgagctcggcgagagctcgctgtcgatcgcgggcatcgtgatcgcgggctttgcgatcggcggcttgctctacacgctgacggtatcgcgcctgctgccgtggatcggggtgagaggcatgatggtcgtcggcgcaacgctggtcggcatccagctcgtcggcgtcgcgttcgggccgcactggaagctgcagatggcgggcctgctggtgatgggcctcggcttttacatgatccacggctgcctgcaggtgtttgccagcgagctttcggtcgaggcgcgcgccaccgcgctgtcgctgcactcgttcttcttcttcatggggcagaccgtcggcccgatcgcctacggttttggtcttcaacatgccggcaagaccgcaacgttagtctcggccgccgcggtgatggtggtgctcggatttatctgcgcgagattcctgaagcagacgcggccggctgatgcggcggcaaggccggatgtggaggcttagcgatcgcctatcaacgtcaagagtcaccagcgatcgtgtaactgtcgagcaatccacccgcgacaaattggtagtccttcatcagtggaccgaccaaatcaggtttggcttccagataatcagctagcgccttcgcgaggtcctggacgcgatcatcgaatgacacgctccgtcgttcaaacgatcggattcggcgaagggcggcgactgctatccttcgacgctgctcgagggattggcccgccaccgaagagccgccatcgtaagcacgtgtcaacgccgctaccaaggcgctcagcacctcgtcttcggccttcttgagcaagccctgcctccctcaaagtgtctagccacgggcgctggagcagacgtgtggtcttaaccccgcccgcgatacgtcgcgacgccctgatccggcacccagatgcccttcggcaatcgtccggtctggaagaacacgtcgatcgggatgccgccgcgcggataccagtagccgccgatgcgcagccatttcggcttgatctcgtccgtgatccgcttgccgatcatgaccgtgcagtcctcgtggaatgcgccatggttgcggaagctcgccgcgaacagtttcagcgatttggattccagcagccagcgaccgggcacgaagtcgatcaccagatgggcgaaatccggttggcccgtcaccgggcagatcgaggtgaattccggcaccgtgaagcgtaccagataatcggtaccagcctgcggattgggcacgcggtcgagctgcgccttttccggcgtgtcgggccattccaccgcgcgaccgagttgcaggccgggggaggtggttgatttggtggatttctttgccatcaggggtctccgtggcgtcctcttatccaatgcgggggcgcccgtcacccggccttttccccctcgatgcattgcgctagaagcaccgccatctgcccccgcactgccacaagaggttctcatgactgacatcgtcgacatcatcggccgcgaaatcctggatagccgcggcaaccccacggtcgaggtcgatgtggtgctggaggacgggtcgatcggccgcgcggcggtgccgtcgggtgcctccaccggcgcccatgaggcggtggaactgcgcgacggcgacaagtcgcgctatctcggcaagggcgtcgagaaggcggttgccgccatcaacggcgagatcttcgaggcactcagcgaccaggccgtcgaggagcaggtcgcgatcgacgagatcatgatcgagctcgacggcacgccgaacaagagccggctcggcgccaacgccatcctcggcgtctcgctggcctgcgccaaggcggccgctgaatccttcgacatgccgctctatcgctacgtcggcggcacctcggcgcggacgctgccggtgccgatgatgaacatcatcaatggcggcgtgcatgccgacaacccgatcgacttccaggaattcatgatcctgccggtcggcgccagcagcttcgccgaagcgctgcgctgcggttcggaaatcttccacaccctgcgcggtgaactgaagaaggccggccacaacaccaatgtcggcgacgagggcggcttcgcgccgaacctgccgtcggccgacgcggcgctcgagttcgtcatgaacgcgatcggcaaggccggctacaaggccggcgacgacgtcgtgctcggcctcgactgcgcctccaccgaattcttcaaggaaggcgcctacgtctatggcggcgagaacaagacccgctcgcgttcggagcaggtgaagtatctcgccgatctggtcggccgctatccgatcgtcaccatcgaggacggcatgtcggaggacgacatggacggctggaaggaactgaccgacgcgatcggcaacaagtgccagctggtcggcgacgatctgttcgtcaccaacgtcacccggcttgccgacggcatcaagcacggccgcgccaattcgatcctggtcaaggtcaaccagatcggcacgctgaccgaaacgctggcggcgatcgagatggcctacaaggccggctacactgccgtgatgtcgcaccgctccggcgagaccgaggactccacgatcgccgacctcgcggtcgccaccaattgcgggcagatcaagaccggctcgctggcgcgctctgaccgcaccgccaagtacaaccagctgctgcgtatcgaacagcaactcggcacccaggcgaaatacgcgggcagggcggccctgaaggcgctggcctgaacctttttcaggacacggcgtccgacgaactcaagcggcgagtatcacgccggtcacgttagtgcttgaagcaggtttcgtcgctcgaaatattcactgccgccggcgagagtcctctggtggcaggagttgttgcgcctcttgtgggttcggggcggagcccatgctcagcctcgaattccttgaccagcctgacgatccgggaattgacggtcacgaagcgatcgtcgccaagctccgcgcatttccggagaaactcctgctccttgttgccctcgacgatcgccttcatcttctcgaggactttctcaatcgcgacgccgaacatcgttcgttgctttgatggtttcgtcgtcgtggacttcttcttcgttgtcttctttgccgtcaccgatgttttcgcccgcgcctttcttgccatagcttgctcctatccatcagttcagggttcgtgatccgagccggtcgatgatgctccggtagatggcgtcgtcgatggcccggttgctccgctcgctcgctgtcgatggacgcgcaggtgccaggcctccaagcaatccgggcgtgggaaccggcgctgccttcggtgcgggcggcagcgacatcgcgacaatgaccttatggatgtcttttcgcatcgacgttgcgccgagcgaggcaccggacacgttgaacagatgattcaagggcgtgagggtcacctgaggcgtcaccgagcccgtgatggtcgtttgaaaattgaacgtgtccgcgatcgtcggaaccttgtcgccatctttcgaaccggtgaggcgttggtactcattgaggtcgacaaacgtctcgaccaactcgccaagaccgatcctgccgctcaccggataggcaaaattctcgggcgacccatcttcggtgcaacggcttggacgaaagttgatcaattcgccgaacgtgtcgttgacacggaatagccggaccgtctggcgttgcagatcgctggatcccttggccggcatgctgaaagtgccgctgctcaacaggttcgcgaaatccacctctgcggcgacagtattttgttcggtgatatcgaacgtaaaatcatagctgatggccgcgcgctcgtacttgacgatgttggcacgcaccctcggaggcaattcatagaggtgctgatcgagttgatcgagggaaagctgattgctttcgagccgctgcatgaagtcggtcaattccgccttcctgagatagtcgatgatcgcttgcttgatcgcggcgcgagcctcgcatcgaatgtgatgaacgatctcgcgcgtggccaaccgggtgacgtcgtcgggcaaaggatggatcgcgcacccagccattcccagcgcgcagcaaagcgggagagcaaatcgcaacatgtgaaacacgctttgatagaaatgatcgataggcatctaatattggttgctatcctaggatcagtttgattgcggagtctgtgatattttggcaactgttcaacaataggttgtgcagggatcgagttgcgagggtgctaaggcggtgccctgaaacttgctgtttgaagcggccgatcgctggacttcattgccggctcggcccatatcggctgggccgtacgctccgcagggagcatgtcgcgccgggcaaaaacgaattccagggagaacgtatgatgagtgacggcaagagcggtctgcagctgcgttcgctgctcaagaaggatggcgaactggaattgtcgctggtcaatgtcccgacccccgagccaggccccgacgaggtcgtggtccgggtcgaggcgagcccgatcaatccgtccgacctcggtctcttgatcggcccggccgacatggccgccgccaaggtctccggcagcaaggaattgcctgtggtgaccgcgcgcgtgccggatgcggcgctgccgggccttgccgcccggctcgacgagtcgatgccggtcggcaatgaaggcgccggcgtcgtcatcaggaccggttcgtcggacgccgcgaaggcgctgatgggccggacggtcgcgatgatcggcggggcgatgtatgcgcaataccgcacgctgcgcgtcaccgaatgcctgccgttgcccgagggcacgacgcccgcggaaggcgcgtcctgcttcgtcaatccgctgaccgcgctcggcatgaccgagacgatgcggcgcgagggccacaaggcgctggtgcacacggcggcagcgtcgaacctcggccagatgctgaaccggatctgcctcaaggacggcatcggcctcgtcaacatcgtgcgcaacaaggagcaggccgatattctgcacaagatcggtgccagacacgtcgtcgattccagcgcgcccgatttcatggacaagcttaccggtgcgctggtcgagaccggcgcgaccatcgccttcgatgcgatcggcggcggcaagctcgccggccagatcctggtcgcgatggagaccgcgatcaacaaatccgccaaggcctacagccgctacggctcgaacacgcacaagcaggtctatatctacggcagcctcgacacccgctcgatcgagctgccgcgcggcttcggcatggcctggggtgtcggcggctggctcttgttcccgttcctgatgaagatcggtccggaggcgggcaactcgctgcgccagcgcgtggtggccgagttgaagaccaccttcgccagtcactacaccaaggtggtgtcgttgcaggaaaccctgcagctcgacaacatcgccgtctacggcaagcgcgccaccggcgagaaattcctgatcaatccgaacaagggcgcgtaaccgcgcggaggctaaagcgcgatgagattaagttgaatcgtcatcgcgcgctttggattcttgtttgagcatgatccttccggaaaaccgcttcgcacttttccggatcatgctagtcgcgctcgaacgccaatgccctggagcgcttgtgacgctccagggcatggccgatcagcacatccatcagtgcggattgcggcaggccgctggcctcccacagccggggatacatgctgatgttggtgaagccgggcagggtgttcgcctcgttcacgaacgcctcctcgccgtgcaggaagaagtcgatgcgcgccatgccttcgcaacccagcacacgaaacgtcttgatcgcgagctccctgatgcgatccgcgacagccggcgggacgtcggcgggcacctgaagcaaggcgccctccgcatcgaggtatttcgcgtcgtaggagtagaagccgtgcttgtcggacggcacgatctcgccgagttgggaggcgcggatgtggccctcggcatcctcgagcacggagcactcgatttcccggatcggcgcaacacagcgttcgatcaggagcttggtatcgaagcggaacgccagtctgcagcctgcctcgaactccgccgcatcgcgcgccttcgacacgccgaccgatgatcccatgttggcaggcttgacgaacagctcctgcgatccgagggcgttgaccgcgtcgtcatagctgacgggagccgcggcggacatcacgacaaagggaacgatcggcaatcccgcctcgcgcagcaggcgcttggcgatatccttgtccatgccggccgccgagcccatcacgcgcgagccgacataggcgacgtcggacagttccagcgccccctgcacggtgccgtcctcgccgttcgggccatgcagcaccgggaagacgacgtcgaacgccggcaattccgccggcgccgcgcccggcccctgcagcaccacgacacggccctggccgcccggcagcagtgcgagctggggcccatgatccggaatggtcagcgcgccgccacccgcgcccgcgccgtttccggcatcggcgacgatccagcggccatcccgggtgatgccgatcgccgtgacctcatagcgatccgggtcgagcgagcgaagcacgttcgccgccgacgcccgcgacacgtcatgttcggcggatcgtccgccgaacaggattgcaacccgtctcttgcgctctgccatttccggtcagcccgatggtgcgtggaatccggcgacagtatggttggaagaacgtgtcgacaattggccccggggccgtgcccggcgcaggtttcggttggaagacgcgctccccgggcaccgtggcaccgtgcgcgcgcttgagccgtggcggctcatggccgtacggtcaattccgtgaacgctgcgtttccggaattggatgatccatgcacttgcatctttcttgatgcgccggtaggtgagataagcgagtttcacgcgaacccgagggggaatttgctatggcctataacatcgtcaccatcgtcggcagcatccgcaaggagagcctgtcgctcaagatcgccaatgcgctggccaagctcgcgcccgcttcgctgcagctcgacgtcacgacgcttcagggcatttccttcttcaaccaggacctcgagggggccccgccggcggactggctcgccttccgcgagaagctgcagaagtcgaacggcgtgctgttcgtgaccccggaatacaaccgctcgatcccgggcgtgctgaagaacgcgatcgacgtcgcctcgcggccctatggcaagagctcgttcatcggcaagccgatcggcatcatcggcaattcgccgggcccgctcggcggcgtcagcgcggtgaagcatctgcagaacatcctgccggggatttccggtccgatcctcggccagccggaagcctatctcaacggcgtcggcgatgctttcgacgacaagggcgagctgaccaaggagtcgctcaagggcgtgctgcagcagtatctcgacgccttcgcggccttcgtcgaaaagcagaaccgctgagcgcatatccggaaaagtgcgcagcgccttgctggtcaagtggccgcgctttagcactccattaaccccatggccgcatctttgcggccatggtctcccgtacacgcctcaaatcgattctgaccgggctcgcgctctacacgctggcggcgctgatggtcggctatttcggcgtcaacgcctacaccggcaaatacggcctgaacgcgcgccaggagctcgatcaggaaatcatcgcgctgacctcggagctcgcgcggttgaagaaggaacgcgccgagggcgagcagcgggtgtcgctgttgcggtcggaccgggtcgatcccgacatgctggacgagcgcgcgcgcttccagctcgactacgccaacccgcgtgatctggttcggatcaacaagtcgaactgacgcgttctcaaatttcaaaaacaatcgcgcactatcacaaaagtgtcgcgccgcgctgcactgcggcatagcaaaattccatcgggcgaacgcaatccttccaaggtgatttgagttgggttagagagggttcttcgacttctctcacccggaattgccatggccgcacccaagaaaagcgtcgcgaaggaatcaggtcaggacaaggctggctctccccccgaattcagcagggagcaggagctcaaggcactgcgggacatgctcctgatccggcgcttcgaggagaaggccggtcagctctacggcatgggcgcgatcggcggcttctgccatctctatatcggccaggaagcggtcgtggtcggcatgcagatggcgctgaagcagggcgacgaggtcataacgggctaccgcgaccacggccacatgctggcctgcgacatggaagccaggggcgtgatggcagaactgaccggacgccgcggcggctattcccgcggcaagggcggctccatgcacatgttcagcaaggagaagcatttctacggcggtcacggaatcgtgggcgcgcaggtgtcgctcggcaccggccttgcgttcgccaaccgctatcgcggcaacgataacgtcagcgtgacctatttcggcgacggcgcggccaatcagggccaggtctacgaaagcttcaacatggccgaactgtggaagctgccggtgatctacgtgatcgagaacaatcgctatgcgatgggcaccgcggtgtcgcgcgcctcggcccagcaggacttctccaagcgcggcgtgtctttcaacatccccggcaagcaggtcgacggcatggacgtacgtgcggtcaaggccgccgccgatgaggccacggcatggtgccgaggcggcaacggtccgatcatcctggagatgcagacctaccgctaccgcggccactcgatgtccgatcccgcgaagtaccgcacccgcgaggaagtcgaaaaggttcgtcacgaccatgacccgatcgagcaggtgcgcaaccgcttgctggcctcaggcgtgagcgagcaggatctgaaggcgatcgacggcgaggtgcgcgagatcgtcaacgaagccgccgacttcgcgcagcacgatccggagccggatgcatccgagctctacaccgacatctaccgctgaccccacccgcgcagaagaatttcaagaccgatttcgggagccgatatgcccattcaagtgctgatgcctgcgctgtcgcccaccatggagaagggcaacctcgccaaatggctgaagaaggaaggcgagaccatcaagtccggtgacgtcatcgccgagatcgagaccgacaaggcgacgatggaggtcgaggccaccgacgagggcacgctcggcaagatcctgattccggaaggcaccgccgatgtcgcggtgaacacgccgatcgccaccatcctggccgatggcgaaagcgccgccgacctcgccaaggtgcccgcggctcctgcgccgaaggctgcggaggcgcctgctgctgaagccaagcgagatgcaaaggcggaagcgccgcagcccgcggcgaaggcgccggctgcaccggtcagcgaagcactgcccgatccggaaatcccggcgggcaccgagatgatcacccagaccatccgcgaggcgttgcgcgatgcgatggccgaggagatgcgccgcgacggcgacgtcttcatcatgggcgaggaggtcgccgagtatcagggcgcctacaaggtgacgcagggcctgttgcaggagttcggcgcgcggcgcgtgatcgacacgccgatcaccgagcacggctttgccggcgtcggcgtcggcgcggcgatggccggactgaagccgatcgtcgagttcatgacctggaacttcgccatgcaggcgatcgaccagatcatcaactccgccgccaagacgctctatatgtccggcggccagatgggctgctcgatcgtgttccgcggaccgaacggcgccgccgcgcgcgttgcggcccagcacagccaggactacgccgcctggtactcgcagatcccgggcctcaaggtgatcgcgccgtactcggccgccgactacaagggcctgctcaaggccgcgatccgcgatcccaatccggtggtcttcctcgagaatgaaatgctgtacggccacaccggcgaggtgccgaagctgcccgacttcgtggtgccgatcggcaaggcgcgcattgcccgcgccggcaaggacgtcaccatcgtctcctgggcgatgggcatgtcctacgcgctgaaggccgccgacgagctcgccaaggaaggcatcgaggccgaggtgatcgatctgcgcaccatccgtccgatggacaccgagaccgtcatcaactcggtgaagaagaccggccgcgcggtcacggtggaggagggctggcagcagagcggtgtcggctccgaggtcgccgcgcgcatcatggagcatgcgttcgactatctcgacgcgccggtcgcgcgtgtctcaggcaaggacgtgccgatgccctacgcggccaatctcgaaaagctcgccctgccttccgtcgccgaggtggtcgcggccgccaaggccgtgtcctaccggtagcgccgatggccggtcccaaggagcagccgctgccgcccgacgtgatgggccgcgacgacgccgtcgaggtgctgcgcgcgtttgtcgtcgacggcgggctgtcgatcgcgttccagcgcgccttcgaggagccggacatgtgggggctgatgctcgtcgacatcgcccgtcacgctgcgcgcgcctattcgcgcgagagcgaatacaccgaggacgaagcgctcgcgcgcatcgtcgagatgttcgaagccgaaatcgcccggccgaccgacatgggccaaaccaaaccgcggtcgcaacaaggtcactgacaatgccgatcaatattctcatgcccgcgctgtcgccgacgatggaaaagggcaacctcgccaagtggctcaagaaagagggcgacaaggtcaagtccggcgacgtgatcgcggagatcgagaccgacaaggcgacgatggaagtcgaggcggtcgatgaaggcacgatcgccaagatcctggtgcccgagggcacccaggacgtgccggtcaacgacgtgatcgctgtcctggccggcgatggcgaggacgtgaaggcggcagccagcgccggagccggcgcagcacctgcgccgaagcccgccgagcccccgaagcctgccgcccaggccgcggctgccgctgcacctgctccgacggcagctccggcgccgtccgcggcgccggtaccacagcccgctgcggcgcccgccgcgcaggccaacggccacgcccgcgtgttctcgtcgccgctggcgcgccgattggcaaaggaagccggcatcgatctcggccgcatcaccggcaccggcccgcacggccgcgtcatcgcgcgcgacgtcgacgacgccaagtccggcaagggcctgaaggcgccggcggccgcgcccgccgcggctggcccgagcatcgcgccgtcaatgtcggacaagcagatcctggcgctgttcgagcccggctcctacgaggtcgtgccgcatgacggcatgcgccgcaccatcgcgcagcgtctcaccgcctcggtgcagaacgtcccgcacttctacctgaccatcgactgcgacatcggcaagctgctcgccgcgcgcgaggagatcaacgcggctgcgccgaaggacaaggagaagaagccgctctacaagatctcggtcaacgatttcgtcatcaaggcgatggcggtcgcgctgcagaagatcccgaactgcaacgtcagctggaccgaaggcggcatgctcaagcacaagcattccgacgtcggcgtcgcggtggcgatgccgggcggcctgatcacgccgatcatccgcaaggccgagaccaagacgctgtcgaccatctccaacgagatgaaggatttcgccgcccgcgcccgcgcccgcaagctgaagccggaagaataccagggcggcaccaccgcggtgtccaacctcggcatgtacggcatcaaccacttcaccgccgtgatcaacccgccgcacgcttcgatcctcgcggtcggcacctcggaggagcgtcccgtcgtgcgtggcggcaagatcgagatcgcgaacatcatgagcgtcaccttgtcgtgcgatcaccgcgcgatcgacggcgcgctcggcgccgagctgatcggcgccttcaagcagctgatcgaaaaccccgtgatgatgatggtgtgacgggcatcagccatgtacgcgatgtcaggtccgtacgttctgctcgccgccatcgccgttgcgctgctcgtcgcggtcaaccgcgacctgatatcgacgttccagttcaggctcatgatgatcggtgctggcgtgctggcgctggcgtggaccatattcctcggtacggtgtggcaggagtaccgatgaatggccggcacggcccgcacgcgctggccctggatctcgctgctgctgtcggctgtgctggtgctcaacccggtcgggttggatctggtgcactccgcgttcttcgccggcgaacagctggcgcggaacatcgcccagccgatcgtgccgacggccctggccatcatggccgtggtaatcgggttcgaatggctggtcaggtcattgatcgcaagaagccgcgcccgcggcgccacagattgagttgaacgggagccgccatggccgacacatccttcgacgtcatcatcatcggctccggccccggcggctacgtgaccgcgatccgcgccgcgcagctcgggttcaagaccgcgatcgtggagaaatcctatctcggcggcatctgcctgaactggggctgcatcccgaccaaggcgctgctgcgctcggcggagatctaccactacatgcagcacgccaaggattacggactgtcggcggacaatgtcggcttcgatccgaaggccgtggtgcagcgttcgcgcggtgtctcgaagcgcctcaatgacggtgtcggcttcctgatgaagaagaacaaggtcacggtgatctggggcgacgccacgatcgacgcacccggcaagatcaccgtgaagaagtccgcggtcgaggcgccgaagggcgccagcggcgagggcagctaccaggccaagcacatcatcgtcgcgaccggcgcgcggccgcgcgtgctgcccgggctcgagcccgacaagaaactgatctggacctatttcgaggcgatggtgccggagcggatgccgaaatcgctgctggtggtgggctcgggcgcgatcggcatcgaattcgcctcgttcttccacaccatgggcgccgacgtcaccgtggtcgaggtgctgccgcagattctcccggtcgaggatgctgagatcgccggcctggcgcgtaagcgcttcgagaagatgggcatcaagatcatgtcctcgaccaaggtgaccaagctcgagaagaaggccgacagcgtggtcgcgaccatcgacgacggcaagggccagccgcagaccaaggaattcgagcgcgtgatctcggcggtcggcgtggtcggcaatatcgagaatctcgggctggagaagctcggggtgaaaaccgaccgcggctgcatcgtgatcgacggctacggcaagaccaatatccccggcatctacgcgatcggcgacgtcgcgggtccgccgatgctggcgcacaaggccgagcatgagggcgtggtctgcatcgaggcgatcaagggcctgcatccgcatccgatggacaagctgctgatcccgggctgcacctactgcaacccgcaggtcgcctcagttggcctgacggaagccaaggccaaggaaggcggccgcgagatccgcgtcggccgattcccgttcgtcggcaacggcaaggcgattgcgctcggcgaggaccagggcctcgtcaaggtggtgttcgacaagaagaccgggcagctgctcggcgcgcatatgatcggcgccgaggtcacggagctgatccagggctatgtcgtggcgatgaacctggagaccaccgaagaggagttgatgcacaccgtattcccgcatccgaccttgtcggaaatgatgaaggaagcggtgctcgacgcctacgggcgcgtgctgaacatctgaggccgcggacggcggccgcggtcccgtcatccccgcgcaaaggcttcgcctttgtcgctggaggagcgcggagcgcgtctcgaaggatgtacggcccggatcgatcggcgggccgttcgcccttcgagacggccgcttcgcggcctcctccgggtgacgggtctggcagggacgaattcatcaagagcaagaaagagcgcacctcgtgaaagacaacgacaacctcaccatcgaacgcccgaccttcgtgacccatctcgaatgcgcgatggagggcgatcattatgcagccgaccaggtgcacaatctctccaaggccggtaagccgctcttggtgcgctacgatctggccggggtgaagaaggcgctcacgaaagaagcgctggccgagcgaccggccgacctgtggcgctatcgcgagctgctgccggtgcgcaagtgccaggacatcgtcagcctcggcgaagtcacgacgccgctgatccggttgccgaagctttcagcgcgacttggcggcggcgagatcatcgtcaaggacgaggggcggctgccgaccggctcgttcaaggcgcgcggtctcgtgatggcggtgtcgatgggcaaggcgctcggcatcaagcacatggcgatgccgaccaacggcaatgccggcgcggcgctcgccgcctacgcgacctcctgcggcatcaagaccacgatcttctgcccggcggatacgccggaggtgaatgtcagcgagatcgagctgcagggcgccaccgtctaccgcgtcaacggctatatcgacgattgcggcaagatcgtcggcgagggcaaggccaaggtcggctggttcgatacctcgaccctgaaggagccgtaccggatcgagggcaagaagacgatgggcctcgagctcgccgagcagctcggctgggacgtgcccgacgtgatcttctatccgaccggtggcggcaccgggctgatcgggatgtggaaggcgttcgacgagctcgagaggatcggcttcatcggctcgaagcgtccgcgcgtggtcgcggtgcaggcctccggctgcgcgccgatggtgcgggcctatgaggccggcaccgagcatgcggcacgctgggaggacgcccacaccatcgcctcgggcatccgcgtgccgcaggcgatcggcgacttcctcatcctgcgcgcggtgcgcgagagcaaggggtttgcgatcgcggtcgatgacgacaagatcagcaacgcgctcaacgaggtcgcccgcgaggagggcctcctgttgtgccccgagggtgctgcgacctatgctgcctacaagcagagccttgccgacggccgcgtcacgaagaccgaccgcgtgatgctgttcaattgcgccagcggcctgaaatacccgctgccgccggtgacccgcgcgctcgaccggcacaagccgatcgacttctcgcagttctaacctgttgttgcagtcgtcattgcgagcgcagcgaagcaatccatctcaccgcctgctggaccacggattgcttcgtcgcttcgctcctcgcaatgacggtgtcatttgatggagtgaacgatgcgtcgaatcctgttggctgttttggccgcgtttgtgacgctggtcggccctgcacacgcggaaacctggcccgcgcacccgatcaccatcgtggtgccgttcgctgccggcggtccgtcggatgccatggcgcgcattctcgccgagcggatgaagcagtcgctaggtgaggtggtcctgatcgagaacgtgaccggagcgggcggttcgctcggcgtcggccgcgcggtgcgcgcggcgccggacggctacaccgtctcgttcggccatctcgggacccacgtcgcaaacggcgcgatctacaagctcggctacgacctcgtcgatgatctcgaaccggtcgtgctgctgccgagcaacccgatgatcatcgtcagcaagaacaccgtgccggcgaagtcgctgaaggagctgctggcgtggctacagtcgctgccggcgccgccgaccgcgggcaccgccggcgccggcagcggcagccatatcgccggggtctatttcgagaacgtctccggcatcaagctgcaatacgtgccgtatcgcggcaccgggcccgcgctgaacgacctcgtcgccggccagatcgatatcatcatcgatcagacctcgaactcgatcaatcaggtccgcgccggcaacatccgcgcctatgccgtcaccgattccaagcgggtcgcgaatgcgccggaggtgccgacggtcgacgaggccggcctgccaggcttccacatgacgctgtggtccggcctctgggtaccgaagggcacgccgaaggagatcgtggccaggctcaacaccgctgcgatccaggcgctgcgtgatcccgccgtgaagaagcagctcgagaatctcggcctgcagatgccgccgcaggaccagctgaagccggaggcacttggtgcctggcagaaggcggaaatcgcaaagtggtggccgatgatcaaggcggcgaatgtgaaggtggagtgaagacgcaacgtcgtgccggccttcgccgggacgacagcatctactgcgacgggattgctgcacccgccggcgccgcgttggtctcctgcgtcacgacgcgctcgccgctctttgccgcgatcgccgtgccggcgtcctcgaagcgcgcccgatagaccacgaaattctccatcacgcgctgcacgtagttgcgcgtttccgagatcggaatccgctcgacccagtcgaccggatcgaccttgggatcgcgcggatcgccataggccttgatccaatcgcggacgcggccgcggccagcgttgtagccggcaaatgtcatgatatggcagccgcgatactccgccagcagcgcgctcaattcggccgcgcccatctgggtgttgtagaccggatcggacaccatcctgctccagtcgtagctgacgccgaagcgcttggcggtgtcgcggccggcttcgggcgtcacctgcatcaggccgacggcgttggccgccgacttgtcgcgctgatcgaacgcgctttcggtgcgcgcgatcgagtaggtcatgctgcgtccgatatcgggcgcgatcgggctgtgcctgggaatgccgatgaccgggaaggcgtaatggtcgaaggcaaagccccgcgcgagcgcgatcttgccgatctgcagcatggcgcgggcatcgttgcggcggccggtgagctcgccgagtgcctcgagcatgccgacgtcagggctctcttcggcaaggtcggcggcgaaatagagcacgatgtcgggctcgccgatcgtatagagcatatcggcggcgcgaacccgttcgtccgcggccatgctgtcggcgttcgcagcgggcgagggcgcgtgcagctcgacgccgtcgcggccgagcctggccagcgcgagctgcccgtaataggcggtcgggtagcgcgcggcggcctggtagccggcgcgcatcgccacggagttgccgagtgcctcggcggcgcggccgcgccaataggcggcgcgcgccagcacggtcgggttggtctggccctcgtcgatgtgagcgaaatgcgccgccgcggtcttggcatcatcgagacagcgcagcgcgatccagccgcgcatgaagtgcatgtcggagcgataataaggattgtccggcgccgcagcgccccggatcacgtcgtaggccgcctggtactcgccctggtcgagcagcttgcgggagaggatgcggcgctcgcgccaccattggtcggtgtcctgctgcgccatcgtctcgggcgcggccgcaatcgtcacgcgcgccgcatcatcgatcctgttcttcgcgagcagccattggatgcggcagagcgtgtagccgaggtcgctgcgggcatcggccggcacgtcgttcagcatgtcctctgccttgctggattggccgcggaccgcgctgcaagccttcacgatcgcgagctcgtcgctgccgaggtgctgcgccgcgcgccgcgcggcggcgagatccttggcgccgatccgcttgtccatgcgcgcgcgatggtcatcgcgcgtcagcagatccttgaacgcgtcgtaggcgtcgctctcggtccggtccagcaattcgtccgagcgccaggcctcgcgcaccagccgcgcggcgccgtcgcggtcgccctcagtgagcagcgtacgggcgagcgcgaacttgcccttggcgctgatcggttgatcgagggtgaagccgtgcaccgtggccggatcgctgcgctcctgccacatccgcgcttcagcccgcttgcgcagcagcgtgacgcttggccaatccgggttggccgcgacgaatgccgcatagcggctgaacggcgcattcgactccgaatggcgcagcaggtaccactcgacgagcttccgcccgaccgggtcggcaatcttggcctggatatcggtcgcgtcgctggtcttgcccttgcgcgccgccgcgatcgcatccctgaccgcggcgagatcgcccgacaattgcggcccggcagatttctcaggctcgggcgccttggtggtctcgaccgatttggacggagctgatttggccttggcggatttgcgtctatcggcgccgtgcctggcgtgccggcgcttgccggaggcgttctctcgcacggccttggcgttggtcctggtgttggtcttggtgttggtcttggcgccatgcgccttgttgtcaccgtggccgctcttggcctgatgctggtgatgcggcttggcggtcgcctggatcggaagcagcgcgagcgcagcgacggtggcgaaacacgccagcggacgtaggcaccggttcattctctggtcccccctgagaaaccacgaggcacaaacagaacgcgtcatacggcggcacaaccgccgcaggttatcactaccctcgattctcgagtgttaatgcggccgcaactcaacagggaaaacgcggcgaaatatggaatatggcctgtggaatccgcgggaaccggggttttgcgggcaaaaatagcggcatatgcaccgcgttttgaccgattcccgccgagatgtatcttcggtgcaaccgcgctgtgggggaaccgatgtcgtcgacagatcagtttttgccggcccggacaccatgacggctcgcctcagaaccgtcctggacggtggccgctattttgaaggtccgcgctggcatcgtgggcggctctggttcgtcgactgcatggcgcggacgctgctcagcatcagcccgtcgggcgagcggcaggagcatgctgcggtgaccgacgacacgccctgcggtctcggcgtgctgcctgacggcgatatcgtcgtgctgacgatgttcaggaagcggctgctgcgttttgccgacggcgcgctgtcgctgtatgccgacctctcggcggtcgcgagcggcacgatcgacgacatgattgtcgacgggcaggggcgggcctatgtcggcgacctcggcttcaatctgccgccgccggaggggcgcggcgcggtcggccggatcatcctggtgatgcccgacggcagcgcccgcgtcgtcgccgacggcttgcggtttcccaacggcatcgcggtgtcctccgaccatcgccggctcgtcgtcgcggaaatggatggcgcaggtctcgccgactacgacatcgcgccggacggcgggttgagcctccgcgggcggttcggtcgcctcaacgatcccgacggcatctgcctcgatcgtgatggagcggtctgggccgcctcgttcacggaagacgcttttgtccggatagatcgcgacggcgtggagcttgagcgcatcgcggtcccgggccgccgcgcagtcgcctgcgcactcggcggcaccgatcgcaggacattgttctgcttgagcgcggagacatcctacgaggagctgcggaagggcaaatcggtgccgcggatcgatgttgccgaggtcggcacgccgggcgacggctttccctaagcaaaagcggactgaccttgggtcttgaccttgggggtcttgaaatttgttcccgtttcgttcatattgcggcgcttcgggagcacgccgccatggacgccgaacgagaccgcgaaatcatcaggctctggaacgagctccgccggctgcagcgcgcaggacttccgactgcgtcgatcgtccggcggatcgagcaggcgctggccgcacgggagcaggaggcggcctgacccgcctctaaagcgcgatgagatcaggttgaatcgtcatcgcgccttggattcttgtctaagcatgatcttttcggaaaaccgcttcgcacttttccggatcatgctttagcgcccgccgtcgggccccatcaccaggttcggcagccaggtcgatatctccgggaagaagcagagcaggagcaccgcgaacatcatcagcagcacgaacggcagcgtgccccagatgacttcgctgaggggaatgtccggcgcgacgttgcggatcacgaagatgttgaggccgaccggcgggtgaatcaggcccatctccatcacgatggtcatgacgacgccgaaccagatgatgtcgaattcggcggcccggagcggcggcaggatgatcggcgcggtcatcaggatgatcgagaccggcggcaggaagaagccgagcacgatcaccatcacgaggatcgcaaacagcagttcccagcgcggcagatgcatcgcgacgatcgcttccgccgccgattgcgagatgtgcagatagctcatcacgtaggaatagagcagcgacatgccgatgatcagcatcagcatggtggattcgcggatggtcgatttcaggatcggcgacaggtcgctgggtttccacacgctgtagatcacggcgaccagcgcgagcgccaggaggccgccgagccctgcggtttccgacggcgtggcgtagccgccatagagcgcgatcatcacaccggtcagcagcagcacgaacggaatcacccgcggcagcgcgctgaagcgctcggccatggtgaactcgtcgtgctgcaggatcgcggcgtccttgccggtcgcgtcataagcggccttggccatggcgtattccttgcggaagcggaacacggcgtagaggccgaacaacgacaccagcagcagtcccgggccgatgccggcgaggaacagccgcccgagcgatttctcggccgcgacggcgaacaggatcatcgtgatcgagggcggcagcaggatgccgagcgtgccgccggcggcgatgatccccgcggcaaagccgccggaatagccgcgcttgcgcatctcgggaatgccggccgagccgatcgccgaacaggtcgcgggcgacgacccggccatcgccgcgaacagcgcgcaggcgaacacgttagcgacgccgaggccgccgggcacgcggtgcagccaggcgtgcagcgccgagtagaggtcctggccggcgcgcgatttgccgatcgccgcacccttcaggatgaacagcgggatcgacagcagcgtgatcgaagccatttcctcgtagacgttctgcgtcaccgtatcgagcgaggccgccggcatgtagatcgccatgaacacgaccgcgaccgcaccgagcgcgaatgcgatcggcatgccggagaacatcgcaaacagggtggcaagcccgtaggagatgccaataccaaacacggtcatcggcgcgcgccaccggtcagcggaatgaggatttgcaggaggagctgcacgcagagcagggtcatgccgagcgccatcaggccataggggatcgcaagcggcggcgaccacatcgagttggacacctggccgtcgacataggcctcgtgcgccagcgtccaggatttccaggcgaagaaagtgcagaatgcgaagctcgcgacatcgacgagccacagcctgatgctgttggcgcgggtcgagagcaggccgacgaacgcctcgatgctgacgtgaccacgctggctctgcacataggccgaggtcatgaaggtggcgccgaccaacaggaacaccgcagcctcgtcctgccagtagttcgggctgtggaacagggcgcggccgagcacgctgtagctcaggatcacgcaggccgcgatcagggccagcgcggcgaacaccacgatgatgttgttgcagacggacagcgcgcgcccgagcagcgccacgggtgtgttgcccgcggcgccgctcgaggtttcggcctgatccgcgatcggaccatgcatcatgcggcgacgtcgcttgcgagcttcagcaggttggctgcggtcgccgtcttggcgccatagtccttccaggccgtgtcgcgcgcgatgtcgcgccacttgccgacaatggcggcgtcgagcgcgctgaccttggcgccggccttctcatagaccttggccacctcggcatcgtcgtcctgcgcgcccttgcggccgaaagcctcgagttcggcgccgacggcgaggatgatgtcctgctggttcttcggcagcttgtcgaagatcgccttcgacatcatcagcggctccagcatgaaccagtaggaggcgcccgcgcccgaggtcagcgacttcgcgacctcctcgaggcggaacgagatcaggctggtggaggaggtgatgccggcatcgcaggcgccggtctgcatcgcggcgtagatctcgttcgagggcaccgacagcaccgcggcaccggcggtctgcagcaccatgtccatctcgcgcgagccgccgcgcaccttcatgcccttggcgtcctcgggcgccacgatcggcttggagcggctggcgacgccgccggcctgccagacccaggagatcaagaggatgcccttgtcggcgaggaagtcggagagcgccttgccgaccggctccttcttccagcgcaggccctggtcgtaggtggtgacgaggcccggcatcaggccgatattggtctccggcaattcgccgccggcataaggcatcggatacaggctgagatcgagcgcgcccttgcgcatcgccgagaactgcgcgttggtcttgatcagcgaggagttcggatagacctcggcggtgaggtcgccgcccgagcgcttggcaacctcggccgcgaacatccggcacagccggtcgcggaagtcgcccttgtcgatcgtgccgccgggaaattggtgcgagatcttcagcgtggtcgcggcctgcgcggtcccgacgcccatccgtacgactgcgggcgcggcgagggcggaagcgagaacgtggcggcgtgtgagcatgggttctttccctgaagggcttcttgagtggctgttagaccggcgcggagttgcagcttagccggtcttcgcgtgggttttctctcatctgatagttcgaggcgccctgatagtgcgagccgatacgcggccgcaagcgttgccgttgctgcggcgcacactgcgcgccgacccggcgcgtgcgcgcgggacgcttcaagaatttgttattggaggtaacaacgggcggcgcaagtgcgtcgaggagagagcggcaagtcgtcgcgctcacactggatcatacaagggatcatcatcatgaccaccaagacccgcctcggcctctccgcagctttgctctcgttcagcctggcgctcgcgcccgctgccttcgctcaggacaagatgggccacgacgatgcgatgaagaaggaaggcgcgatgtccaaggatgccatgtccaaggacgccatgaagaaggacgatggcatgaagaaggacgacgccatgaagaaggacggcggcgcgatgatgaagaaggacgacggcatgaagaagaactgattgccgcgatcgatcaccgcccgcaggcccgccgtcgtggcgggcctgacgacggtggctagcgcttcttcttgccgcgctccttgcgcgccgcgtagcgggcgtcgcgcttggccttctgctcggcctcgagcgcagccagtcttgcgacttcctcttccttctcccgcgcgattcgggcggcctcggctgcggcggtttcttcctcgcggcgcttccgttcggccttctcgatttcacgggcttccttggccttggcgcggcgttcggcaatcgccgcgcgctcctcggcccgtgccttcacggtcggatcgtcagcgcctggctgggtacgaaacttgttgaggaggttttgccgcgcctgcagggccgctttctggcggtcggcaaaacccggttccttgaagccactcatagaggaagcccgctgctttctgttcgttgatggatggggttcggttcggcgttcaataagtgaatggcggcgaaaaggccagtggcgaacgaggggctgtggagcaaaggagatatgagcgcacagcaaatggcggtggttgcctacgcctggaggtcggcgtggtgagtggttggtcaccgaatccggcgacagcccggccctgtcgcaacgtctagccgcgctcagactgctcccgccatccgttgcccaggacgtcattgccggagaccttggtgcccaaaaccttggcgaccgtctcggcggtcatcgcgctccggtcggaagcgcgctgggcttcgagcctgtcgcgcgccttttcggtgatcaggaggctgatcaggcgcagcctgctggtctcgtcgacagcttccgacagtagttgcctgtaacgctgataatcgtagctcacttgctgttcgctcatcggcacgccccgcacacgcgctccacctgcgcgagcagtgtttcgcgagtctgaagcgcccgcaatggaattgcaggggcagacggctgccggcgcgcatttcgttgtgcgactgttgcagaattgatcgcacgcaaccgtgcaaacggtcatgatgcggggcaatcgcaacgggaacccaagcgggcatgagcgaatccgaagacggaggcaaccgccgtggtgcgttgatcggattgctggtcgcggtggtcatgctcgcggtcggtctctggctcgcgcacgacctgacggcggcgagcaagatgcaggattgtgtgatgtcgggccgatccaactgtaatgtgatcgagccggcacgctgaccctgccttgcggcagtgcaatatcgctcccacatcagaccgtaagagtcgggctgaactgtttggtcccggttgtgattccggtcacacgcggacaagtgagctgcctgatcaatccccagagatcggcgggaaccaaggccatgatgtcaaagctgtggtccggaaagggcgcggcgctggctgtcgcaggcgcggcgggtgccgttttggtagcgtatgtgtccctcacgctggcatcgcccgaacaggtgtccagcgcgggcctcggccccggatggcagtgcagccgggtggctttcgtgctgaccacctgcacccgggcgggcgaggccgagcgcgaggccaggggtgagggcgaggtcaaggctgcagatgaggccaaggccgtaggtgaggtcaaggcgatccccgtacgagcgaaggacgattgtccgcctgaaccctagttctgttgctgtcgggtttgcctcataccagcggtgccacgtggctcaaacccgcgccggccggcccgggcgtcagagcgccgtatttcagattatttcttggtggcgccacgcggcttgatcgagaggccgaggcgcatcgccatcttcttgatccgctccggcgagcggccggtcgccttcacgacctcctccagcgtcttggaggagcgtgccaattccatcagtcgtcggtcctccttgaacgaccaccgcggctttctggccatcttgttggtatccttgcgcattgctgggcaacaaagccgccaggcggggtcgcctgacggccttgccggtgtgggcccggaccttggggaaatgtccggtggataagcaatactgcttccggataaggtcgcaattgaaaccggaatttaacctaacctatcaaggttacttgtaaggttacttggatagagcgtggcaggaggccttatgcgcaaggtcgccattttgagtgccgcagcatttttactgtccggttgctggcccgacccggaggtcacgggatcgaccaacagctgtgcggccaatctttatagtcagtacaatcccaaggtcatggatcagtgcgtcaatgcctgcatcaagtgtgaccacggcaacgtcacgacctgcacgacctcctgtacgctgaagggcgcgcggtaaccgaaccgcgcatgccctgatgcgaggagtttcgtagcagcacgccaacgggccgtcttgcgcggcccgaggaaggcctttatcgcgtctcatgagcggtgccgtcgctgcgccggaaactgagtgcgtggaactgagcgcgatgagcgggccttcctatgtcgcggtcgattggggcaccagcagcttccggctctggctgatggacgctggcggcgaggtgttcggcgaacgccgcagcgaccagggcatgaccgcggccgcgaggaccggctttgcctccgtgctgcaatcgcatctcgacgcgctgggggcggccgtcgatctgccggtcgtgatctgcggcatggccggcgcgcggcagggctgggtcgaggccggctatgtcgacacgccggcgcatctctcggacatcctcaaaggtgccgtcaaggtcagcgggcaggcgcgggacattcgcatcctgccgggaattgcgcagcgcaatgtcgcggctcccgacgtgatgcgcggcgaggaaacccagttgctcggcgcgctcggtctggacgcaccgggcgaggcgctcgtttgcatgccgggaacgcattccaaatgggtgcgcctgcgcggcggaaccgtcgagcgttttgcgaccttgatgaccggcgagttgttcagcgcggtcgtgcgcgacaccatcctgtctcacgccgtcgcggacgctgacgaggctgttgatgccgacgcgttttgctcggcggtcgctgaggcattcgcctcgcctgcgctgtcagccaacctgctgtttcgcgtgcgatcgcggcaattgctgttcggcggcagcgcgcaggccgcgcgcgagacgatctcgggcacattgatcggcgccgagctggcggccggcctcgccgagcgggcgcgggcaacgccggtcacgctgatcgcatcgggccgcctgcagcggctctatcagatcgggctcgaacacctttccattccgctcaacgtcatggatgcagacgaggcggttcgccgtggccttgccggcgcagcggcggcgatctggtaaaattgaggatcaacgcatgagcattccgtttccgccgatgcagcgtccgctgctcgcgatcctgcgcggcgtcaggccggacgagaccttgggcatcgtgagcgcgctgatcgaggctggcatgaccgcgatcgagattccgctgaactcgcccgagccgttccgttcgatcgcgatcgcggcgaagcgggcgcctgccgatgtcctgatcggcgccggcacggtgctgtcggccgcggacgtcgatcatctccacgacgccggcgggagtctcatggtgtcgccgaacgtcgatgtcgacgtgttgaggcgggcccgggaccacgcgatggtcacgatgcccggcgtgttctcgccgacggaagccttgctcgccgcacgtgcgggcgcctcaggcctgaaattctttccggcgagcgtgctcggcgcctcaggcatctcggcgatccgcgccgtgctgccgccggatgcgatgatcgccgccgtcggcggcgtctcggagcagaatttcgcggtgtatgtgaaggccggcattcgcgccttcggtctcggcagcagcctctacaagccgggcatgacggccgcggatgttgcggtcagggcaaggacgacgatcgaggcgtatgacagggcggtgcagggggcgagctaagctcggtccgcaacgcctgatcgcgggttaatcgtcgcgcttgccgccatcgatcaccctgaacagcggcgccgcctcgcgagggttctcgagcagctcttcgaccatggcgatcgcggccgcgacgtacttctcggtcgcggcgtccagcggccgctcggcttcgtccgacagcgcgagcctggcgccctcgagcagcttgcgggtgcggaccgcggattcgtcgccggcggtgagggcggcgcgggcgatcgatcgcagcacgaacagctcgccctccagccgcagcaggcggtcgttcagcttgctcagcacagtgttcaggttccgcatgacgtcctctccgggcgttggctccgtcttccatacacggtcattcctgacgaaattcttgtgccggcgccaaacccgggcggccccgggccgggacggcctgctggtggagccgtttgtggatcatcgcggatggccctagtagagtgatcgcgatccgccggcccggccgggcgccaggggcgcatccacccgttcaatcacgacgaaggaaacgcatatgaggattgccgtcgaaacgatcgttgccgcaccgatcgccgatgtctggcgcgcctacaccacgccggacgatatcaggcaatggaatgcggcttccgacgattggcacaccactgctgcgaccgtggatctgcgcgccggcggcgccttctcctcgcggatggaagccaaggacggcagcatgggattcgatttcgccggcacctacaccagggtcgaggcgccgcggctgctcgaatattcgttcggcgatcgcaccgcgcaggttgcgttcacgcccgaggccggcagcgtcaaggtagaggtcagcttcgacagcgaagatacccattcggtcgaacagcagcgcggcggctggcaggcgatcctggacaatttcaagcgctacgtcgaggcaaagcggcggtcctgatccggccattgcagggcggctctctcggcgcggtcgggatgatgatcaggagcaaattgcgatgcgccttgttttggcacttggtctgttggtgatgctgtgcgcgccggcgaacgccgcaccacggcgtcacccccacccacggcaacccgcagccgttcgcgcgcccgcggatgtcacgccgtcggcgcgcttcgccgttcccggctggagtgacgaggcgacccgccagtggctcgaccgcgcgtcggaaaatgccggccgcggcggatagtcctacagcctgcggcaccaattcaatcgtcgccgtcgtctacggttccgcgcgggttcgatgccgagcggccgccatagcgccgcggagcggcggcggcctttctcgggctcacgtcttcgctttcgcgtagctccttgcgtacgcgccgcgcggttcgcatcgcgcgcttgatgtttggatcgtgcgaatcctcatcgaagaagaggacgatctcgcagccagggcattggcgcgtgtaaccgttctgcagccgcatggcgcgatcgcgaaagacgttcttgcagcgtgtgcagcggatctggacggaatcttccatgacggtcctgcatttcggtgcacgctcacaatacctctgaggaggcagttcgaagcaagaaatcacgaagcgcgctgcaatcaaacgcggcagcctgcaacgtcacgaccagaatgcatcgggccgttgaaggcgccggaaccttgttcatgcacggagaactagggaagcattcgtgcgctggatgataaagaacaggatgcgacttcagagcagaccgtgaacatcaaaaagaacggccccagcgcgtgggccacgctgaggccaagttgacactttggtcgtgaggcaccgtcacagcacctcgatgcttaacctacccgcgtttctctccagccaaatagcccatatgggccatgatgtctggcacagaacgtgcagacttggagccgtcaggattttgcatcaccttcctggggctaggagcagcgccgtccgcatatatttcaagcggacggcgttgtgcgtttgacttgccgcgcgcgagcacgatcagggattcaccggccgaatttccaggctctcgattttcaccggcggtggtgcgggatctttttcgtccaacggatgcaaggcgaccgtcgcattcgtaccgcctgtgagaacgttgtcgccggcgccgctcgcgtgcgtgtagttgccggcgagatcgtcgagcccgagccgcgacaccggtgccatcaccttccaggtgagggtgacttcctgctcaccgatgaaaatgccgaagttgcgaatggccgcgacgtagcggctgtccggtgcattctcgacgtgcagcacgcagtcgagattggtcaccgggcccaggatgaaaccggtgtcggggccgccgcgacatgcaagcgttccggcttgcacctgttgtgcctcggcggttgcgatgggggcgacgacaattaccgccccacacatcgcaaggacgacgcaatgatccgttgcacgcatggtgctgtacaacgccgatcgaagcgcgatcggtccacgatctcagccacggcctttgcttgtggttaagagagttttagggagcctcggccgcagcggccttcgcgagcgatccggcagagctgcggggaccactcgctgcgcaagccgcagccgatcgccccgccgcagaatgcgccggtcgcaacgacgctaactgtgtcccgaaaattacgccgccgggctggaaatgatttgtcccggcggcgacctgttccaatctgggcccgcaatcccagtgacggtctgtctgcaggaccggcgccaaggttcgaacgcaccggactcttacggggatcagcgcctggcaaccgtctggtgctggctgccgaccttcttgtgcaagggcgcaggcccgatggtggcccaaaccaccgccgcaatcaccatcgccgtcaggatggcgccggccaggggctgatcgttgtccatggttcgcgtccgttcagatatgctgatcgagcttgcgcatctcctgcaggcgggccaggcaaaaatcgcggtacaattcgttgatgaaatcccacatgaccgaatccccttttggtcgaatgttgggacgctacgccgggtttgtttccggccggcttcgcggcctccggaaaatggcttcatcgaggggcggcgtggcgatccggccaggaccgcagcggtggccccgaggttgccgcgcgattccggtctctcatcaagatgatcgcgatcacggcggcgcacatcaacggaccaacgggaaccagcaccagcggaaatgcgtagcccaatacgaacacgatgccgacagcgatccgaaacacccgacgatcggagagcagcgagatccggctatccgtcttcgcgttcatcagaaacaccaacgcgagcgccaggatcggcatatcgtagatggcgaagtagggcgaaatgagcggcgttaccgcaagcagggttgcggcctgcaaggcgaagctgacgttgcggcgccacatgaccagcacccagatcgcgcaggccgacgcgatcgcgatctgcaacgacatcgccgatccgtagcccaggccggcaaatcgaaatagcccgtagttgctctgcagcttgtaccatggcagcacgccgctgaggtgaaactgcgtggtcgcgaaagtcgctgccttacgaaatccgttgaagctatcccagccgaagatgacccccgtgagcaggatgagggtcggcgccacgaagcaggccgtatgttgctgcagggccgcgattcggcgcgccggcgcgctcgaccagtcgaaaccgattgtctttcgaagcaggcattcctggtcgtagagcgtccgcaacgaagctggccaacattgaccggctgatccgcttcccggatcactgcgacgacctgagccattgttggcgatcccggcaggattcgaacctgcaacccgcggagtagaaatccgctactctatccagttgagctacgggaccgtggccgccttgtagcaccgccattatgaaaaatccgcttttccgccaagtcggtccgaaccgatttctgtgggcgagcgacaaaggcgagcaggggtcccgtcctgcgttggcctgtccagcccccgagccggcatgatgctgccgccggggttggtcgaaggaatgtcggcaatgcgatctgcgacgttttcgtccgttcatgtcggcgccttcactccgtcaccttttcgcgcattttttaccccaacgcggcgctcgaccgcggggcgttcaggagctccatcatgatcggattggttcgtgccgctgcagtttgcgccacgctggcgctcggcctggtcagcgcccaggcggcggacaaggccttcaagcgcgacgacctcgccgattccgcgatcaagctggaagcccagatcaagagcgaggcgggggcggtcaacaagtcggccgcaaccctgcgcaccgacgcggatgccgccttcaagcgcaatgatttccgcggaggcttgcagatcctcggccagatcgcggcgaccgcgccggaggacggcgccaactggctgcggctcgccaagaccgtgttccagatcaggtcggcgagctccagcgaacagaccttcctgatggagcgcgcctccaccgccgcctacatcgcctatcagcgcgccggcaatgccggcgaagaggccgatgcgctggccgtgctcggcaaggcgttcgccgagcgcaagctgtggcgtccggcgctcgacagcttgcggctgtcgctcgacctgcgcgaggtcgccgatatcagaggccagtatgagaggatgcgcgacgagcacggcttccggctgctggattatagcgttgattccgatgcggcctcgccgcgggcctgcttccagttctccgaggagctggccaagcgcgtcgatttcgcgccgtacctggcactggccggcaccgacaagccggccctgtcggcggaaggccagcagctctgcgtcgatggcctgaagcatggcgagcgctacaacatcaatctgcgcgccgggctgccctcgaccgtcaaggagacgctgccgaaatcggccgagttcaacatctatgtccgcgaccgcaagccgttcgtccggttcacggggcgcgcctatgtgctgccgcggaccggacagcgcggtatcccggtggtcagcgtcaacacgccggcggtcacgatcgatgtgttccggatcggcgaccgcaacctgatcaacaccgtgatcgatagcgacttccagagcacgctgagccgttaccagctctccgatctcggcggccagcgtggcgtcaaggtgtggtccggcgagctggcgaccgcaaccacgctgaaccaggacgtggtcacggcgtttccggtcgatcaggcgctcggcgacctgcagcccggtgtctatgtcatgaccgcggcggccaagggcccgggcagcgatgatgacggcacgctggcgacgcaatggttcatcgtctcggacatgggcttgtcggccttctccggcaatgacggtatccacgtgttcgtcaactcgctggcctcgactgaagcggtcgccaatgcggaagtgaagctggtcgcccgcaacaacgagatcctggccacccgcaagaccgacgccgccggccacgtgctgttcgagcagggcctggcacgcggcgagggcgggctgtcgccggcgctgctcacggtgacaggcgaaaaatccgactacgccttcctgagcctgaagaccaatgccttcgacctcaccgaccgcggcgtcgcgggccgggcgatccccgccggcgccgacgccttcgtctatgccgagcgcggcgtctatcgttccaacgagaccgtttatttgacggcgctgctgcgtgacggccagggcaacgcgctgaccggaacgccgcttaccatggtgatcgagcgtcccgacggcgtcgaattccgccgcaccgtgctgcctgaccagggtgccggcggccggatgctggcggtggcgctcaattccgcggtgccgaccggcacctggcgcgcccgcgtcttcaccgatcccaagggcgcgtcggtcggcgagaccaccttcatggtcgaggattacatccccgagcggatcgaattcgacctgaccagcaaggagaagctgatcaaagctgaagttccggtggaacttcaggtctccggccgtttcctctatggcgcgccggcctcgggccttcagctcgaaggcgatatgctggtcgcgccggccgctaacggccggcccggctatgccggctaccagttcggcgtcgatgacgagaagaccgcgagcaatgagcggactccgatcgaggacctgccggaggccgatgccaatggcgcggcgaccttcccggtgaagctcgagaaggtcccggcctcgacccggccgcaggaggcccagatcttcatccgcatggcggagagcggcggccgttcggtcgagcgcaagatcgtgctgccggtggcccccagcgcctcgctgatcggcgtcaagccgttgttcggcgacaagagcgtcgccgagggcgacaaggccgaattcgatgtcgtgttcgtcgcgcccgacggcaagcagctgccgcgcaacgggctgcgctacgagctgctgaagctggagtcgcgctaccagtggtaccggcagaactcgtcctggcagtatgaaccggtcaagtcgacccgccgcgtggccgatggcgacgccaacctcgcggccgacaagccgctgcgcctgaccttccagccgcagcccggccgctaccggctcgatgtgaaatcgaccgatgccgacgggcctgtgacctcggtgcagttcgatgtcggctggtattcggacggcagcgccgacacgcccgatctgctggaaacatcgatcgacaagccggaatatgcttctggcgacaccatgacggtgtccgtcaatgcgcgcaccgcgggcaagctgaccgtctatgtgcttggtgaccgcctgctgacgacccagagcgtcgacgtcaaggaaggcacccagcaggtcaaactcgaggttggcaaggattggggcaccggcgcctacgtcatgacgacgctgcgccgtccgctcgatgccgccgccgggcgcatgccgggccgcgcgatcgggctgaaatggttcggcatcgacaagaagacgcgtacgctcgccgtcacgctgtcgccgcccgctctggtgcggccgggcacggcgctgaaaattccggtcaagctcggcgggctcaatcccggcgaggatgccaaggtggtgctggccgcggtcgacgtcggcattctcaacctgaccaactacaagccgccggcgccggacgactactacctcggccagcgccgcctgaccgccgagatccgcgacctctacgggcagctgatcgacggcatgcagggcacaaccggccaaatccgcagcggcggcgacgcggccggcgccgagctgcagggctcgccgccgacgcagaagccgctcgcgctctattccggcatcgtcacggtcggccccgacggcacggccgaagtgagcttcgacattccggagttcgcgggcaccgcgcgggtgatggcggtggcgtggagcgccaccaagctcggccgcgccaatgtcgacgtgacggtgcgcgatcccgtggtgctgaccgcgaccttgccgcgcttcctgctgaccggtgacaaaggcaccatcagcatggatatcgacaatgtcgaaggcgccgccggcgactacgcaatcagcatcaaggcgagcggcccgatcaaggcgtcgggcaatcccacgacgacggtgaagctcgccgccaagcagcgctcctcgctgtcgctcgggctcgaggccggtggcgccggtcgcgccgatttcgacgtcaatatttccgggccgaacgggctgacgctggcgcggcattacgcactggacgtcaagccggccacgcaagtgctggcacgccgctcgatccgcacgctggcgaagggcgagagcctgacgctgacgtcggacatgttctccgacctggtgccgggcaccggcagcgtctcgatctcggcgagcctgtcgaccgcgctcgatgccgcgagcatcctgaaggcgctcgaccgctacccctatggctgctccgagcagatcaccagccgtgcgctgccgctgctctatgtcaacgatctcgccgccggcgcccatctggcgatggacaccgcggtcgatcagcgcatccgcgacgcgatcgagcggctcctcgctcgacaaggctccaacggatcgttcggcctttggtcggcgggcggcgacgacgcctggctcgatgcttacgtgacggacttcctgacccgcgcccgcgagaagggctttgcggtgccggacgtgctgttcaagagcgcgctcgaccgtgtcaggaactcggtggtcaatgccaacgaaccggagaaggacggcggccgtgatctggcctacggcctctacgtgctcgcgcgcaatggcgcggcgccgatcggcgacctgcgctatctcgccgacaccaagttgaacaatctggcgacgccgatctccaaggcgcagcttgccgcggcactggcgctggtcggcgacagagcgagggccgagcgggtctacggcgccgcgctcgacgcgctgaacccgaaaccggtgatcgagttcggccgcgtcgattacggctcggcactgcgcgatgcggcggcgctggtctcgcttgccggcgagggcaatgcgccgcgcacgacgctgacgcaggccgtgttgcgggtggaagcagcgcgggggctgtcgccctacacctcgacgcaggagaatgcgtggatggtgctggcggcgcgcgcgctggccaaggagacgctggccctcgacatcaacggccagggcgtcaagaccgcggtctatcgcagctacaaggccgaggcgatgacgggccagccgctcaagatcaccaacaccggcgacgcaccgctgcaggcggtggtctcggtggcgggctcgccggtcacgccggaacctgcggcctccaacggcttcaagatcgagcgcagctacttcacgctcgacggcaagccggccgatgtcagcaaggcgaagcagaacgaccgcttcgcggttgtcctgaaggtcacggaagcgaaaccggaattcggtcacatcatggtggcggactatctgccggccgggctcgagatcgacaacccgcatttggtgtcgtcaggcgattccggcacgctcacgtggatcgaggacggtgtcgagccgaagaacaccgagttccgcgacgaccgcttcaccgcggcgatcgaccgcggcgccaacgacaagtcggtgttcactgtcgcctatgtcgtgcgcgcggtgtcgccgggcaaatacgtgctgccacaggcctatgtcgaggacatgtacaacccctcgcgctacggccgcagcggcaccggcgccgtcgaggtgaagcccgcgaaatgagcgcagcgtcgaggacagcaccggaacgcaagacgcgctggcggcggatcaagaccgtcctggcgatctgcgccgtcacgacgctggtcgcaaccggcggcttcgccggctgggtcgtctcgctcggtccgctgccgatcatgcaggcgcagcaggtctcgaccacagtcgtcgatcgcaacggaaaactgctgcgcgcctatgcgatggcggacggacgctggcggctgccggtcgatgcgaagacggccgtcgatcccggctatctgaagctgctgttcgcctatgaggacaagcgcttctacgagcatcacggcatcgatccgctggcgctgtcgcgcgccggcttccagctgctcaccagcggccatatcgtctcgggcggttcgaccatcacgatgcagctggcgcggctgatcgagccgcggcaccagcgttcggtctacgcaaagctgcggcagatggtgcgcgcggtcgagctggagcggcagctctcgaaggaccagatcctcgacctctatctggcgctggcgccgttcggcggcaatctcgagggcgtccgcgcggcctcgatcgcctatttcggcaaggagccgaggcggctgtcgctcgcggaagccgcgctcctggtggcgctgccgcaatcgccggagcggcggcggctcgaccgttaccccgaagccgcgcatgccgcgcgcgaccgcgtgctcgaccgcatggtcgaggatggcgtggtgtcgaaggacgatgccgcgcaggcgagggcggcggcggtgccgaggttgcgcaagcagatcccgatcctggcgccgcattcgtccgatcaggcggtcgcgacgatgaaggactctcccgtcatcaagctgacgctggactccacacttcagcggaacctggaggcgttggcgcgcgatcgcgccatcgcgcaggggcctgacgtctcggtcgcgatcgtggtggtggacaacgaaaccggtgacgtgctggcgcgcgtcggctccgccgattatttcgacgagcggcgggccgggcaggtcgacatgacgcgcgcgatacgctcgccgggctcaacgctgaaaccgttcatctacggcctcgctttcgaggacggcttcgtccatcccgacagcctgatcgaggatcggccgatccgcttcggcagctatgcgccggaaaatttcgacatgacgttccagggcacggtgccgatccgcaaggcgctgcaattgtcgctcaacgtgcccgcgatcgcgctgctcgatcgggtcggcgccagccggctgtcgtcgcggctgaagcaggccggcaccagtctggtactgccgaaggacgaggcgccgggccttgcgatgggtctcggcggtgtcggcataacgttgcaggatctcgcccagctctattccggactggcgcggctcggcgccaccaagccgctgcgcgagatcatgcaggagaatgacagccgcgacacgatgcggttgatggatcaggccgcggcctggcaggtcggcaacgtcctgcttggcacaccgccgccggagaacggcgtgcacaaccggatcgcgttcaagaccggcaccagctacggctatcgcgatgcctggtcggtcggcttcgacggccgcatcacgatcggcgtctgggtcggccgcccggacggcgcgccggtgccgggtctggtcggccgcacggcagcggcgccgatcctgttcgacgcctttgcgcgcaccggcaagatcccggcggcgttgccgaagccgccgcggggcgtgctggttgcctccaacgcgaaactgccgccgccgctgcgccggttccggccgttgggcgagctggtccgcagcggcaatgatcaggccccgcacatccagtttccgctgaacggctcacgcatcgacgtcgatcaatcggagggcggccgcaatgcgccgctgccggtgaaggttgccggcggcgtgctgccgctgacggtcctcgtcaatggtgtctcagccggggacatcgacagccggcggcagcgcctgatcgacccgcccgggccgggcttcgcgcggctgaccgtgatcgacgccacgggagctgcggataccgttgtgatccgcgtgcaatgatcgcgcgggaaagcggaacggtacgggtggaaagcggaacagcacggttgtttgcgctgcggtttcatcgtatgcgaaacccatggtggatagcctccaaccccggcgctttggagcagggcaacagtctgtaaaacctgcgcattcgagccgcaggctgttcatggcgttcgagttcgcgacggccagccaatggcgttcgctcctgtttctgacgctgacctgcctggtgctgttcctgccgggcttcttcaccatcccgccgatcgaccgcgacgaggttcgctttgcccaggcgaccaagcagatggtcgagagcggcgatttcgtcgacatccgcttccaggacgacgtccggtacaagaaaccggtcggcatctactggatgcaggcggcggcgctgaagacgatctccgcgctcggggtgcagcgcgcccaggtccgtatctgggtctaccgcctgccgtccctgatcggcgccatcggcgccgtcttgctgacctattggacggcgctcgccttcgtgacgcggcaaggggcggtgctggccgccctgatgatggcaagctgcgtgttgctcggggtcgaagcgcggctcgccaagaccgacgcgatgctgctgctgacggtcaccgcggcgatgggtgcgatggcgcgcgtgtatctgtcctggcaacgcggcgaggatccggcgcatccatcatggggcccgcccgcgatcttctggaccgcgctcgcggtcggcatcctgctcaaggggccgctgatcctgatgttcgtcggccttgcgatggcggggcttgcgatcctcgatcgatcggcggcgtggttctggcggatgcgtccggtctggggcctgatgtggacccttgtgctggtgctgccgtggttcgtgctgatcttcctgcgggccggagagaccttctttgccgactcggtcggcggcgacatgctgagcaagctcggtgcgcaggaatcgcacggcgcgccgcccgggatctatctgttgctgttctggatcacgttctggcccggcgcgccgcttgctgccatggcggcgccggcggtctggcgcgcgcggcgtgagcccggcgcgcagttcctgttggcctggctgatcccgtcctggatcgtgttcgaagccgtgctgaccaagctgccgcattacgtgctgccgctctatccggcgatcgcgatcctgaccgtcggcgcgctggagcgccgcgtgctgtcgcgttcgccctggttgctgcgtggcgccgcctggtggtttgccatccctgcattcggcgcggtgctggtgatcgtcggcgccatcaaggcgatccatcagccggtgtttccggcctggccgctgtttgccgtcgcgatggtgttcggcctcgtcgcgtggtggatgttcgaggacagccgcgccgaacgctcgctgctcaatgcggtgatcgccgcggcgctgatggcgggcgccacctatggcgtggtgctgccgcggctcaccaccgtgtttccgagccaggaggtcgcacgcgccttgcgcaacgtcacctgcgtcggcccgaaggcggcggcggccggcttccatgagccgagcctcgtcttcatgaccgatacctcgacgctgctcaccgacggatccggcgcggcggattttctggggcagggctcctgccgcttcgcgctggtcgaacagcgctcggagcgcgccttcgtgcagcgcgccgaggcgatcgggctgcgctacaacgcgccggtccggatcgagggctacaacatctcgcagggcaaggcggtctcgattgcgatcttccgttccgaagggacggagtgacatgccggcgccgccagccaacctggaatccgccaattatttcggacgattgctgacgctggtctggctgtccctcgcccagctggtgcgggcaccgtcgcattcgcgccgggccgaggcagcgcgccgctccgcgcgccacgtgctgctgctcttcgtcatcggcggcgccgtgatcgtcacgctgatgtatgcggtcgatgtcgccgagatcagcctgatgccgccgcgcggcacgccttcgctctggtgggtgaagattctcaccgatttcggcaaggacgagtatgtgctcagcgcgctcggtctgctgctgattgcagtcgcattggcggcgcccgcgctgcgcggcgtgccgcgcgcaaccctgcttggcctcgggaccaggctgcaatacctgttcctgtcggtcgcgctgtcggtggcgaccggtgaagtgatcaagtggatcgtcggtcgcggccggccgttcgtcggcggcaaggccaatgccttcaacttccagcacttcgccggcaccgaggcctattcgagctttccgtcgggacatgcgatcacggcgtttgcgctggccttcgccgtgtcggcggtgtggccgcgcgcgcgggttgcgatgctggtctatgcgctgatcatcatcgcgacgcggctggtgctgctggcccatcatccgagcgacgtggtggccggcgcggctgtcggcatgatcggcgcaacggccgtacgctactggttcgccgcccgccgccttggttttgccatcgatcgcgatggcaccgtggtggcgttgccgggcccctcggaagggcgcctcaaaagggttgcgaggagcgctttcgccccataaaagcggtcgcccggcggccggatcgggtgggttccagccgcgaaccccacatcaaccacgagtgccgaattgcctgtttccgaccagacgccggtcgccgtttccatcgtcgtgccggtgcgcaacgaggccgacaatatcgcgccgctgatcgccgagatcgcggccgcgctcgacggacgttgggcctacgagatcgtctacgtcaatgacggctcgaccgacgccaccggtgaacggctgggcgcgatcatggcgcagcggcccaatctccggcaactgcgccacgccatctcctcgggccagtcggcggccgtgcgcagcggcgttcgcgccgcgcgcggtgcgatcgtggcgacgctcgatggtgacggccagaacgatccggccttcctgccggacctgatcagggcgatcgagagcggcaacggccgcgtcggccttgccgccggccagcgcgtcgggcgcaaggacaccggcttcaagaagctgcaatcgcgcatcgccaacaaggtgcgcggcatcatcctgcgtgatggcacgcgcgacaccggttgcggcctgaaggcgtttccgcgcgaggtgttcctggcgatgccctatttcgacgggctgcatcgcttcctgccggcgctggtccgccgcgaaggatatgcgatcgcctatgtcgatgtcgtcgatcgcccgcgccattccggcgtctcgaactatggattcttcgaccggctctggatcgggatcatggatctggccggcgtgtggtggctgatccgccgcaagaagccgacgccggtcgtcacggaagtgccgggcgtcaccgatgcgactgatgtcaccaaggtgaaatgatgctgattcagtttggccaggcgctgagcgcctatttctacgacacgttcgtcgccaagttcgatttctggctggcgttcggcctcgtcgcgcaactgctgttcaccgcgcgctttctggtgcagtggatttccagcgagcgcgccggccagagcgtggtgccgatggcgttctggttcttctcgatgggcggcggcctgatgacgctggtctacgggctcgccaagcgcgaacccgtcatcatcctcggccagggcctcgccacgctgatctatgtccgcaacatcatgctgatcgtgaagaaccgccgacgcgcgtcgaagacgctcgacaattgatccgcacggccgtcggtgcggcgaacggtatgctggggctgctttcgaagtcttgatggcttccagcatcgattgcgaccaaatccggacgacggtcaaacaatcgccccaagacgcatggcatctacggcccgtcgtgggcgtggcggcatcccgagtccatgcgccaggggatgaggggcgtcgatgaccagccgtggcgaaccgaccagagcgggtagttatctgttgcatgtccgcaatgtcgttttgctcgacgcgccgccgctgaccggcgagcgcggtctgccggaccggcgcgccgtcagtatccgctggatggccgggacgatcctgatcggcgccgcggccgtggtgctgcttggtggcgcgcttcgcggcgcatttggttatcgcacgagattcgctgcgtcgccggtggtctcaggtccgcgcgtcacggggcaggtggtcgacgaggcgcggcgcggcgatcgcctggatcggaggcccggctcgccaggcaatccctcggcgctcaagatcgagcaattgagcgatgccggctcggtccgtcgatttacccgcgtgtcggcgcggcttgcggagatcgatcccgagccggagcaggaccatcgccgcgaaacgccggcggacggcaaggacgagcagcgagcaagcacgcaactgccgtcggagttgccatcgatcattcggggaggtccatcgcgccgtgggctgccgggcggcaccagcgcttatgccgacgttgaagacgtgccgcattcgccggctccgatcggtgacgccgtcaatgtcaccagccttccgaagtcgccttcctcctctcgtcactatcgacatgtcattgtcgccaggagcggtgacacgctctccgccatcctgcgggcgctggccgcggccgcggaggatgcgccggcgatccttgccgctttcccgtcgacgggccgtcagcagacattgtcgggcggcgagaaaatcaccgtcatcgagcaggacggagatgccggggcgccgcgcggccacgtcgcgaaagtgtcgatcgaacgggcgggctccagcgtgtccgccgtcggtcgcaccgatgtcggtcaataccaggcgattgtgccggaacagccggaggccgccgcgtcgggcggaaggcagccgcgccaatcgatcgacacgcacgccgtcccgggcgagacgttacgcgacggcctcaacgcgcttgctcgctccaatcacgtcgacgaggggatcgtcgctgaactgatgcggctgtgcggccgcgatttcgacctcgacgagccgctcggcgacgccgatgtggccgagatcatctatgcgcccaacgacatcggccaaccggaactggtgttcatcgatttggcggcgggcgggcagacgcgccgctactatcgcttcacggcgccggacgatggcagctccgatttctatgatgaggacggccagtccatcaccaaatttctgctgcgcaagccggtggtcagcggacgcctcggcgacgggttcgggtggcgcattcatccgatccttggcgatcgccgcttccatgagggcgtcgatttcgccgccccctacgggtcgccgatcgcggccgcgggcgccggcgtcgtcgagaccgaagggtacgaacgcgggtacggcaagtacatccgggtacggcatgatcgcggttacgagacgacttatgctcacatcgcgagcgtcccgtccggactgaaggtgggtgaccgtgttcgccagggcgagacgattgcctatgtcgggtccacggggctctcgaccggaccgcatctctattacgaggtgcggatcaacggccgtaacgtcgatccgcttcggatgaaattgtcgggcggccgggtgctgcagggcgatctccttggcgccttcgatcgccagcgcgacagcatcgaccagctcgttgcggcttccgcgtctccacagccgccgcgtggttcggaacatcggccgccgacctagagcatgatgagtttgggtcgagtcagttaatctcgcaagattcgttcacctctccccagcgggaagaggtcgatttgcgtagcaaatcgggtgagggggcgctgctcctacaagagaccgcaacccctcacccggcgctacccgccgacctctcccaagggagaggtgaattcccactgctgcttcagatcaacccaatctcatcgcgctttggcgcgaccgcgcttgatcaaggccgcccgggcgccggaagttcggctgcttccaccgcgttctgccgatcggcggcggtctcgccggcggcatcgagcacggggtaggcgaccgagcagatgtgcgaatggatgcggcgcaggtcgcgcagcacgtcgagatgcagcgacgtggtttcgatggtctcgggccggccttcgcgcagtcgctccagatggcgctcgacggcggcaagttcggccgcgcgcagcgccgccttctcggtgagcagcttgcgcgcttcgctcgcatcgcccgacatgaacaccccgaacgcgatccgcagcgaatcgatcgtgcgcttgtggaacgcggccaattcctcggcgccttccgccgagaattgcaggcggtgcttgatcttcttggtcgcgagctcgctcaggttcttgtcgacgatgtcgccgatatgctcgaggttgatcgcgaaggcgacgatctccatggcgcggtgtccctcgcgctcatcgaggctgccgcgggtaagcttcgtgacgtagagcttgatcgcctcgttcagccggtcgacggtgttgtccatcttcgacacatggtcgaccagcgcgcgatcgttggtcagcatcgccgccatcaccttgcgcaacatcgcctcggcatggtcgcccatatgcagcacctcgcgcgcggcgtcggcgagcgcaagcgaaggcgtctccagcgcgctctcgtcgagatagcgcggccgtgacggatcggtctcctgcgcccgcttgggcagcagccgctcgagcaggcgcgcgaagtgatccagcacgccgatgaacagcagcgcggtcgcgacgttgaaggcgatgtggaacagcgcggtcgccttggcgagatcgggctgccaggtgcaaatcgtttccgtgatcgggcgcaggaacggcgccaccagcaggatgccgacgacgcggttgacgaggttgccaaccggcagccggtagctcgccggattgtcgcgccgcgcgccttccatcagcggattgatggcgctgccgagattggcgccgagcaccagcgcgaacgcggcgtagggcgagatgaactgggaataggccagcgacatcaccagcagcacgctggcgacgctggaatggaccagccaggtgacgaacgcgccgatcaggatgcagagcacgggatcgccggtgatcccgttcaggaacacgcgcacgcccggggcattctcggccggcgccatcgtatcgagcaggatatgcagcgcgagcagcatcaggccgaggccgatcgcgacccggccgaggtccttgatccgggagcgtggcccgctgcggaatgcgacgaggccgacaatgaacagcaccggcgccaccgctgcgacattgaacgacagcacctgcacgatcagcgtggtgccgatattggcgccgagcatgatcgcaagcgccggcaccaggctgacgatctcctcggcggcgaaggaactggtgatcagggcagtcgcggtcgagctctggagcagggcggtcaggccgaggccggcgccgagcgcggtgaaccggttgcggagcgcccgcgccagcaacagccgcaaatcgggcccgaaggcccgcaggatcccgctatggaccatgtgcaggccccacagcaggagcgcgacgccccccatcagatcaagcagaacaagacttcccatacgtcctggatatcccggcaaattcgagtcgaagggttcacgctatagagccaattgacccgcgatcaacccctttttgttcacgttggaaccggccgggggagcgggcttgtagcgaagaggccgttaatcgaggcggcgtcgttcggacacggcgataccggtaaacgaatcctggaaatgaccgttcaattgcgacgggttccgctaggcagttcccaatctttcccggttatgacggtgggaacgagaagctgtccagcaaggcttggggatcaggatgtttgtcaatcgccgcaagagcgaacgccgtgagtgccggagcgtcgccaaaattcaattgggcacagggtcgttgccgcgtgactgcatgatcaccgacatctcggccggcggcgtcaaggtgatcgccgaatatctggagatcccgccggaattcaccatcatcctttcgagcggcagtccgcgtcagtgccgcctggcctggcggattggccacgaattcggcgcccagttcgtcgactgacggccgggcggcctgcgcggcgccatgcgccgcttctgggccggatgacggcgagatgatggcatccttaaccggaacttagggttaagctgtgagcatcccggaaccttcgctgttccgagtctcgttgatgtctgagaaactagcccgacctcttggccgcatgcatcgtcttgccggctcggcagccgccgtgatcctgctgatcgggctgtccgcctgtcagacctcgggtccgtccgacattaccgggtcgttgggcgatacggcggaggccacgccggctcccgtcgatccccggcgcgacattgcgacctatcacgagcgcgtccgcgccaacccgaaagacaccgacgccgcgctgaaatacgcccgggcgctccgcgccaccggccagcgggcgcaggcggtcgccgtcatggagcaggcggtactggcgcagcccagcaacaaggcgttgctcgccggctacggacgggcgctcgccgataacggcaatttccagcaggccttcgacgtgctcgggcgcgcgcacacgccggaagacccggactggcgtatcctgtcggcgcaaggcgcagtgctcgatcagctcgagcgccacgacgaggcccggcaatattacgcgagcgccctcaaggtcgtgcccgaagatgcgtcggtgctctccaatctcggtctgtcgtacctgctgtcgaaagacctgccgaaggccgaggagacgctgcgccgcgcccgggagcgcgcacccgacgacatgcggatccgtaccaatctcgccgtcgtggtcggcctgcaaggccgccaggcggaggcggagaccatcatgaaggctgacctgccgcccgagcagggctcggccaatgttgccgcgctgaagcggctgctggcgcgcagggacgcgagccgcaccgaggcggacaagattccggttgcggccagccgtcgcgactaaagcgggatgagtcttggttggatcggcttggcgcggtcttggttcaccactccggggagaggtgacctttcggcgccgtccccgctggatacaatcttatcaggcgttggttctagcgatgcctcgaatcggggctgctagccggcggcgcggcgtccgtcgttgcggcgcggctgcagtttcttgaggatcggcgacaggaacgattcgcgcgcctcggcgagatccgggcgcccggtcaggcgctgcgcgatctgcaagaaggtcctcgtggtgcggtgacgtgcggagacttccgcgatcatctggccgttgttggcggcttccccgaatagcctgcaatcgaacgggatcgccgcaatcggctggctctcgatcgtcttggcgaaatccttgacctcgatctcgggtcgcttcgacatgccgacctggttcaggcaatagagcggcggacgatcgttgggacgcgcggtccgcaacaggttcatcatgttcttggtattgcgcatgttggcgagatcgggttcggcgacgatcaggatatcgtcggcgccgaccagcacgcgcttggtccaggcggtccactgatgcggaacgtcgagcacgatgcaggaggtggtcatgcgcatcgtatcgaagatggcgtcgaaggcttcggcgccgaaatcgtagacgtggtcgagcgtggccggtgccgccagcaggctgaggtgatcgccgcactttgcgagcaggcgctccatgaaggcgctgtccggacgctctggtgagaagaccgcgttggcgatgccctgcaccggatcctggttgtagtcgaggccggcggtgccgaaggcgaggtcgagatcgacgacgaccgaatccagtccgaggtcgcgcgcgatggtccaggcgacattgtgggcgatggtcgaggcgccgacgccacccttggcgcccgcgaccgcgatcaggcggccgaccgagaccgcttccgaggacgagaacaggccgcagatcgagcgcacgacgtcgagcaccttgaccggcccgatcacgtaatcgttgacgccgcgccggaccagttcgcgatacggcgcggcctcgccgggggtgccgagcacgacgacgcgggtgccgggatcgcagaccgtcgcgagctcgtcgagggcggcgagcagatcggtgtccggctcggtctccagcatgatgacgttgggcgtcggcgccttgtggtaggcatcgatggccgcggcaatgccgcccatatggacggagaggtgagccttggcgagccggcggtcttcggcggcggcgcgcgccgtcgcggcggtcgcgacgctggcgcagaacgcctgcacggaaatccgcggcgccggcgcgatgtggtcgttggcgtgtggctcgtcgtgttgttcggtcatttcgcggcgtcgctcagcttggctctatcggcttcagggtaggtggtcgcggttgactcacccttgctgtatttctggaacgcgatcgaccggcgcggcgtgtaggctgcggtctcggtccgcggctgttcgaggtcagacggattggcgaccatcgcagccaggttgtgctggttggcgcagccgaaattgtcccactgcttgttctcgtggtaggccggattgtcgatcgagggaccaaggtcggccggccatgtgccgcagggcccggcgaccgcggccatcttcggatagctgaggcgaatggtcggcagcgcgcgcggatcctcgatgcggtaggagcgtcttgtgatggcgtgggcgggcacgcccatcgacgccagcacgccgcggatttcccgggacaccgcctgtgccgagcgcgcgttcgaggtgtcggccggcacgtcgattgcgatcgcgccggtgccttcgcggcgccagctgcgggcgagccccatgacgtcgtcgcgctgggtttcggtgagattgccgcgggcgcggcccacgaagacgacgatcgactgctcgccctcggtgatcgcgatcggatgccgctgccggtaatcgtcgggcaccgtgccggtgacgacgtcgccggtcaggttgcagccgccgagtgcgaccgccgacgtgacgagggcgccgaacagcgccagcgtccttgcgcgaccggcttgtgtgttgcgtgtcatcataggatcccccaaccccttcaggtccgcgcctcagtcgatgatgaagccgaaattggccggcgtcgtgccgatcggctcggcacgggcggcaacgccgtagatgcggttgacgcgcgccagcagcgccgactgcgcgtcggaggccggggcgaacccgtcatcgggacgggacaattccttctgcgcgaccgcgcgcaccacatagggcgtcacgatgaccatcaactcggtctcgttgttgacgaagtcctggctcctgaacagctgtccgagcaccgggatctggtcgacaccgggcatgccgttgatggcctgcttggtctgctcctggatcaatccggccatcgcgatcgagccgccggagggcacctccagcgtggtgtcggcgcgacgggtcttgatcgagggaatcgtcgtgccgccctggccgccggtcagcgcgttgtccatcgagacctcggaaacctcggtcatcaccttcaggctgatgcgcccctcggacagcaccaccggggtgaagttgagcgagatgccgaacttcttgaagctgacggtctggacgcaattgccgatcgtgccggtcgacgacgtctgacaggtgacgccggtcggaatcggaaactcgccgcctgagacgaaggtcgcggactcgccggagatcgcggtgaggttcggttcggccagcgtcttgaccacgcccgcggtctccatcgcccgcagcgtcgcggtgacggtcggcacgccgagcttgttcagcgccgcgccggtcagcaaattgctattgagcggtccgttgttggcggtgaaggggttggcgttgttgaagaccaccgcggcggtgccgtagttcatgttggcgctgagatcgacgccgagctgcttgacgacgtcccttcgcacctcggcgacggtgactttcagcatcacctggtcgcggccgcgcaccacgatggagttgaccaccttgtcggggcttccgacgagcttggcggcgatatcgccggcctgctgggcctcgaccgggcttgccaccgtgccggtcagcaccacgctctcgccgacgccctcgatctgcacgccgggcagcatctgcttcagcgcggcgcgcatgccgttgagatcgcgcttgatcgcgatgtcgtaggaggcgacctggttgccgtcggcgtcgaagaacaccacgttggtctggccgaccgcggcgccgatgatgtaggcacgctgcgccgagcggatcacggcgttggcgatcttgggatcggcgaccaggacgtccttggcttcgcgcggcaggtcgaccacgaccgacttgccgacgccgagcgagacggagcgcgtcttggcggcaatgctgctcgtcaccgcgacgtccgcgttcttgtccggatcggtcgcgctggcgagggcggggatcagcatcagggcggtgaccgccgagatcgacagcgaacggaccagcgtggtccgcttcgtcagttgtgttgcacccgttgtcatatcgaagcccccatcacttctgtgtcgtctgagagctcgggatgccgaagcgcacgaccctgatgctctcgccccgcttcggggcattgtctctggtctcgtcggtcttctcgttgacgtcggcgatgctgcgcagcgccagcgccagcgtgccgctctgccgcgcgcgcgcgagcgtctcggcctgttccggcttgagctcgagggtcacggtcttgccgacgagggagttgttgccgtccttctctttcggcgcctggtcgatcgccagcacgcggacgttggacaacaggatttcggtggtgacgatgtcgcggccacccatttgctgatcgagattcttgtcgcgtcgcgacaggatcacgtcgacgcggtcgttcggcaggatgaagccgccggcgccggtctccggcgagatttcagtggagatcgcgcgcatgccggacggcaggatcgcggccatgaagccgctgccattggccttgaccagcttttgctcgcggatcggttcgccgatgatgaagggagcgcgcgcgatcgagccgatcacgtcgttcatggcgtcggcgttggtgtcgtggcggatgaacgcgctgctggcggtctcggccggccaacgctgccattgcacgtcctcagccttgaccgcttgaccaagtccgatgtcggacttcgccaccagcacctcgacggtcggcaattgcgccacgggcgccgcgaccggcgcaggtttattgtcgccgacgctcgcgagatacatggccgcgaggcctgcgacgccggcgatgccgaggaccacgatgcgtgccgtcttcatgcgattgtctgaatgcccttaccgcagggcagtcacgtccttgcggcactgacagcccttcccgggagcatcactacggccgcaaaagtataagggaacttgatggaaggtccggacaattaagggattggtggggatggtgaacgccgggttatcggcgctcgtcgcatctccgcagaatcccggagatcgtgcatgcttaccgccagcgacgtcggtggcaacgccgcgtcaggccggccggtcgtggttaatgtcggctgacgcgcgccgacacgcagcggggcaaggcatcgctgcgcaatttcggaatattagaagtgtgcccctgatttgcccgacgtgtcaagccgtctcgtcgaacgccggcggcgtcaacgcctttgcatggggttgttttcgatattttggcggcgcgcacctgcggcggggagttcctccgccgtcgtgcgtcgatcgccctggatcagagcgcggccttcaacgcggcgaatccacgatcgagatcggccttgaggtcgtcgagattttcgagcccgatatgcagccgcagcgtcgggccgcccggcgaccatttggtcgcggtgcgatagtcgctgcagtcgaacgggatggcgaggctctcgaagccgccccaggaaaagcccatgccgaacagttgcagcgcgtcgagcatcgcatcgaccgcggcctgcggcactggcttcagcacgatgctgaacaggccggaggcgccggtgaagtcgcgcttccagatcgcgtgccccggatcggtctccagggccgggtgcagcacccgatcgacttcggggcgtgcgccaagccagcgcgccatttcgagcccggagcggtggtgctgggcgagccgcaccgacagcgtgcggaccccgcgcagcgcgagatagacgtcgtcggggccggcgcagacgccgagcaggcggatcgcatcctgaaccagcggccaggcctttgcattggccgcgatggtgccgaacatgatgtcggaatggccgccgatatactttgtgccggcctgcatgctgatgtcgacgccctggtcgagcgaacggtgatagagcgccgtcgcccaggtgttgtcgtcgatcatgagcgcgccgcgggcatgcgccacggccgctatcgcgcggatgtcgggcatctcgaaggactgcgaaccgggcgcctcgaccagcaccgcgcgggtattcggcttgaacagcgtctcgatgccggcaccgatcagcggatcgaaatagctggtctcgatgccgtagcgcttcagcatgttgtcgcagaaattgcgggtcggccgataggcattgtcgcacaccagcaggtggtcgccggccttcagcgcggcgagcagcgtggtgctgatcgccgccagtcccgacggggcgatgccgacgccggcgcattgcgggccttccagcgccatcagcacgtcctgcagcgcccgcgtggtcgggctgccgtggcggccataggtaaattcggcgcgatgggcgtgcagggcctcggcggtcggatagagcacggtcgagccgtgaaacaccggcggattgacgaagcctttctgggccttggtgtcgcggccggccgtgaccaggcgggtcgcggcgtcttgttgcgggcgggagggcgtggagccgtcggaggaggtcatggttcgctgccgttggacttttgacttttgccgcagccgtaccgcgtcgggaggacgggactacgccgggagttgctactaacaagaggtagaagacacgcgtcaaccccttgacccggctcgtcagtcgctatgtgatgcggcgcaactacccgtcgccgcacgttgaggggcctgccgcgaccgaggatccgttgcctgaccggtttgcacgccaaactgccggtttgatcagcatgatttgctgcaggggatcattgggatggcccgtgaacgcgagcgatcacaaagcaaacgtccaacggacgaccctgaaaggccccgcccatgaaacgcgtatccctggctgtcatacttaccgctgccgccgccctgtcggtccaagcggcttcggcacaaaccctcaagacggtcaaggatcgaggccaattgtcctgcggcgtcagccaggggctgcccggattttcggcacccgacgacaaggggaactggaccgggatcgacgtcgacgtgtgccgggcgatcgccgccgtggtgctcgacgacccgaccaaggtcaagttcgtgccgctgtcggccaaggatcgcttcaccgcgctgcagtcgggtgagatcgacgtgctgtcgcgcaataccacctggacggtgtcgcgtgacacctcgctcggcgccaatttcaccggcgtgacctattatgacgggcagggcttcatggtgaagaagtcgctcaaggtcaattcggcgctcgagctgaacagcgcatcggtctgcgtgcagaccggaaccaccaccgagcagaacctcgccgacttcttcaagggcaacaacatgaagtatgaggtgatcgcgttcggcagcatcgacgaagcggtcaaggcctatgagtcaggacgctgcgacgtcttcaccgacgacgcctccgggctctacgccagccggctgaagctcgccagccccgccgatcacatcgtgctcccggaaatcatttcgaaggagccgctggggccgatggtgcgccacggcgacgaccagtggttcgacatcgtgaaatggacgctgtttgcaatgatcaatgccgaggaactcggcatcacccagaaaaacgtcgacacgatgctgaaatccgacaagccggagatgaaacgggtgctcggcaccgacggcaatctgggcgaacagctcggcctcaccaaggactgggtggtgcggatcgtgaaggcggtcggcaattacggcgagaccttcgagcgcaatgtcggcaccggctcgccgctcggcatcgcccgcggcgtcaacaatctctggaacaagggcggtatccagtacgcgccgccgatccgctgatcgatcccggccgacggctgccgcgatgagcatcgcgccccgcaaaccaccgctgcaatttgccctcaggctgaagcgtgcgcttggcggcaaggccggctggaacgggttggccgcccagattgccttcgccgcgatcctggcctggatcgcctacgagatcgtggcgaatgcacgcacgaacctggagacccagcacatcgcgtcgggcttcggcttcctcaattacaatgcgggctttgacgtcaaccagagcctgatcgcctacaacaattccgacacttactggcgggtgttcttcgtcggtcttttgaacacgatcctggtctcggtgatcggaattgtctttgccaccgtgatcggcttcgtcgtggcgctgtgccggttgtcgcccaacctgctgttgtcgcggatcggcggcatctatgtcgagatcgtcaggaacctgccgctgctgttccagattctgttctggtatctcgccgtgctcgcggcgctgccggcgccgcggcagagcatctcggtcttcagcacgttcttcctcaacaatcgcggcctggtcgtgccgcagccgatcaccgagccggggctctatccgttcctggtcgcgctcgcggtaggcatcgttttggcgctgggattgcgacgctacgcgcggcgcgccctgtttcagcgcgggcagatgatccggatctggccctacttgctgggttgtctcgtcggcctgccgctggtctcgatactgatcttcggctggccgttgaagttcgaattgccgcagctgaaaggcttcaacttcgccggcggcgcgcggatcattcccgaattcgtcgcgctgacggtcgcgctgtcgacctacacgggggctttcatcgccgaaatcgtccgcgctggcgtcctgtcggtgcacaggggacagatggaggcgggctcgtcgctcggcctcagccgcgccgcgacgctgcggctgatcgtggtgccgcaggcgatgcgggtcatcgtgccgccgctgaccagccagtacctcaatctcaccaagaattcgtcgctggcggtggcgatcggctatccggatctggtctcggtcttcgccggcaccgcggtgagccagaccgggcaggcgatcgagatcatcgccatgacgatgggtgtctatttgctgctctcgctgacgacgagcgcgctgatgagcgtctatggctggcgcatcaaccggagcatggcggcatgacggatatctccgcgccgtcctttgtccggcaggacctggtcaccgagcgcgcagcgccggcgaagaccaccggcttcatcggcttcctgcgcacgcggctgttgaactcgccgggcaacgtcctgctcacgatcctcggcctcttgctggcctggtacatcgtgatcccggcggtcaagttcctgctggtcgacgcggtgtggaccggcaaggatcgcaccgcgtgcctcgccgaacaggccgggcaccaggtcggtgcctgctggccctatattcaggccaagctgacgcagttgatctatggcttctatccggaagcccagcgctggcgcgtcaacctgacttatgggctcggtgccgcgctgttgctgccgctgctgatgccgcgcttgccggcgaaggggctgaactccggactgttcttcttcgcgtttccggcggtcgcgtttttcctgctgcatggcggcggcatcgcgggcttcggcgtgagctggacggcaggcctgttccagctgttcgagcagagcattggcggcgccggtgatctgctggtcaatctcagcaagggttcggcgatcgccccgctgccatgggtcctgggcaagctgctcgtcctggtcggggtactaatccactggctgatctttccgctgacctggctgcgcgatcaaatgcagctgtcgtcggtgccggtctggggtgatttcctccttaccgccgtgatcgtatccgccgcgctgtttgtgctcggtggcggcctgcgcacaggccgcagggcgctgatcggcagcctcctgacgtttgccgggatcgccgtcggcatcaagctgatggggctcgatcgcggcggctttccgatcgtcgacacgcggctgtggggcggcctgctggtgacgctggtgatcgcgatcaccggcatcgtcgcctcgatgccgatcgggattgcgctcgcgctcggccgccgctcgaccatcccgctgatccggatcttctcgatcgccttcatcgaattctggcgcggcgtgccgctgatcacggtgctgttcttcgcgacctacatgctgccgctgttcgtgccgggcaatttcgcggtcgatggcctgctgcgggccctgatcggcgtggcgatcttcaccggcgcctatatggccgaggtgatcaggggtgggcttgctgcggtggcgcgcgggcaggcggaggccgcatcggcgctcggcctgtcctggtggaagacaacgtcgctgatcgtgctgccgcaggcgctgcgctacgtcattcccggcatcgtcaacagcttcatctcgctgttcaaggatacctcgctggtgtcgatcgtggcgctgttcgacctgttgggttcgctgcgggcgtcgttctcggacccgaactggtcaacgccgaccacggcctttaccggcttcgcctttgccgggatgatctatttcgtgttctgctttggaatgtcgcgctactcgctgttcgtcgaaaaccggctcaacgctcatcgccgccactgaacaaggtcaccatgtccacagccccgatcgtcaacatttccacgctgaacaaatggtacggcgacttccacgtgttgcgcgacatcaaccttgaggtcggcaagggcgagcgcatcgtgatctgcggcccatccggctcgggcaagtcgaccctgatccgctgcatcaacgcgctggaggaattccaggagggcgagatcgtggtcgacggcatcgagctcggcccgaacctgcgccgggtcgacgaggtgcggcgtgaagtcggcatggtgttccagagcttcaacctgttcccgcatcttaccgtgctcgacaattgcacgctggccccgatctgggtgcgcaacatcccgaagaaggatgccgaggcgatggcgatgaagttcctcgagcgggtcaagatcccgcatcaggccaacaagtttcccggccagatgtcgggtggtcagcaacagcgcgtcgcgatcgcccgcgcgctgaccatgaacccgaaggtgatgctgttcgacgagccgacctcggcgctcgacccggaaatggtcaaggaggtgctcgacaccatggtcgatctcgccagggagggcatgaccatgctggtcgtgacccacgaaatgggctttgcccgcgaggtcgccaaccgtgtcgtgttcatggacgccggccagatcatcgagtcgaacacgccgcaggaattcttcgccaacccgcagcatgcgcgatcgaagctgttcctgagccagattctgagatgagcgaactgggagtggcgaatagcgaatggattcctcgattcgctgctcaccactgctatttgcgactcagacgaacggcagctcgatcttgctgcgccgttccagccattccggcaccggtagattcttcgaacgcatgaaggccgggttgaacagcttggactgatagcggttgccggagtcgcagaggatggtgacgatggtcttgccggggccgagctgcttggcaagctggatcgcgccggcgatgttgacgccggtcgagccgccgaggcacaggccctcgtgctccagcagctcatagatgatcgtcacggcttcctcgtcggagaccaggaacgcatcatcgacattcgcggtttcgacaaccggtgtcttgcggcccagtccgatgccttcggtgatcgagtcgcccggggtcgacttgacctggccgttcttgaacagttcgtacatcgcaaagccgtgcggatcggcgcacgcggtgacgatgtccttgttcttttccttcaaatagcggctgatgccggcgagcgtgccgccggtcccgaccgagcagatgaagccgtcaaccttgccgttggtctgctgccagatctcaggtccggtcgagtcgtaatgcgccttgggattgtcgaggttattccactggtcggcgaacagcacgccgttcggctcggtcttgcgcagctgatcggcgagacgcctgccgagatgctggtagttgttcggattggagtagggcagttgcggcgcctcgacgagctcggcgccgcacagccgcagcatgtccttcttttcctggctctgcgtctccggaatgacgatcagggtgcggtagccgcgcgcgctcgccacgaccgcaagcccgatgccggtattgcccgcggtcgattcgaccacgaggccgccgggcttcagatcgccgcgcttttcggcctccaggatcatccccttgccggcgcgatccttgaccgactggccgggattcatgaattcggccttgccgagaatggtgcagcccgtcagttcggatgcacgtttcagcttgatgaggggggtgttgccgatcgcttcgatgacgtctttgttgaatgtcatgtcgggggtaatcttttgccggtcagtgttttgctctggccggaaactagtgtgccgacggcaaaaggggaaggcttttgcagtgcggcgaacgtcgtgtggcgatctgcgttaacctgttgtcgggaccgatcaagcgccgccgggaacgctcgtttcgcgaatgcccggcggcccggccaaatcttgctgcaattcggcgcgcgacgtcagatttgctgtatgagctcaattcaagatgaacgctcgatcttgtacagccccacattgagggcgccaatttcgaagcccagtctgcaataggccagatagtactcccacatccgcttgaacctgacatcgaagccgagggattcgattgaagcccaggcgtcgaggaaacggtcgtgccagtcggccagcgtgcgtgcgtagctgtcggcgaaaaattcggttgaaaccagccgcaatccggaactgctcaccagctgcttgacgatgtcgatggtgggcagcattccgccaggaaagatatagcgctggatgaactccggccgcctgcgatagctttcaaagcgacgctcatcgatcgtgatcacctggagcaccgcgacgccaccgacactgagccgctgccgcagcttgtcgaaaaacagtggccagtaggtttctccgaccgcttccagcatctcgatcgagacgacccggtcgtagcggccggcggtgtcccgatagtcctcgagccgcaggtctgatttgtcggcaaggccttgcgcggacagcttctcacgcgcgtagccaagctgctcggtcgacagcgtcagtccggtgacgtgacagcggtgtcgttcgatcaggtgtcgtgccagcgcgccccagccgcaaccgatctcgaggattctctcgccgccgtcgagttcgagcagctcggtgacccgatcgagcttgacctgctgagcttgcgcgagggtctggtagggcgagctgtagatcccggacgaataggtcatgctcggatcgagccagagccggtagaaatcattgccgaggtcgtaatgggcgcgaatgttgcgccggctaccgcgcctggtattgcgattgagcagggcatggcgaagccagttgagaggctgcggaggtctcaaccgctcgaacgaggccgcgtgggtcgaacgcggtgcggcggcactcaggaacgcgtggatgttcggcgtcgaccactcgccggcaaggtagccttcagcaaagcccagatcgccgccggtcaacagccgcagcaggcatttccaactgtgaatcctgatatgcacctgttctccgccgcgcgagccggagatcgcaacaccccgtccgccgggcaactgcaccagaatctctccgcagtcgagccggcgaaacatccgccgcagcagcactccgatcgtcgcgcgcagcaccggcggccattcgacgggcacccagcccaaggcggttcgctgatggtcagtgtgcatgcaaattcgtccctcgcttgggtgatctggccgcgagcgtcatgtcgtcagcgggtggattcgggcggtcacgaaagcgcaagcccttcagccaaagcctcgccgcctcccaatggatcgcgagcatgactttgacggtcacaagcggaatcccaaggaaattgcgcaacaatgtccgatcgctcagtgactggcgtgacgcaaccaggcatgcgctaagcatcgtttcgccgccttcgctcgcggcgatggcgagcgcaaaatgctcggccggcaggttcaagcggaaatgataggtttggttcatggccatgaacggcgacacgtagaaggtcttgttgcagtcgtgccggatgcctgtgtcgccagcgtcggccgccgccacataagcgtggcgtgcgccgaacgtgttgtgaacctgataaacgatcgccgcgagctggcccgagtttcggtagcagaaatagaggctgaggggattaaaactgtagccgagtgtccgcggcatgcagaacaactgaatccgcccgccggccagatcgatacccgcttgttcgagatgccgctcgatctgagcgcgcagtggcgttgctccggcgtcgccgtgatcgcggtcgtacagtgcgaacaggttgaaccggttgtgcgagagaagccgcaaccgagagctgagcgttggcatctcgtcgagatcgagcagcagccagaacacacggtaacgaaagcgatgcgtcgtcggccgcagccgccgatgcatcacgccaccgcgatagagacaggagcgcagcgtcatggctgcagctccggttcaggcaaggatctggtgttggcggcgagcacaatgcgtccggattcgttcggcacgttccacggcctgcgtacgttgccgagttgctcggcgaccgcaagcccggattgcagcccgtcttcgtggaagccggcgccgaaatgcgcgccgcagaaccagatgcctccgtcgccttgcaacgaccatagccggcgctgcgcggcaatcgcggctgcatcgaagatcgggtgctcgtagacctccgtctgatgcagcgtgtccgcgcgcggtggacgggcaggattgagcgtgacgaacagcggcaaatgcccggggatgccctgcagccggttcatccaataggtgacaccgaccggcccgctgcactcgccgcgggatccgacataattccagctcgaccatgcgagacgccgccgcggcatgaacgtttgatcggaatggaggacggcaaggttgcggctgtagcggaacgcaccgagcaatccggattgatctggcgtgggctcgtcgatcgtcgacagcgcctgatccgcatgcgttgccagcaccacatgatcgtatggccgtgtttcgccgtgaatgtcggtcactgtcacaccgcgtgccgaccgtcgtatcctggtcacgccgcagtcgagcttgatccggtccgcgaatggctcgaccagtcgctgtacgtagacacggctaccgccggtcacggtttcccatggcggacgactggtcagctggagcagcccgtgattgtggtggaatcgaatgaaggtcgccgcggggaaggcgagaatttcctccgggggcgccgaccagatggcgcttgccatcggcagcaggtggtcgtcgcggaacgcggaaccaaaaccgccttgcgccagatagtcgccgaggctgatcgtctcgtcacccagcaacgtcgcgtcgcgtgtcgcgcgatcgtagaaccggacaaggtcgcgcagcatcgaccaaaagcgcggacgcagcaaattgccgggctgagcaagcaggcccgagaggccggtcccggaatattcgagatcgccctggtcaagagaaaccgagagcgacatttccgaagcttgtgtgggaacgccgagatgccggaacagcgcggtaaggttagggtaggttttccggttgaacacgatgaagccggtatccacggcgacgcgttggccgccaagggacgccgtcacggtgttggaatgcccgccgatccgatcggatttctcgtagacggtcacatcgtgccgctggctcagcagccaggctgccgagaggccggaaatgccggttccgactatggcgacgttcaatttgccgtcggtcctcaacgatgatccctcttcgatccgcgagcgcgccggccccttgcgccggctggcgtcatcgataggaacgactgatcttgagggttggatcaccggcagtgatccaaccgcggaccgacggcgttcctgttgcatgcaaaccgccctacgacatacctccggggttgccggtctggtcaggccgggtgcgatccggtattgcggtcgcgtagcccgtaacgacagggagtgcccgcgcggcatgctgagtgaaactcccgacaatgagacgtcggatgcggcccgttgggcccggctgatcgaagccgttgcgattcgaagggatcgcgaggccttcgctgcgctgtttcggcattttgcgccgcgcataaagacgctcatgcagcgctcgggcgcgagcgagcagcttgccgacgaactggcgcaggaggccctgttcctggtgtggtcgaaggccagtctgttcgatcccaaaagcggtggtgccgcagcctggatattcacgatcgcgcgcaacctgcgcatcgacgcgctccgtcgtcagaggcgaactccaaccaacgatacgtccgagacggagctcgagtttcagcgcgatgaggggccgtcgcctgacgctggggtggcggcatctcaaatcgaagcgcgggtccgtaacgcgctgtcggcgctgcccgacgagcagatgcgggtgatcgagctatcgttctttcacgaagcagcccatgcggagatcgcaagggtgctggatattccgctcggcaccgtcaaatcgcgcctgcggctcgcgatggcacggctgcgcaacttgctggatgacttctcatgaccgtccatcatcaccccccggacgagctgttgggcgcgttcgcagccggtacgctcgatcttggccagcacgttgcgattgctacccatttggtcggctgcgccaagtgccgcggagcggtgcaggcgatggagcatgtcggcggcgcggtgctggctgcgctgcctccatccgcgatgtctgacggatcgtttgaggccttgcagcgcagattggacgaggcatcggagattcccgcccccgtgcagcgccaggggcgggcattccgcgacgtgccgggcttgccggactttctgggcagctatcccgacagctcgtggcgatggattgcgccaaaggtgcatttgcgaccgatccggttacccgagccgagcgcgacgcgcgtctttctgctgaagtccagcccgggaacgagaatgatcgagcacacgcacaccggctttgagatgacctgcgtgctgtcgggaagcttcgttcacgccggcggccagttcggacccggagatttcgatttgggggacggggcggtcgatcacgacatcaggatcgactccatggaagactgtatttgcctggtcgcaatgcagggcgatttgcggctcaacggagtgatcggccgcttattgcagccgttgatccgcatgtgatggctgcgccggaagatagctccatgagcctgctcccgctgatcttccaattcgtcgtcatggcactcgcgatgtctgcggttatggcgatagcctggttcattcagcgccggaccggggccacgggatggatcgatgtctgctggacattcgggaccggcctggtcgcttgcctggccagcgttgtctcggtcccgccgggcgagacggccagcgcgcggcagatcgtggtcgcgatcctggtcgccatctggtcgctccggctcggcggtcatctgctgctgcgaacctgtaaggcaggcgatgatccgcgctatcgcgacctgatcgatcaatggggcgccactgccggcaggcggatgttcctgcagctgcaggcgcaggcggcagttggtttgctcctggcggtctcggtcgcgctcgctgcacataatccgcgccccgaactcgggtttgcggatttcatcggtgcgctgctgctgctggccggcctgatcggggaggcgttatccgacgcgcagctgcgcagattccgctcggatcccgccaaccggcagcgggtctgtgaggcggggctctggaagtggtcgcgccatccgaactatttctttgaatggctgtgctggctggcctatccgttgatcgcgatcgacccctcatatccggcgggctggatcacgctgctggcgccggcctgcatgtactgggtcttggtccacgtgtccggcgtgccgccgctcgaacagcacatgctgcgttcgcgcgggcagcagttccgcgacgtgcaggcgcggacccgggcgttccttccgtttccgaagctgacgtcaggggactagcctcgatgtcacgaaatacgccgccgtcgcggaaattgcgccaagcaacgtcccccaagtgacgtcgagcaatgtgagttggacggtccagttccgcaacgtcgcctggttggtcaagtcataggtcatgtagctgaagaaaccgagcagcgcgccgctgagcgcggccgagccaaggcctcccgacttcagggccggaagcacggcgaacaccaccagcccgaccgggtagaccagatagaacacgatcgccggaggcaggttgacctcggccgacaggatgtcgccgagagtcgggcgatacagtcggctcgccatcgttccaagccaggccatgtcgcagagcagaaaaacgatcaatgtcgacaggtaggcgtacaggtaggtcatgtcgggtccgaaggttgaacgccgctatgggacgcaaagcagcgaatctctcgaaggtaacgacggatcgcgcgatctggatcatcggggcgccgggcagggcgctggacgctgcggtttcggcgcaacagggccgagaaatccccatgaaatctttgttagaatatgacttccggcaccggcctgaaacgcgcggaaatgccttaaaaataggggaaagcccgcaatcaggctggcctcgaatcgcttgcgatgcgacgccgtgcgcccgtgacggggctgtccgctccatcgtcccaagggtaggataggacagtcaggttccattgaaagcattagcccgtgtacgtcacccagaccaccgctgaacgcgtcgctcgtgcgccacgggcaaggtctggctccggcggagagcgggtgtgacccagcccgcatccgtgatggtgcctggaggccggttcggcctcgccggccgcctgggacggctggccggacgctcgatcgtcgcgctcggcctggtcgcgggctcggccggctgtatcctgacccaggacatccccgatcctgcgctcgacgtgccgcagggttacaaggccgcgcggctcggccggcccggcgatgcgcttccgacgctcgactggtggcgcggcttccgatccagcgagctgacccagctgatggaggaggcgcagaccgtcaacctcgatatcgccgcggcggtcgcccgcttccgccaggccgatgcgctggcgcggcaggccagcgcggcgctgctgccaaccgtcaatctcaacggatcggagacctattcccgcacctcaggctccagcgcgagcggtctcaccaatggcgggcgcgaagtggtgaactacaacgcctcgctcagcgccagctaccagctcgacttctggggccagaatcgcgacgccgcgcaggcggcggaggagactgcggtcgccaaccggttcgatcgcgaggtggtggcgctgaccacgctgacgagcgtagccaatgcctatttcactgtgctcgccacccaggaccggctccgcaccgcgcagcgcaacatcgccagcgccgagcgcatcctcaatgcgatccgggaccgcttcaaggccggcaccggctccgatctcgacgtcgcgcaacaggagagcgtggtcgccaaccagcgcgcgctggtgccgccgcttcggcagacgctcgaccagaacgtcaatgcgctcgcggtgctggtgtcgcggccgcccgaaagcgtgcgcgtcgccggcggctcgctcaacgcggttgccgtcccccgcgtcacgccgggcctgccgtccgaattgctgacccagcgtcccgacatccgccgccaggaggcgcaattggcatccgccaccgccaatgtcggcagcgcgcgggcgcagttcttcccaagtatccagctgaccgggacgggcggttaccagagccaggcgctggtctcgctgttccagccgcatgccgccttcttcaatctggtcggcggtatgacccagccgatcttcgacggcggccgcatcctcggcaatttcgagaacgcgaaggcgaagcaggacgagctgctgcagacctatcgcaagacggtggtccagtcgttcaccgatgtcgacaacgcgctggtcgcgatccgcgaaacgtcgcggcggctacaactgcagcgcgacgtgctgtcgtcgtcgcggcgcgccttcgacctcgccgagcagcagctcaaggccggcactgccgacatcgtaactgtgctaaacacgcagctgaccctgttccaggcggaagacgcttattcccaggcccaacttgcccggctcttggcgatcgtgagcctctatcaggccttggggggcggctgggaaccgaagatggaaagaccggtcgatgctctttaagcccgactctgcggatgacgagaaaagcaccgcgccgcgcaagcggagcctgatctcgcgcctgctggggcgcatggtgtcgctgctcatcacgctcgtgatcctggccggcctcagctatctcggctggctcgccttccagcccaagtcgaatggagccggcgggcgcggcgcgggcgcgcggcccgatctgccggtgccggtgcttgcggccaccccgcatgtgcaggacgtaccggtctatctcgacggcgtcggctcggtgaaggcgctcaacaccgtcaccgtgcgctcgcaggtcgacggcaagctgctcaaggtcaatttcctcgagggccaggacgtcaagaaggacgacgtgctgggcgagatcgatcccgcgatctatcaggcgcagtacgatcaggcggtggccacgaaggccaaggacgaggcgctgctcgccaatcagaaaatcgaccttgcccgctacgagcaactcgctgccaccaacgcgggctccaagcagcaggccgatacgcagcgtgcgctggtcgcgcagcaggaggccatcatcaaggccgaccaggcccagatcgacaatgcgcgcaccacgctcggctacaccaagatcgtcgcaccgatttccggccgcgccggcctgcgccaggtcgaccagggcaatatcattcacgcctccgacaccaccgggctcgtgatcctgacccagctacagccgatcgcggtgtggttcagcctgccgcagcagcagatcatgcgcgtcaacgccgcggccgcgaagggccagctggccgtcgacgtgttcggcaatgacggcgtcaccgtgatcgacaccggcaagctgaccggcatcgacaatcaggtcgatccgaccaccggtacgctgaagctgaaggccgagctcccgaatgccagctaccagctctggcccgggcagttcgtcaatgtgcggctcaaggttgagatcctgccgcaggcgatcgtggtgccgacttcggccgtgcagcgcggtcccgcgggcaccttcagctatgtgatcggcgcggacaacgtcgtctccgccaagccggtcacggtcacacagcagaacgagcatgaagccgtcatcgccagcggcctgaccacctcggaccgcgtcgtaacgacgggcttttgccaacctcgccgatggctccaaggtcattgtcggcaaggacgacgggccgcccgccgccgatctcgcgccgcgcaagcgcagccgcagtcccgacggcaagagtggaagccagagcaaggacggcaagccggacgggcagggcaagaacggcgagccgcacggccggcgcgagcccggcgaaggcgatcagaaggggcaggccgggccggcgccggcggcagggggcgaacagccgggcggctcgccgaaagcgcagccatgagcgatatcctgacctcgtaatgtctgaccttgcagcgagaacgcaaccatgagcgtctccgaaccgttcatccgccggccgatcgccacctcgctgctcggcatcgccctgatgatcggcggcgcgctcggctattgggcgctgccggtctcggcgctgccgcaggtcgatttcccgacggtccaggtgtcgacccagctgcccggcgcgagtcccgacgtggtcgcctcgctgatcacggcgccgctggagcggcagctcgggcagatcccgtcgctgtcgtcgatgaactcgacaagctcgttcggcgtcagccagatctcgctgcagttcgacctcaaccgcgacatcgacggcgccacccaggacgtgcaggccgcgatcaacgccgccgccggcatcctgcccaagtcgctgccgtatccaccggtctacgccaaggtgaacccggcggacgcgccggtcatgaccctcgcgctgacctcggacaccatctcgctgcgggcgatgagcgatctcgccgataccatcctcgggcaacgcttgagccagatttcaggcgtcggccgggtttcgatcctcggcggcctgaagccggcggtgcgcgtgcaggccgacctcgcgcggcttgcggcctacggcatcgcgatggaggatctgcgcaacgcgatcgccggcgccaacgtgtcggggccgaagggctcgctcgacggcgcccagcaatcctacaccatcgccgccaacgaccagattgccgcggccgatgcctaccggccgatcatcatcgcctatcggaacggctcgccggtcacgatcggcgacgtcgcgcagatcgtcgacgggctggagaacgaccgcaccggcggctggtaccagggcacgccggccgtcatcatcgacatccagcgccagccgggtgccaacgtgatcgacgtcgtcaagcagatccgcgacgaaatcccacggctgcaacgcgcggtgccggccggcgtcaagctgaccgtcgtctccgaccgcaccgtgacgatccgcgcctcggtccgcgacgtgcagttcacgctggtcctgagcgtcgtgctggtgacgctggtggtgttgttgttcctgcggtcgctgcgcgcgaccctgatcgccggcgtcgcactgccgctgtcgctgatcacgagcttcggcatcatgtatttcgcgggcttcagcctcgacaatctgtccctgatggcgttgaccatcggcaccggtttcgtggtcgacgatgcgatcgtgatgatcgagaacatcgtccgccacatggaagacggcgagacggtcatggaagcctcgctgaagggtgccagcgagatcggcttcaccgtgatctcgctgacggtgtcgctgatcgccgtgttcatcccgctgctgttcatgtccggtctggtcggccgcatgttccgcgagttcgcgctgaccttgacgatcgcggtggtgacctcggcgatcgtctcgctgacactgacgccgatgatgtgctcgcggctgctcaagaacatccatgaggagatggcggtcccgggcctggccgcggtcagccgcttcatcgaccgcatggtggaattctatcatcgcacgctgctctgggtgctgcagcgccagcgcgcgacgctgctggtgacgttcgcgaccatcgcgctgacgctgatcatgtatgtgctggcgccgaaggggtttctgccgctgcaggacacttcctcgatcacggcggtgaccgaggcaggaccggacgtttcgttcgacgagatgcagcggcgccagagcgcagtctccgacatcatcaaggccgaccccgacgtcgtcggcgtggtctcggtgatcggctccggctcggtcaatccgaccaccaatgtcggccgcctggtgatgacgctgaagccgctcgatcagcggcgcgatggcgtcgctaacgtgatcgagcggctcaagcagaagatatcgatggtccccggcatgacggtctacttccagccggtgcaggacgtgcagatctcgacccagtcgagccgttcgcaataccagtacacgctgaccgcgaccgatgccgccgaggtctcgcaatgggcgcggaaacttgtcgccgaaatgcggcgcgacccgatcttccgcgacgtctcgtcggaggcgcaggagggcggcttgcgcgcggcgctcgacatcaaccgccagcgcgccggccagcttggcgtcagtctccagggtgtcacggatacgctgaacgacgccttcgcgcagcgccagatctcgacgatctacggccaggccaaccagtaccgcgtcgtgctcgaggcgctgccgatgtaccagcgcgacccgtcgattctcgacaagctctatctgcccggcgccaacggcgcgcaggtgccgctgtcggcggtggcaaccctggtccgcaccacggcgccgctcgcgatctcgcatcaggcccagtttccgtcggtctcgctcagcttcaacctggcgcccggcgaagcgctcggcgacgcggtcgaggcggtgaaggcgatcgaggccaggatcgggatgcccggcagcatcgtcggcatctattccggcgacgccgccgaattcgcgcgctcgctggccggacagccctggctgatcctggccgcgatcatcacgatctacatcgtgctcggcgtgctctacgagagctacatccacccgatcaccatcctgtcgacgctgccctcggccggcgtcggcgccatcctcgccttgatgctgtgcgggcaggacctctcggtgatcggcctgatcggcatcatcctgctgatgggcatcgtcaagaagaacgcgatcatgatgatcgacttcgcgctggaggccgagcggcatcagggcatgtcgtcctatgacgcgatcgtgcaggcctgtctgctgcgcttccggccgatcatgatgacgacgctggcggcgctgttcggcgcgctgccgctcgcgattgaaagcggcaccggcgccgagctacgcttcccgctcggcatctcgatcatcggcggcctgctgctgagccagttgctgacgctctacaccacgccggtgatctatctcgcgctcgaccgactcaaccggcggatcgagcggaccgtgccggagccaggtcccagcggcccgccgatcgcgggcaccaccgagggcatgcagtgatctcgatctcggagcccttcattcgccggccggtgggcaccacgctgctggcgatcgggctgttcctggtcgggatcgtcgcctacgagtttctgccggtgtcgtcggttccgaacgtcgatttcccgaccatccgggtctcggcgtcgcgtcccggcgccgatccctctgtcatggccgcgaccgtcgccgctccgctggagcgcaagctcggcaccatttctggtgtcgaccagatcacctcgacgagctcgctcggcaccaccagcatccaggtgcagttctcgatcggccgcgacatcgaccgcgcggcacgcgacgtgcaggccgcgatcaatgcctcgctcgccgatctgcccagcgacctgccgtcgctgcccaagttccgcaaggccaatccggccgcggcgccggtgttcgtgctggcgttgacctcgaagacgatctcgaccagcgcgatgtacgatgtcgccgacaccgtgctggcgcagcgcatctcgcaggtgcccggggttggcgaggtcaccgtcagcggcgccgaccagccggcggtgcgcatcgcgctcaatccggtgtcgctggccaatgccgggatcgcgaccgacgacgtccggcttgcgatcatcaatgccaatccgctcggccccgtcggcatcttcaacggtgaccgccagagcgagacgctgtcgatcaacaagcagatgcgcaccgcggccgagttccgcgacatcgtcatcaagagctcgaacggcaatttcgtccgcctctcggacgtcgccgaggtcgaggattccgtccgcaactcgcgctcgattgcctggttcaacaagcagccggcggtgctgatccagatcaccaagcagggtgatgccaacgtcatcgacaccgtcgacaacgttcgcaggctgctgccggaattgaagcagtggatcccggccggtgtcgatatctcgaccctggtcgatcgtaccggaacgatccgagccagcgtcgaggacatgcagttcacgctgctggcgaccgccattctcgtgatggtcgtggtgttcgtgttcctgcgccgcgtggtgccgacgatcgcggccggcgtgtcggtgccgctggcgctggccggcacctgtgccgggatgtggctggccggcttctcgatcgacaatctgtcgctgatggcgctcgcgatctccgtcggcttcgtggtcgacgacgccatcgtgatgatcgagaacatgtaccgcaatctcgagcagggcatggctccatatccggccgcggtcgaaggcgccaagcagatcggcttcacggtgctgtcgatctcgctgtccttgatcgctgccttcacgccgctgatcttcatggacgggatcgtcggccggctgctccgcgaattctcgctgaccttgacctttgccatcatcgtgtcgacgctggtgtcggtgacgatcacgccgatgatctgcgcgcactacatcaaggagacgacttcggatcacgccacctggtacgaccgggccatcgagggcacgctgtcgcgggtggtggcattctatgcgtcgaccctgcggatcgtgctcggctatcccttcctgaccctggtggtgttcttcgccaccgtcgcgctcaccgtgacgctctatgtcaagacgccgaagggctatttcccgaccgacgacagcggcttcgtgatcggctcgacgcgggcgtcggcggacatctcgttccagtcgatgctcgccctgcagcagcggctcgccgacatcgtgatggccgaccccgcggttgccggcatcggctcgtcggtcggctccggcggcggcccgggcggcgccacctccaaccgcggcaccatgttcatcagcctgaagccgccggaggagcgggcaggcatgtcgaccgcccaggtgatcgaccggctgcgccgcaacctgttcatggtgcccggcatccgcctgttcatgttcgcggcgcaggacatccgcaccggcggccggcagagcgattccgactaccagtacacgctcgcctcgaccgatctcgacctgttgcagaaatgggcgccgctcatcgccaagcgcatggagaccgtggagggcatcacggacgtctcggccgaccgcgatcccggcggcctgcagctcaacctcgcgatcgaccgcaggatggcctccagcctcggcgtccgggtgcaggatatcgacaacgcgctcaacaacgcgttctcgcagcggcagatctcgtacatctacacccaacgcaaccagtacgtcgtggtgctcgagatcgacccgagattccagagtgatccgtcgaatctcgagcgtatctatgtcgccggggccaatgatgtgcaggtgccgctgtcggcactcgtgcactaccagaagggattgtcggcgctcgcggtgtttcactccggcggcgtcccctcgaccacggtgtcgttcaatctactgccggacgtcccgctggaggtcgcgaccaccaacatccagcaggcggtcaacgagctgcatatgccggaaggcattcgcggcagcttcgacggcaatgccggcgacttcaacaagaccagcggtcggcagccgctcctgatcctcggcgcgctggtcgcgatgtatatcgtgctcggcgtgctctatgagagcctggcgcatccgatcacgatcatctcgaccttgccgtcagccggcctcggcgccttgctggcgctgcaggtgaccaatacgccgctgaccgtgatcgccttcgttgggatcatcctgttgatcggcatcgtcaagaagaacggcatcatgatggtcgacttcgcgctcgaggccgaacggcatcagggcctgtcgtcgcgggatgcgatcttcgaggcctgccgggcgcgcttccgcccgatcctgatgacgacgatggcggcgctgttcgccggcattccgctggtcattgcgaccggcccgggcaccgagctgcggcggccgctcgggatcaccatcatcggcggcctgttcgtgtcgcagatcctgacgctctacaccacgccggtgatctacctgttgatcgacaggctgcgccggcgtcgcgagccatcaggtgtgcacgcgccggcggaatagtttgaattgtgccgtcgtgagcgtatagcgaagcatgtccgaaccgaccgaagtcaaacccgacgtcaccgccgagatcgaggattgcccggattgcggcaagccgctgccgctgtgcatctgcgacagcgtcacgccgatcgaaagccgcatccagctgctgatcctgatccatccgcaggagcaggacagggcgctcggcaccgcgcggctgttggcgcggcatttcgagaacgccgtggtgcggatcgggctgtcgtggccgagcctggccaaggcgctcggccggccggtaccggatccgtcgcgctgggcggtgctctatctcggctcggccaaggtcgaggatctcgataccgaagcggagatcgtcgcgatcaaccgcaagggcgagctcgagccgcatcagcgcgcgatcctgtccgacatcgagggcatcgtgctgctcgacggcacctggagccaggccaaggcgctgtggtggcgcaatgcctggatgctgaagtgccagcgggtgattctcgggccgaaacggccctcgctttacggcaagctgcgccgggaaccgcgccgcgacggtctgtccaccatcgaggcggccgcaatcctgctggccggactgcagaagcggcccgatatcgctgcaacgttaacggacagtttcgaacggatgctggcgcgattccgcgaagtccaggccaaaatgcccgaattggcgccaaaaccgaagaagaaggattatcgaaagcgccggcgctagttctgcggcttggttgcctatcgggcggagggcgtatatgaagtgcgccgcaaggggccacgtggcggagtggttacgcaacggtctgcaaaaccgtgtacaccagttcaattctggtcgtggcctccactcatctcatcaatggcttgcagccgacaaacgagaagccgccttagctcgcggcgtaccagccttcaggaaacggaatcagcggccacggcgcctggttgtcattggcggcgggcggcggtggctgaatgcggggcgagggctgggccacaatatcctcctgagcaataggcgcgatcgcggttcgcacggcgtctagcagcagatcaaattcgacttcgctcatcgcgctctccgaggttcgagagcgccatggtcgcaaaactgtcttcggtccggattgaacgattcgttcgaattttatgaaaagaacgatggcgtccgctttggtaaataaatgactgatgagctccttcgggaacctaggtcggcaccgccgcacctcgtgtgggacaaatcacatcttacgaaaaactcttcccggaattcccggcgatattcatagcagacaaatatcgcaggaattttagcgagacgtgacaatggtgtcaggtcaactcggcgaggtcgtgcggcagcatggccttgaattgcgccagcgcctgccgcgccttcttcggcggcagcgtgatcgcgtggcgcacggcggctgcgatcagcgtcatcgtcagtcctgagaaggtggcgagggtggcggccggcatgccgggcgcgatccgcctgatcgcgtcggacaacaggccggcaagcacggccatgtcgtccgcatcgagcttctgcagcgcgcgatcggcctgcgtcgcctgccagatgtcgcgcatgacaggctcgcgcatgaacatctcgtagtagctgtcgacgatccggcaaagcgccggatgcaggtcgcgcgcggccgcgactgcggccaggtcgcgcctgacgcactcgcgtccgaccgcgttatgccgttccgccagcgtgccgatgatcgcggccttgtccgggaaatattgatagagcgagccgaatgcgacgccgctgcgttcgacgatgtcgctcatgcggaatgcctcgctgcccttttccgccatgatctcggtcgcgcaggcgaggatgcgctcgaagcgctcgcggctacgctgctgcgccggggcaagccgcgccagcccgggcaggggagcgtccagcaccggcgtggccccttctgttgcccccggcgcagcctttcgtctggccaccatcgctctccttcgaaatcggttgacgcctcaaatacgagagtttatcgcttttgacaaacacgaggatttctcgtatttggaggtgaatcgatgcgcaatgtcctgacctcgggcttgctgtggttttccgcgctcggctgcggccagatcgccgggctctatttcgcgttctcggcgttcatcatgaccgcgctcggccggatcgatcaggccgccggcatctcggcgatgaacgcgatcagtgtctatatcctgcgctcgccgttcatgccggtctttatcggcaccacgctgtcctgcgccgtgctggtcgtgctcggcgggctgcgatggcaggagccgggcgccattgcgatgatttgcggcggcgtcctctatgtgcttgggatgttcatcgtcaccatggtcttcaacgtgccgctgaacgaccagcttgcggccaccgatcccgcgagcgccgcggctgcgccggtctgggcgcgctatctgatcgactggaccttctggaaccacgttcggaccgtcacctcgctggcggcgaccgcgatgttcatcgtagccatcgctgcgcgctgaccggcgcttcgcatcagcctccgcagtctcaacgtgctgaggctgcgctacgatcccggcaccaagaccacgtcgttcattgcggaatgacatcggggcgggcggctggcacctcgtcccagaatcacaggcgccgcggaatggccgcgccggcgggatgtgcgggcgccgctacggcgatggctcgacggccggaacagccctgcattgcgcccgggacgccggcaaacccttgcaacgcagtggtttaccgtcccgcgctaaagtttcgccggagcccctatttggttctttgcaagcccgaaaggctttgttatacgctgcccgctcgcgaacaatttgttcgcctattcctcggtagctcagcggtagagcattcgactgttaatcgaatggtcgctggttcgaatccagcccggggagccagctttgctggccccatccacgtcccgccatcgacactcacaagcgcgtggtccgcaacatgcagaccaaaatcgtcgtcaaatcgactcaatagccgtcgacactgcgtgttgccgggtcttgagaggtgattctgatgccgattaatctgatcgacctgtcgatgccgcagccgacgctcgttccgaatgatgcgcccgagatcagcgacgatgagtgtgtccgccggctcgcgcaggccgtcgagcaacatgattccgagcatctcgatgaggtggcccgcctgatcagccggcttgccgtcacgatcgaatagcgccccgcgccaccggttccgcacgccaacggcgtgttgcgttttggcggagcttgttccaaaagatggccctgttctagcttctccagcggcaatgccgcgacttgcagggtcccgccaatgaccggtttttcgaccgcgcgccagtacatggtcgatggtcaggtgcgtccgagcgacgtgaccgatgatcgtattctcgaagccatgctgagcgtgccgcgcgaggtgttcgtgccggccagcaagcaggcgcttgcctacctcgacctcgatctcgacgtgaccgagggcggcgcggtgagccgctgcctgatcacgccggcgctgctcgccaggatgctgcaggccgccgagatcaaggcctccgaccgcgtcctggtcgtcggctgcgcaaccggctatgccgccgcaatcgtggcgcgctttgccgcggaggtccgtgccaccgaaagtgatccggcgctcgccgccaaggcgaccgcagccttcgcccagctcgggatccagaatgcgaccgtcaagaccgcggctgccgccgacggcgatgccgcgggcgcgccctatgacgtcatcgtcctcaatggtgcgaccgagatcgtcccgaccgggctgtttggacagctcaaggaggggggccggctggtcggggtgttcggcctgacgccgccgccgcgcgccaccctcgtgacccactcccacggggatttcggacatcgcgagctgttcgacgccacagcccccgtgctgccgggactggagcggcttcccgcgttcgtcttctgaccctaccgcgctgcgccagctgataaaatcccgttctgaatcagaagtgtggcccgtttgccccatgtgaagagtttccaccatgttccgttgcggggtggttccgttgcccttagctgcggactaaggtgaggcgggactcacttcgtctgaagcgaccgccggaactgacttgcgtgtggagacggcgactacaatgattggattaccggggatgcgaggggtgaaggctatcaccgcggctgcgactgccgtccttctgttggcggagatgggccccgtgcccgcactcgccgaaactatcgagtccgcgctggtgcggtcctaccagaacaatccccagctgaacgcacaacgcgcccaggtgcggtcgattgacgaaaacgttccgcaggcactctcgggttaccgtccgaaggtctcgctgaccgcaaccgccggcggacaatacaccgatgagaaattgacggcgggaaccccggcggtgtccggcgtgagccggcagcgcaccgtcggcatcaccgccaaccagtcgttgttcaacgcgcagaatgcgccgaaggtgcgccaggctgaaagccaggtgtcgtcggcacgcgaaggtttgcgggtgctggagcagagcgtgctcctgagcgcggcgacgatctatatggactatctccgcgacgcggcgatcgtcgaggttcagcgcagcaatacgcgcgtgctggaacagacgctgaagcagacccaggaccgcttcaacgttggcgaagtgacgcgcaccgacgtcgcgcaatccgaggcccagctcgcggcgggcagaagccagcagctcaccgtggaatcgaacctgacgacgacgcggtcgaactaccgccgcatcatcggcgtcgagccgcagaatgtggcgcccggctcgccggtcgaccggttccttccgccgacgctctccgccgctgtcgagctcagcctgacccagaacccgaatgtcaccgctgcgatgtacggcgtcgacgtcagtttcctgcagaccaaggttgccgaaggtgcgctgctgccgtcggttgcgctgcaggcaacggtcagccaaggctacgagacgcagttgactgtgtatcgcctgttcaatgcgtcggtcggtgttcagctgtcgctgccgatctatcagggcggcacggaatactcgctgatccggcagtccaaggaatcgctggcccagcagcgtctggtgctggaccagaccagggatcaggcgcgcgccaacgtcgtcaccgcctggggccagctggtcgccggcaaatcgcaggtttcgtcggcgcaagcgcaggtgaccgcgtccgaaatcgccttgaacggcgttcgcgaggaagccaaggccggccagcgcaccacgctcgacgtgctcaatgcgcagcaggcgcttgtcaacgcgcgcaacgcgctcgtcaccgcgcagcatgaccgcgtcgtcgcatcctacaatgtgctgaacgcgatcggccgcctgtcgccgcaggtcatgggccttgcgaccaacgtctatgatccgagcgtgcactaccagcaggttcgcgacaactgggccggcgtccgcacgcccgacggccgctaaacaccttcgctttcatcatcgcttgtcgcgccatgtttgtggttctgagttaatcaggaccacgaacgggcgcgtttgcttgcaatcgatatttggcctgacataccgttttgtcgggcagcaaggcgattcgcggcgagccggcgtagcgtgatgacaggtgcgacgccacctgtgatcacgctgcattgggcgacacgaagcttgcagaatggcctcgggtgggcgtgatctggggacaagtcgggcgggagcaatgaaaatctccgcccgcatcatcggaaccggcgaatcctctcgggcttgatgtaaaatagtttcgatgtggagtcggagatgacgcaacctgcgaaggtccaagagccctcgatggaggagatcctggcgtcgatccgtcgcatcattgccgacgacgaggcgaagccgggcgcgaccgagaagccggcggctgccgctgcaccaccgcctccgaaggctgagcccgcgccacctccggcagccaagcccgcgatgaagagcccgccacccgtagcgcctccggccgcaaaggccgcagcgcccgcgccgaaagcaccgccgcccgcaccggcagcggccgccagcaacagccaggacgatatcgattcgcttctggccagcctcgacgaggcgacgcccgcggccgagatcaggccgtcgccgcagcccgaagcccaatccgaagctgatgtgttcgagctcaccgacgacatggcgctgccggagccggctccggcgccgtcgttccgcaaggtcgagccggaggacgacgtcgagttcacggaagcccgtggccgggcaccagcccaacaacccgttcgagaaccaccggcgatcgaaccggcgccgatgcagcagatcatctcgggaaccacgatgcgggcggtcgaatccgccttcaactcgctggccaacacggtgctgagcaacaatgctcggacgctggaggatctggtcaaggagatgctgcggccaatgctgaagtcctggctggacgacaatctgccgggtctggtcgagcggatcgtcaaggccgagatcgaacgggtctcccgcgggcggtagctccgcgcggctgcgagggcctggcagccctcatttcagcccccaaatgcccaaatcgcccaaaacgccgttttgacgcgccggtccggttgacttggtgcgctccggcggctttctaacctttccccatggtccacagcgcattgtcatgatcgagaaaaactaccagcccgccgatatcgagcaccgcatggcccggatctgggaggagagcggggcgttcaaggccggcaggcccgagcgcaaggacgccgcgcccttcaccatcgtgatcccgccgccgaatgtgaccggttcgctgcacatgggccacgcgctcaacaacacgctgcaggacatcctgtgccgtttcgagcggatgcgtggccgcgacgtgctgtggcagcccggcaccgatcatgccggcatcgccacccagatggtggtcgagcgccagctgatggaacggcaggagccgggacggcgcgacatgggccgcgccaaattccttgagcgggtctggcagtggaaggccgagagcggcggcaccatcgtcaaccagctcaagcgcctcggcgcatcctgcgactggtcgcgcgagcgcttcaccatggacgaagggctgtcgcgcgccgtcgtcaaggtattcgtcgaactgcaccgcgagggcctgatctacaaggacaagcgcctcgtcaattgggacccgaagctgctcaccgcgatctccgatctcgaggtgcagcaggtcgaggtcaagggccatctctggtacctgcgctatccgatcgaaggccgcagcttcaaccccgacgatccgaaatcgttcatcgtggtcgcgacgacgcgccccgagacgatgctcggcgacaccgcggtcgcggtgcatccggacgatgagcgctacacggacctggtcggcaagcatgtcatcctgccgctggtcggccgcaagattccgatcgtcgccgacgattattccgatccggagaagggctcgggcgcggtcaaggtgacgccggcgcacgacttcaacgacttcgagatcggcaagcgccacggcctgccacagatcagcgtgctcgaccaggaaggctgcctcagccttgtcggcaacgaggactatctgcgcggcctgcctgttggcgccgacgagttcgccgccgagttcgacaagatcgagcgcttcgccgcgcgcaagaagatcgtcgcgaggctggaggagttcggcttcctggagcggatcgagcccaacactcacatggtgccgcatggtgaccgctccggcgtcgtgatcgagccgtatctgaccgaccagtggtatgtcgacgccaagacgctggcgcagccggcgatggccgcggtgcgctcgggcgaaaccaccttcgtgccgaagaattgggaaaagacctatttcgagtggatggagaacatccagccctggtgcatctcgcgccagctctggtggggccatcagatcccggcgtggtacggccccgacggcaaggtgttcgtcgccgagaccgaggaagaggctgtcggcaacgcgctcggctattacgtcgagcaggaggtcattacgccggagcagggccacgacatggccacggaccccgccaagcgcgagggcttcatcacgcgtgacgaggacgtgctcgacacctggttctcgtcggcgctgtggccgttctcgaccttgggatggccggacgatgtgccggaggttgcgcgctactacccgaccaacacgctggtcacgggcttcgacatcatcttcttctgggtcgcccggatgatgatgatgggtctgcatttcatgaagcaggcgccgttctcgaccgtctacatccaccgtctcgtccgcgacgagaagggcgccaagatgtcgaagtcgaagggcaacgtcatcgatccactcggcgtgatcgacgaatacggcgccgacgcgctgcgcttcgcgctgacccgtgaggcggcacagggccacgacatccgcctgtcgccgcatctggtcgagaccaaccgcaatttcgcgaccaagttctggaacgcctgccgcttcgccgagatgaacgagtgcgtgaagccggacgggttcgatccgaagaacgcgaaggaaaccttgaaccgctggatcgcgcacgagacctcgcgcgtcacccgtgaggtgaccgagacgatcgaggatcatcgtttcaacgatgcggcagccgcgatctaccggttcgtctggaacgtgttctgcgactggtatctcgaactcgcaaagccggtgctgatgggcgaggagggcgcggccaaggccgagacccgcgccatgatcgcctggacgcgcgacgagatcctcaagctgctgcatccgttcatgcccttcatcaccgaagagctgtgggccgtgaccgcgaagcgcgacggcctcctggtgctggcgtcttggccgcgcaaatcgggcgtgaccggcgagcaactggcggcgatcgcgaccgccggtccagtcgtcgacccgatcatccctccggtcattgccgcgctcgacgccgacgagttcagcgatcccgcggccgaagctgagatcggctgggtggtcgatctcgtcaccacgatgcgttcggtgaaagcggagatgaacattccgccatcgacgctgacgccgctggtgatcgtgaccaactcggatgaaacgcgggaccgtgcgcggcgctggaacgacaccatcaagcggctcgctcggttgtcggagatctcgttcgcggacgccgcgccggaaggcgcgatgcagctgctggtccgcggtgaagtcgtcgcattgccgctgaagggcgtgatcgatcttgccgccgaacgggcgcggctcgagaaggagctcggcaaggccgacgccgacatcaagcgcgtcgacgcaaaactctccaacgagaagttcgtcgccaacgcgccggaagagctcgtcgaggaagagaaggaaaagcgcgcggcagcgcaggaacgccgggcgaagatcctcgaggcgatcgagcggctgaagaaggcgtcgtagcggacgccttgagtagacgccttggcgttcaaaaccgcttgctgaggaacttcgatcccttcagcccgtagcgccagggcagctcgacggccttggtgatgccgatccggatcccggtgacgatgtcgggcgtctccagccgggcgtggagcgcgatcggcggacggtccagcggcagctcgctatgggcgatggtgatgcccatcgcttcgcacagcttgcccggccccgagcatagcgcgcgttcgtcctccagcccgcgccgccggcgcatcgcggcgagcccatgggtcggctcgatcgcgcggatcagcacggcgctggccgagccagcttcctcgcagacgaaattgacgcaccaatggatgccgtaggaacggtagacataggagaagcccggcgggccgaacatcacctggttgcgcggggtcggtccgttgaacgagtgcgccgccggctcggtgtgatggtaggcctcgacctcggtgatgatgccgccgaccccgccgaccaggaaggtcgcgccgatcaggtcgggcgcgacctcaaggacgctgcgatcgaagaaggagcgtttcagcgccttgccgaggcgcggcacggtcgcacgggtcgagcggggtttttgagccattttgaggtgggaatcggcgtggaacggaccgcaacactgccaatatctgggctgatctgctagggtcgcggtgcgggttgcgagccgcgtcaacaccgattagctatggtttctcgcgacttgcaggcacctatggtcaccattgtcgacaccatctccaccacccagctccgcccgcgccaccccgaaaaggtgaaccggccggatgccgtatcgccgccgaagccggactggatccgggttcgcgcgccgaacacgcgcggctatgcggatacgcgcaagatcgtgaaggagaacggcctcgtcacggtgtgcgaggaggcgggctgccccaatatcggtgagtgctgggacaagaagcacgccaccttcatgatcatgggtgacacctgcacccgcgcttgcgcattctgcaacgtcaagaccggcatgccgggcgcgctcgacgccaatgagcccgaacacgtcgccgaggcggtgtccaagctgggattggcccacgtcgtcatcacctcggtcgatcgcgacgatctcgctgacggcggcgcggagcatttcgcgcaagtcatccgcgccatccgtgcgcgctgcccgaccaccacgatcgagatcctgacgccggacttcctgcgcaaggacggtgcgctggagcgcgtggtcgcggccaagcccgacgtcttcaaccacaatctggaaaccgtgccatcgcgctatctgacggtccgtcccggcgcgcgctatttccattcgatccggctgttgcagcgggtcaaggagatggacccgaccatcttcaccaagtcgggcatcatggtcggtctcggcgaggagcggcatgaggtgctccaggtgatggacgatctgcgctcggccgaggtcgatttcctgaccatcggccagtatctgcagccgacgcgcaagcatcacgccgtgatgcgctacgtgaccccggacgaattcgcgggctacgagcgcgtggcctataccaagggctttctgatggtgtcggcgagcccgctgacacgctcgtcgcatcatgccggcgaggattttgcgaaactgcaggcggcacgcacggctcgtggccgctagtactttttacctcggtgagccggtgccagcccgtgctcgaccgaaccttggactggaccaatgcagcgcgttctggtgatgggatcgtccgggtccggcaagtcgacttttgcccggcggctgtccgctctgacgggtatcccgaccgtgtcgatcgacgcgctgttctggaagccgggctgggtcgagtccgacaaggacgacttcgagcgtcgcatgatcgaagtcgcgcgcgagccgcgctggatcatggacggcaactacaccaggaatggtgcaggtgaactgcgccgggagctctccgatacgatcatctggttcgacctgccgcggtcgacctgcatgcttgggatcctggggcgcattgccgggagctacggtcaggttcgccccgagatggcggctggttgcccggagaagattgatctcgagttcttccgctacgtctggacctatcgcgagcagcagcggccgaagctggtcgaatatttcgagggcctgcgccccgatcaatcgctggtctgcttcacagcccggacccaggcggacgattacctgaagagcctcgcacgccagcaaaaccgtgcgagtatccactgatgccacgattctccagcaagcggcgggtccgccacaccgcacctcaaatgttcgatctggtcgccgacgtcgagcgctatccggaattcgtgccgttgtgccaggcgctcaagatccgtcagcggacgcccaaggacgacggcaccgaaatcgtggtcgccgacatgacggtctccttcaagctggtgcgggaaaccttcaccagcaaggtgacgctcgatcggcccaacttgaagatcctggtcgaatatctgcgcggcccgttcagcaatctggagaaccgctggagcttcgagccgaagtcggagaccgaatgcgatgtcggcttcttcctggactacgaattcaggagtcggatgctggcgatgctgatgggctcgatgttcgacgccgcattcggacgctttgcgcttgctttcgagaagcgggccgaccagatttacggcaagccgcagctgtcaacgtaagcgctctcgttgcgaaacgcgccgcaatgcgtccgcgtcgatcagcgggtgctccgatgcggcagtaccggtcgagcctggcaaaggccaacgaggacagcacgaggatcgcagctccgatcaccgtttccgcactttgcggcgtgccatagatgtagtgctctccgatcatggtgacgatcggtacaaaatagaatacgacgccgattttcgacgcctgatgtcgtgacagcagatagaggagcagtacgttcgcgccaactgacacgacgagtatcatccatgcggcggagatcaggaagccgacatccagcgtggctcgccaaccggtcaccgccacgactgttccgaagacgagcgccgagccgatatattgccaaacgatcgagcgcgcgacggcgacgccgatttgcttctgcaatgcggtcccaacggtgatggccagaagcgcaatcaccccgaacccgacacccgaaacggaaccgtcgcctaccgcgcgtgtgccgacgacggccaataccagtcccaagaatgcggccagcaagagcaccatgccccgccacggcaccctttctcgtgcgatccagggggtgagcagaggctgagcacccagtatgatcgtgagggtgctgggtgacagtccgtgggcgatagccaggaaataggcgccttggtagcccgcctgtagcaacaggccgaccgagatcgcccaaaggacggttcgaccaggcagggccagggcggcgcgaaagtcggatcgaaacgccacgagcaggacgaccgagagcacaagcgtcgcgccgatggagcgaacggcaaggaacgtccaaacggacgaactcatgaggccaagctttacgaaaattgcaccgctgctccacatgaccagaaacagcattggggccacgacgctcagcgaggcgtggtgtccgggccgcatcgtcgttgcagcgcgatccggcgcccgacctgaaatccgagcgggcgccgcatcatccaggtctcctggctcgtcggcggatccatcagtcatcaacgtgcccaacgacttcctgcatcgcagcgcgcgatcatattgtcatttggctaaatgacaatatgatcggcgcatggaacgatccgcacagatcagagcgctggccagcgaagccaggatgctgatattgaggctcttggccaggcctcggaggcacttcggccatcaacggtcggccgatcccgtcgaagttggggtttgcatgacgctgatcgcggaggcccttgcgattacgcaacccaccgcaagccggcatcttgagattctcaagcgcgcagggttcatcgcggttcgacggcaccacaaatggtcttactgcaagcggaacgaagctgcgattcaggatcacctggaatggatcaggcatgagcttcagatccgaaacggatctgccggagctgcaagcagcacgcgccccgctcaatcccgcgctcgcatggcgcgctgagaattgctgacggagcccggatgctcgcgacagctacgcaccgacgcggcgaggttccagagcgttggcggcatgaggattgtttcatgccgatcctgaccgcgacctgcaaacgtgcgccgctgtaccgaaggttcaggtcaagccggcggtcgacctgaaccagtttcatgttgacggccttgggccgtcgattttgattaggctggtcaactcgtgaccgactgttgcggatcggaaatcgttccgcgcgccgacttacgggcaggaacggcgcacgccgccggaggcgatgtaggtgccggatgcgggatcgtaggagcggaaacgccgggagcaataggcgtcgttgttggccttcgcctggctcgccgcgatcgcgccgccgatgatcgcgccggccgcaagcccgccgatcaccgcgccggcattgccgcggccgtgatgacggtggccgtagtagccgccgcgatagccaccgtggtaaccgtgacgcgggccgccgtgccagtggcggtactgcacgtgcgcgacggagctgggctggccctgcaaatgcgcgggcgcgagcggcgcggcagctgagggtgcaatcgtggtcagcgtcatggcgcccgcggcaattgcggccacgaccaaagttcccaacttcatcattttctccttgttgtgggattgcggttgaaacaccgcatgttggaacggaagaaactgcgaagcgacgtcagggttccacttgagatggtgtcactaagtcgcaattgacacgaccggcccatgcccgacctgacgtgaccaggattcgcgcgatgggacgacactgccggaagtcttgcgaagaatttcgcgcagagtgtcggattctccccgtccacgtcgtccttgggtcatctcgatgataatcacccagggagctcgaagtgagaaagattgttgttggcgccttcatcagcctggacggcgtcatgcagtcccccggcggcccgcaggaagatccgatcggcggcttcagcttcggcggctggttcgcgccgctgttcgacgagaagaccggcgaggtcatcggcgagatgttcgccagtccgttcgatctgctgcttggccgcaagacctacgacatctttgccgcgcactggccctatgtcgacaagagcgatccgatcggcccgctgttcgatcgcatcacgaaatatgtcgccacccgcgacgccacccgcaagctgagctggcagaacagcgagacgcttggggccgacgccgtcggcgctttgaagaagttgaagcagtccgacggaccgaatctcctcacccagggatcgagtgattttctcaagacattgctggccgccggcctcgtcgatgagctcaatctcttcatcgcgccgctcatcctcggcaagggcaagcgcctgttcgccgacagcggccagccaggcaatctgaagctggtgtcttcgcaggtcatgccgtccggcgtcatccacgccaaatacgttccagacggcgaggtgaagaccggctcgttcgaattcgatacgccaactgaggcggagctcgagcgtcgcaagaacctgatgtgaatcaagagcgggtcagcatatggaggccggtgccgcggccggtctcatccgcgcggcggccgccgccgtttcgcggcgtggctgcgcggcgaacgggccactcgtggtcgcaaccggctggcagtctctcggcggggttttgcggcctgcggcgggcgcgcgagttccatcagcatgcgcagcgcctcgacgacggaacgctgccgcaccgcgctgcggccgatcgcgccgaaccgctgctcacgatggaggatgcggccgtcgcgtgcggcgacagcgaaatgcacgaggcctaccggcttgcctggcgtcgccccgccggggccggcgattccggtgatcgagaccgcaaggtcgacgccggccttctccagcgcaccgatcgccatcgcggtcgcggtttccttgctcaccgcgccaaacgtctccagcgtcgccgcctttacgccaagcatcacccgcttggcctcgttcgaataagtcacgaagccgcggtcaatgacgtcggacgaaccggggatgtcggtgagcgcgccagcgaccaggccgccggtgcaggattcggcggtcgcaatcgtgagcttgcgcatccggcacaggtcgagcagcgagcgggagagggcacgagcgtcgctgccgcccatgtcaggcactccggcccttgtcgtcccaaccttgctcgtcccaaggcaggcggaccgtggcgctcgcggtcgccgcgatgccttcctcgcgaccggtgaagccgagccgctcgctggtggtggccttgactgcgacgcgcgagatgtggacaccggagatctccgcgatcttcgcccgcatggtgtcgcgcagcggaccgatcttcggccgctcgcagatcagcgtcacttcgaggttggcgatccgcccgccgcgcgcggtaacgcgctcgacggcatatttcaggaattggtcggaggaagcgcccttccacttggcatcgctcggcgggaagtgcgagccgatgtcgccgtcggccagcgcgccgaggatggcgtcgaccagcgcatgcaatccgacatcgccgtcggaatgggcaaggaaccccttgctgtgcggcacgcgcacgccgcagatcatcacgtgatcgccttcgccaaaggcatgcacgtcgtagccggtgccggtcctgatgtcgccgagctggctggcgagccgcgcttcctcgcgcacgaagtcttcgggggtggtgagtttcatgttggcagcatcgccttcaaacgtcgcaacggtcaatcccgcccattcagcaagcgcggcatcatcggtgaaatcgctgcggccctcgcgcgcggcacgacgatgcgcttccaatattacgtcgaaacgaaacgcctgcggcgtctgcgcgatccgcaggcgcgcgcgctccggcgtcgcttcgacatcgccggtatcgccggtgagcttgatcgtgtcggtgacgggaatgacggggatcgccgcgccggtccggccggctgccgcgatcgcgcgtgagatcacggcttcggtcacgaagggacgggcggcgtcatggatcagcacgatgtccggcttctcggcggcgagcgcctcgagcccggcatggaccgaggcctgccgggtcgcgccgcctggtgtcggcggtcggtgacgaaggcccgcgaccgcttcatcgaacagcgcggcatcgtcaggattgaccaccggctgcaccgcaaagacgtcaggatgtccggagaacgcctccatggcgcggtagatcacggtctgcccgccgatcgtccgatattgcttcggaccgcctgcgccggcgcgaagtccacggccggctgcgacaagaatagctgcggtacgctcaagcttcggcattttgaaccagtgacagacgaatctgggatgagggggacggcggggatcgcccgccgcgcacagcccttagcatgaccgctgcgcaaaaacagagcgtttgccgctgactgtgggaaaagcagattttgttgcggtgcacttgcgtcggtggtacaaatgtctaaaccgtaggcatgagccttgactgcacaagaattgtgcgcagaatagacgatgtcagctgcaatggcgtggctgcaaaacgacgagacggctgtgaccggcgtgcaaagtactcctcgtaacccattgaaaataggcgatattgctgtcgccaaccgggttcttcttgcgcccatgtccggcatcactgacgcgcccttccggcgactcgctgccactttgggcgccggcctggtggtctccgagatgaccgccagcgacgatctggtgaatggcaagccgatgtcgaagctgcgttgtgaggcagccgggatcgggacgcatgtggtccagcttgcgggctgccaggcccattggatggcggagggcgcgcggatcgccgaggacgccggcgccgacatcatcgacatcaacatgggctgcccggcacgccatgtcaccggcggccagtctggctcggccctgatgcgtgacctcgaccacgcggtcacgttgatcgatgcgaccatcgccgcggtcaaggtgccggtgacgctgaagatgcggctcggctgggacgatcgctcgctcaactcgcccgagctggcgcgccgggccgaagcctcaggcgtgcagatgatcaccgtgcatggccgcacccgctgccagttctacaagggcgaggcgaactggaacgcggtgcgcgcggtcaaggacgccgtctcggtcccggtcgtggtcaacggcgacatcacctcattccacaaggccgtcggcgcgctgcagatgtcgggcgccgacgccgtcatgatcggccgcggcgcccaggggcaaccgtggctgcccggccagatcggccgccggctcgagaccggggtcgccgaaaccgcgccatcgctcgccgagcaactcaagcatgttcgcgcgctctatgacgagatctgcagccattacggtctgcgcatcgggctcaagcatgcgcgcaagcatctcggctgggcgctggagaccgcggccgcctacagctgcgcaccaacggccacgttgaaggcctggcggcaggcgattctgaccgcggagcagccgtccagcgtgcatcgctcgctcgaggacgcctacgacgattttgcctggagtgctgccgcatgacgtcagccatggaatttcgccggcccgtgcctaccgatggcgaggccatcctcaacgcgctgcccaatccggtgctgctggtcgcacccgacggccggatcgtcgacgccaatatcgccgccgaatccttcttcgagatctcgacccaattcctgcgccggcagtcgctgaaggagctggtgccgttcggcagcccgctgcttgcgctgatcgagcaggtgcgggccagcggctcgccggtcaatgaatacaaggtcgatctcggcacgccgcggatcggcggcgatcgccaggtcgatcttcacgtcgcgccactgaccgagcggcccggccacatcgtggttatgctgcaggagcgcaccatcgccgacaagatggaccgccagctcacccatcgcagtgcggcgcgttcggtgatcgcgctggcggcgatgctcgcccatgagatcaagaacccgctgtccggcatccgcggcgcagcgcagctgttggagcagcaggcctcatccgaggaccggcttttgacgcggctgatctgcgacgaggcggaccgcatcgtcacgctggtcgaccgcatggaagtgttcggcgacgatcgtccggtggcgcgcggcccggtcaatatccattccgtgctcgaccatgtgaagcggctggcgcaatccggctttgcccgcaatgtccgcttcatcgaggactacgatccgtcgctgccgccggtgctcgccaaccaggaccagctgatccaggtgttcctcaatctggtgaagaacgcggccgaagcggtcgccgacctcggcaccgatgcggagatccacctcaccacggctttccgcccgggcgtgcggctgtcggtgcccggcaagaaatcgcgggtctcgctgccgctggaattctgcgtcaaagacaatggctcaggcgtgccggaagacctgctgccgaacctgttcgatcccttcgtcaccaccaagcagaccggcagcgggctcggcctcgcgctggtcgccaagatcgttggcgatcacggcggcatcatcgagtgcgagtcgcagccgcgcaaaaccactttccgtgtgctgatgccgatgtacagcgtcgccaagcaacacgaccaaagcaaccgcgatgacgttccgggtacgtcctcgcctgcctctcaggatgcacgatgaggaacaccaatgcctgcaggtagcatacttgtcgctgacgacgacaccgccatccggaccgtcctgaaccaggcgctgtcgcgcgccggctacgaagtgcgcctgaccggcaatgccgccacgctgtggcgctgggtcagccagggcgagggcgatctcgtcatcaccgacgtggtgatgcccgacgagaacgcgttcgatctgttgccgcggatcaagaagatgcggccgaatttaccagtcatcgtgatgagcgcgcagaacaccttcatgaccgcgatccgcgcctccgagcgcggcgcctacgagtatctgccgaagccgttcgacctcaaggagctgatcaccatcgtcggccgcgcgctggccgaaccgaaggagcgggtctccagtcccgccgacgacggcgagttcgactcgatcccgctggtcggccgctcgccggcgatgcaggaaatctaccgcgtgctggcgcggttgatgcagaccgatctcacggtgatgatctccggcgagtccggcaccggcaaggagctggtcgcccgcgcgctgcacgattacggccggcgccgcaacggcccgttcgtcgcggtcaacatggcggcgatcccgcgcgacctcattgagtccgagctgttcggccatgagcgcggcgcattcaccggcgccaacacccgtgcttccggccgcttcgagcaggccgagggcggcacgctgttcctcgacgagatcggcgacatgccgatggaggcgcagacccggctgctgcgcgtgctgcagcagggcgaatacaccaccgtcggcggccgcaccccgatcaagaccgacgtgcgcatcgtcgcggcctccaacaaggacctgcgcatcctgatccagcagggcctgttccgcgaggatctgttcttccgcctcaacgtagtgccgctgcggctgccgccgttgcgcgagcgcatcgaggatctgcccgacctgatccggcatttcttctcgcttgccgagaaggacggcctgccgccgaagaagctcgatgcccaggcgctggagcggctcaagcagcaccgctggccgggcaacgtccgcgaactggagaacctcgcccggcggctcgccgcgctctatccgcaagacgtcatcaccgcctcggtcatcgacggcgagctggcgccgccggcggtgacctcgggcagcaccgcgactgtcggcgtcgacaatctcggcggcgcggtcgaggcctatctgtcctcgcacttctccggtttcccgaacggggtgccgccgccgggcctctatcaccgcatcctcaaggagatcgagatcccgctgctgaccgccgcgctggcggcgacccgcggcaaccagatccgggccgccgacctgctcggattgaaccgcaacaccctgcgcaagaagatccgcgacctcgacatccaggtctaccggagcggcgggtagcaggagcgggcaccggcgcgaggactcacgacagttattgagtagtcacaaatggttttgcggacatcgagccgcactgcggtttgcgccgcggaaatgtcgcaattcggcaacattgtgatatgattgcatcagttcgcaattcccgcgggcgatcgctctcagctcaattgccggtatgaccagcgcagacaccaccgcttcaacgttacacgcgtcaccggccgagccccgagcagaggcgcggggctttccgttgcggcgctggctggcgccgttcgccgtggccatcgcgctgttgtccgccttcctcaccttcgtggtgctgaccggcctgaccccgatcgagccgacgcccgaggtggtccgctccttcctgctgatcaatgccggctcgatcctgctgctggtcggcatcattgtccgggaagtctggcagatggtgcaggcgaggcggcggggccgggcggcggcgcggctgcacgtccagatcgtcggcctgttctcggtgatcgcggtgctgcccgccgtgctggtgtcgatcgtcgccaacgtcacgatcgagcgcggcctcgaccggctgttctcgggccccaccaagcaggtgatccagaactcgctgaccatcgccagcgcctacatgcaggagcatgcccagctcatcaacggcgacacgctggcgatggccaacgacctcgcccatgcgcggccactctacgaccaggaccgcatgacgttcctgcagctgatgacggccggcgccgagtcgcgcaacctgccggtcgcggtgttgatggacaaggacggcaagatcgtcgccagcgccgaaaccggcgtccggctgaactacgaggcgccgccgcccgacatcctgaaggacatcaacgaaaccgagccgaagatctcggtgttcccggaaaactacgtcgcctccgtggtccggctgcgggcctatgacgacatgttcctgtatgtggcgcggctgctcgatccggctgttgtcgcccaactcaagcagacccagaccagcgccgccgaatatgcccaggtcgagacccagaggctcggtgtccaggtggcgttcgcgctgatgttcgcggtgatcgcactgaccatcctgatggcttcggtgctgatcgggctgaacttcgccaacgggctggtgtcgcccatccgccagctgatgggcgcggcgagcgaggtctcgaccggcaatctcaatgtccaggtgccggtgcataaatcggccagcgacctcgcgctgctcggcgaaaccttcaacaagatgacccaggagctgcgcacccagcgcaacgagctggtcgacgccagcgagacgatcgacagccgccgccgcttcatcgaggcggtgctgtcctcggcctctgccggcatcatcggggtcgacgcgtcgggcagcgtcggcatcctcaatcggtcggcggaaaagctgatcgggcacgccgagtccgagacgctcggccatccgctctcggacgtgctgcccgaactcgacgagatgatgaagaccgcgcgcgagggcacgcaacgcctggtgcagggccaggtcacgatcctgcgcgacggcaatgagcgcaatctgtcggttcgcgtctcggccgagcagaccagccagtcgcatgagagctacatcatcacgctcgacgacatcaccgaattggtctccgcgcagcgcacctcggcctggggcgacgtcgcccgccgcatcgcccatgagatcaagaacccgctgaccccgatccagctctccgccgagcgcatccgccgtaaattcggcaagaccatcaccgaagcgaaggacaagtcgatcttcgagcagtgcaccgacaccatcgtgcgccaggtcgacgatatcaggcgcatggtcgacgagttctcacgctttgcgcggatgcccaagcccgtgatggaaggcgaggacgtcgccgacgtggtgcgccaggccgtgttcctgatgaaggtcgcgcatcccgatctcgccatcgaggccgacatcaagcagtcgccgctgcccgcgcaattcgaccgccggctgatctcgcaggcgctgaccaacatcatcaagaacgccaccgaggcgatcgagcaggtgccgcccgaggagctcggcaagggccgcatcgacgtcgtggcgcagcgcgagaacgacgacgtcctgatcgacgtcgtcgacaacggcatcggcctgcccaaggtcgctcgcgcgcgcctgctcgagccctatgtcacgacgcgggccaagggcaccgggcttggacttgcgatcgtcggccgcgttctggaggaccatggcggccgcatcgagctcaaggacgcctccgatttccgcgagggccagcgtggtgcctggatgcggctgcgcttctccgtcacgggccaggcggccaagcccgagcacaagcctgaaagcaaggaacaaaaaccggacgcgacaccggacaagaccgaatccgacattgaaaaaaatccgccggaagagtcgaccaacggcccggcacaggcgaccaacaatgaaccaaaaatccaagaagcaaacagccaagagccaaatgcgcaagagccaagaagccaagagccaaaaatcaaagccgcgacgggcgactgacaaggcaggtgtaacccatggcaagtgacattctgattgtcgacgacgaagctgacattcgtgacctcgtcgcgggtatcctggacgatgagggcttctccacgcgcactgcgcgcgacagcgattcggcgctcgccgagatcgccaatcgccgcccgaacctggtcttcctcgacatctggctgcagggctccaagctcgacggcctgcaactgctcgaacagatcaagaaggacaatgccgatttgccggtcgtgatgatctccggccacggcaacatcgagaccgcggtcgccgcgatcaagcgcggcgcctatgacttcatcgagaagccgttcaagtcggaccggctgatcctggtcgcgacccgggcgctcgagacctcgcggctgaagcgcgaggtcaaggagctcaagcaactggcgccggcggcaagcgtgctgaccggccgctcggcctgcatgaaccagctgcgccagaccatcgaccgcgctgccaaggccaacagccgcatcctgatcgtcggtccctccggggccggcaaggagctcgccgcgcgcacgctgcatcatgcgtcgggtcgcgccgagggtccgttcgtggtgatcaatgcggccgcgatcacgccggagcgcatggagatcgagctgttcggcatcgagggatcgaacggcgagcagcagcgcaaggccggcgcgctcgaagaagcgcatggcggcacgctgttcatcgacgagatcgccgacatgccgcgcgagacccagaacaagatcctgcgcgtgctggtcgatcagaccttccagcgccagggcggcaccagcaaggtccatgtcgacgtccgcatcatctcctcgaccgcacgtaacctcgaggaagagatcgccgcgggccgtttccgcgaagacctctatcaccgcctgtcggtggtgccgatccgggtgccgccgctgtcggagcgccgcgaggacatccccgagctgatcgactatttcatggaccagatctcggccgccaccggcctgccgaagcggcagatcggacaggacgcgatggccgtgctgcagtcccatgtctggccgggcaacgtccgccagctgcgcaacaatgtggagcgcgtgatgatcctggccggcggcggaccggaggcgatcatcaccgccgacatgctgccgcaggacgtcggctcgatggtgccggcgatgccgacctccaacaatggcgagcacatcatgggcttgccgctgcgcgaggcgcgggaggtgttcgagcgcgattatctgatcgcccagatcagccgcttctccggcaatatctcgcgcaccgcggagttcgtcggcatggagcgttcggcgctgcatcgcaagctgaaggcgctcggggtcggctgacgctcaggggcggccgatcacgacgtgccctgggcaggcaaccgcccgcgacctggagcgaggccccggcgctcaccgccgggaccaggcttcggggccaggtagagcgccggcgaggcgagggcaagacacggtacagccggggatttatccactctccacgagaatattcgtctctttccttgcgctttcttagaattgccaccgtgttcctaccgactgcaccccgaaccggcttgcctaaaaaccgcgcgtggcctctaatcctaccgctacgcctgccagagggggatctcagggcaggtgggcagccggaggaggctccgtcagagagccgcaaccggttcaataaaaagaagcacaagcttgcgggacaaaaacaatggcggcagaccgcgcacaaaatctacaagacaccttccttaatcacgttcgtaaaaccaagacgccactgacgatatttctggtcaacggggtaaagctgcagggcattgtcacatggttcgacaatttctgcttgctgctgcggcgcgacggtcattcgcagcttgtctacaagcacgcgatctcgactatcatgccgggagctccgattcagctgttcgaaggtggcgaggacgcacctgcttgagagtgaactgattggaacccttcgatcgtgaagggggcgccgaccggaccaagtctaggcccgggtcggccgggaacggcggtaccgggcgagtcatcgtcatcggcccgtacctgcgcgcgcgccgtggcgacggcgacgcgcagccggattccgcgatccgcgactacgaagcacggatcgaggaggccgccggcctcgccggtgcgatcgacctcaccgtcgttgagtccgttgtcgcgccgatcagccagatccggcccgcgacctatctcggcaagggcaaggtggaggagatcaacggcctcgtcgccagcaacacggtcgaactcgtggtgatggattgcgcgctgtcgccgatccagcagcgcaacctcgagaaggcctggagcaccaaggtgctcgaccgcactggcctgatcctggaaatcttcggccgccgcgccaagaccaaggaaggtgcgctgcaggtcgagctcgcccatctcaactatcagcgcagccgcctggtgcggtcatggacccatctcgagcgccagcgcggcggcttcggcttcatgggcggccccggcgagacccagatcgaggccgaccgccgcctgatcagcgagcgcatcaccaagctcgagggcgaattgaagaaggtgcaggcgacgcggcggctgcatcgcgccggccgccagcgcgtgccctaccgcgtggtggcactggtcggctacaccaatgccggcaaatcgaccctgttcaaccgcctgacccggtctgacgtgcaggccgccgacatgctgttcgcgacgctcgacccgaccctgcgcgcgctcaatttgccgcatggcggcagagcgatgctgtcggacacggtcggcttcatttccaatctgccgacccaactggtcgctgcgttccgcgccacgctggaggaggtgctggaagccgacatcgtcctgcatgtccgcgacatctcccatgaagacgccgaggcacaggagcgcgacgtcgagggcgtgctgcgccagctcggcatcgatcccgacgccgatggcggcctgcgcatcatcgaggtctggaacaagatcgaccgcttcgatcccgaggagcgggacaatctgcgcaacattgctgcgcgccgcccgccggagcggccatgcttcctggtttcggccgtgaccggcgaggggatcgacgcattgttgaccgcgatcgaggatcgcctcgcggccaagcgcatcacgctcgacctgtcgatcgacgccgccgatggcgccggcatcagctggctgcaccgcaatgccgaggtcctgagcaaggagcttcatggcgagcggttcgacatgacggtgcgggtcgacgagaccaagcgcgacatcgtcgtgtcacgattcgatgctctgccgcacgggacgtagcgtcccggaagtccgagacggcaagggggatcgatgttcaatcgtcgggcatttctcggcggcggcctggcgagcgccgcggtcgcagggatttcaacgcgtggcgccgccgacaacgctgcgttcgtcgatgcccccgcactccggccggtccttgcgcgtccggaccggatgtttcgcgtcaccgtgtgcctgcgtcccttccgcgccgccggtccgcgcatcgaggcggaatggatcgacgcgaagtatgtcgtccacaattatggacatggtggaagcggctggtcgctgtcgtggggcgccgcgcaggaggccgtgccgctggccctgcaattgagcacgcgcaatatcgccgtcctcggcgccggcgcgatcggcctgacgaccgcaatcacagcccagcggatgggcgcgaccgtcacgatctatgccaaggagcgtttccctcaggtgcgctcggcacgcgcgaccggagactggtcgccggattcgcgcgtcgcgatggaagccgatgtcgcgccggacttcgccgaccgctgggagcgcatggcgcgcacgaccttcgcagcccatcaaagctatctcggccttgccggcaatccgatcgaatggacggatcgctatctgctctccgacgatgctcccgacgccgacggccgtccgcaccggcgtcagcatgcctcggccgacggccagaagaaattcctcgaactgcgcggccgcgtccggtcgctcacgccgcgatgggacttgctggccgccggatcaaatccatttcccgcgccgtacgcctggaaaagcgcctcgctgacctacaacgtcacggatctctatcggcaactggaggcagagtttcagcgcgccgggggcctcttcgtgccgatcgagttgcaggcgccgtccgatctttcgaagatccgcgaaaccgtcattgtcaattgcaccggctatggcgcccgtgcgttgtttcgcgacgagagcatcgttccggtgcgcggccagatcgcctggctcattccccagccggatgtcggttacggcgtcttctaccgtaacctcagcgtgctcggccggcgcgacggcatcgtcgttcagccggtcggcgagaacgactatttcggtttcaacgacgacaacgaaacgcctgactacgccgccgcgcgccaggcggtggaagacgcggcgaagctgttcagccgggcctgatcggccgcgatcccccgaaatgtgacggcgccgtgaggcggcctcactgctgcgcgcctgggacgcgccgccgcactttctgtttgaattctgcgccgccgtggttcattcgctgctggacgcacaggcgagggtgatcgatgcagaattcaggcgacaccatgacattggagacggtcgcgagcccgcacggggatatcgcccatgagcgggcgcccgaaatcgtcgaggcgctcaacgcccgggaaccggcggacgccgccaagctgctgcgctcgctgccggccgagaaggcgatcgaggtgctcgacctgccggggctcgacaacacctgcgagatcctggctgagctgccgacggacaccgcggtgtcgctgctgtcgggcgtctccgacgaccgcgccgccgacatcttcaaggagctggtcgagccgctgcgcaccacgctgctgaacgggctcaatccggagacccgcagcgtcatctcggggctgctggcctatcccgagcgcagcgccggcagcatcatgacgaccgagttcgtcagcgtgccctcgacctggaccatcgccgaggtgctgcatcacatccggatggtcgagcgcacccgcgagactgtctactcgatcttcgtgatcgacccggtcaagaagaccctgatccaggccgtgccgctgcgccgcctgatctcggccgacccgcacgccaatgtgctgaccgcggcgccggcacggaagccgctgatgatcgcccccgaggccgaccgcatggaggcggcgcggctgatctcgcgctacgatctgctcgcggtcgccgtcgtcgacggccccggccacatcctcggcatcgtcacggtggacgacgtcatcgacgccatcgtcgaggaatcgaccgaggacgcccagaagttcggcggcatggaagcgatcgacgagccatacttgcggatcggcttcggcgagatgatcaagaagcgcgccggctggctgtgcgcgctgttcctgtcggaaatgctgaccgcgaccgcgatgcagtcgtaccagagcgagctcgagaaggcgatcgtgctgacgctcttcatcccgctgatcatgagctccggcggcaactccggctcacaggcgacctcgctgctgatccgttcgctggcattgcacgaagtgcggctgcgcgactggtggcgagtcgcggtgcgcgaagtcccgaccggtatcgtgctcggctctatcctcggcctgatcggtattgtcaggatcgcgctctggcagaccatgggcctgttcgactacggcccgcattgggggctggtggccgcgaccgtcggcgccacgctgatcggcatcgtcaccttcggctcgctgtgcggctcgatgctgccgttcgtcctcaagcgcatcggcttcgatcccgccagcgcatccgcgccgttcgtcgcgacgctggtcgacgtgacaggtctcgtgatctatttcggcgttgccgcggttatcctgcgcgggacgctgctgtgaggtgaggcagcgtcctcaaactcgccgtcgtccctgcgaaagcagggacccataaccacaggccatcgttgttgagcgcagcagcagttctgcttgatcgcctcgacgaatctctggcgatgccgcgggaccgataccgccaaccaaccgatagatcacgcggtatgggtccccgctttcgcagggacgacagcggtggttgtggcggctgttttcgcctcgttccacagcgcatccatctcgtcgagcgacgcgttctccagtgaacgtccctttgccgccagcgcccgttcgatataggcaaaccgccgctcgaacttggcgttggtcgcgcgcagcgcggtttccggatcggcgtcgacgtggcgggcgaggttgaccagagcgaacatcaggtcaccggtttcctcggcgatctcctgcttgtcgttgcggtcgagcgcggcctcgatctcatcggcctcctcgcggatcttggcgagcaccgcgcgtgggtcgttccagtcgaagccgacggtggaggccttgcgctgcaactccatcgcgcgcgtcagggcgggaaggcccgccttcacgctcgccagcagcgatgtgtgcgcggtctcctctggcggccgacgtgccgcgcgctcggccttctcctccgccttgatgcgctcccaggcgctcttgacactggccggctggatgttgccgtccttgtcggcaaagacatgcggatggcggcggatcatcttcctggtgatcgcctcgaccacgtcgccgaaggcaaatgcgttctgctcctcggccatcctcgcgtgatagaccacctggagcaggaggtcgccgagttcctcgcgcagatcgtcgagatcgccgcgcgtgatcgcgtccgcgacctcataggcctcttcgatcgtgtagggcgcgatggtctcgaagttctgaatgagatcccatggacaccccgtcaccggtgtccgcagcgcggccatgatctcgatcaggcgggaaatgtcgcgggaaggggtcatggagcaccgctggatgagaggtcgagccgttatgccaaatcgacccagtcgatcccagcaaaacgcgccggaatcgcggcgccgtccaccgattggccgcagggcgaaggagtggtaaagcccgttccatgaccgaacagaacgcttccgacaccgcgctggtgctgttttccggcggccaggattccacgacctgtctggcctgggccttgtcgcgcttcgcccgcgtcgagatgctgggcttttcctacggccaacgccatgccgtcgaactggattgccgcgaccaattgctggccgggatcaaacagatgcggccggactgggcggcgaagctcggcgacagtcacacgctcgcgatcccgacgctgtcggacatttccgacaccgcgctgacccgtgacgtcgccatcgaaatgggcgcggacgggttgccgaacaccttcgtgccgggccgcaacctcgtgttcctcaccttcgccgcggcgctggcctaccggcgcggcatccgccacatcatcggcggcatgtgcgaaaccgactattccggctatccggattgccgcaacgacaccatcaaggccttgcagtcggcgctcaacctcggcatggccagaaacttcgagctgcacacgccgctgatgtggctcgacaaggccgcgacctggcggctcgcgcacgagctcggcggggcagggctggtcgatctgatccgagagcgctctcacacctgctatctcggcgaacgcggcgcgcaacatgattggggctatggctgcggcgagtgcccggcctgcagcctgcgtgccaagggttggcgggagtacgtcgcgcaggggggcgcgtaaccgcggctgatggcctccgcaggggcgcgccgccaaaatattgaaaacaaccccatgcaaaggagctggcggtcgccggcgttcgacacggcggcttgacacgtcgggcaactcagccttactattctaaaattcagaaatcgtgcagcttcggttcactgctttcgtgggcgccgctacccgaaatccgccgccgtcagtacgatcggttggccgtgcggggtgcggtcggcggcgtgatcccaggcgtcgcggtagcgatgcagcgtctcgtgcgtcgtgacgcccttggcggcgacaaggtgttcgagcgtcgccagccaatgctgataataggtttcgccggtgtcgggatcgccggcggcctgcgcgcgtttgatctggtcggcgagggccgccgcccattcgggccaggtgaacacgccgcggtcatgcagcgtcagtgccatcgcgaacgcctgtgcttcccagggcgcgcgaaacaccgggccgtcctgatcgcggggaatgctggacacggcactggtcgcgcgcgcggcggcgccggcatccatcacaccgcctccagatagggctcgaacgcgtcgatcgagaccttgatggtcggatccgagtccggcccccacagctcacgtccgtcgaacacgacggtgtacagccattgcggatgctcgccggcatcgttggcagccgtatcgggaaagacgtgacagccatgatcgcgctcgaccacgccgacatgaccgcgcacatagcgcggcagccgcgtgtgcgtggcgggatggatgttcttcgcccgcacccgatcgccggccttgaacttcgccggggccggcgccgcgcggccgaacttgccgcgcaccatgatgcgctcgacatcggggatcgagaacttgccgtgtttgagcgatttcgccggcgcgacggaatgtccggatgcgacgtcgtccttggagatatagcccttgtctagcagcagggcttccagcccaaggaaccattttttgtaataggagctcgacagatagacctgcgggggcagggtctcgcgatagaagcgcgaggcgtcgatgttgaaggcgccggccgcgcccatcgcacggaccatggcgagcacccgcgattcccattcctcatggaacatcggctcgttcggctcgggctcgaccttgccgaacccgtccatgccgcccatgtcgtggacgccgttcatgacggagctcccggcgtcttcgggaatccggtgccgatcatcgaatcgcgcgtcacgagctcggcgagctgctcctcgctccagccctcggtaccggcgggccgcatcggcagcaccaggaagcgcgtctcggcggtcgagtcccagacccggatttcggtttccttcggcaggctgacgccgaaatcggccagtacgccgcgcggatccttgaccgcgcgcgaacggtacggcgaggccttgtaccagaccggcggcaggcccagcatctcccaagggtaacaggagcagagcgtgcagacgaccatgttgtggcgaccgggcgtgttctcgatcgcgaccagatggtcgccgacccggctgacatggccgagggtgccgactgccttggaggcgtcctcgagcagcgcctgcttgaaggcgggatcggcccaggccttggcgacgacccgggcgccgttatgcgggccgatcttggtctcataggcctgcacgatggcgtcgagcgcggcagcctcgacatagcctttttcggtcaggatcgattccagcgcgcggacgcgcagttcggtctccgaaagttcggaatggtcgtgatcgtggtggtgatgatcatgttcgctcatgcccagagaataggcgaaaccgccatgctatgtcgaggcaagccgtacacaacaatgcgagctgggaggtatgcgtggttgactatgtgacgatcgaaaaaggcctcgggccggagggccgcatcgcggtggtgcggttcgaccgcggcgacgggatcaacgcgctgtcgccggaggcgctgcggcagctgaccgatgcggcgcgcagtttcgaggacgatgccgacacctcggtggtggtgctgaccggcggcgccaaatcgttcagcgccggcttcgacctcaaggatgccgaagggcgttcgcgcgcgaccatggacatgggcatgctgcgccgccacctgaagctcgggccgcggctgacgcgcgcctggcaggagatggagcaggtcacgatcggcgcgatcgagggcttctgtgtcggcggcggcgtggcgctcgccgtcgcgctggatttccgcgtcatggcgcgcgatgcgcatctgcgggtgccggagattgcgctcggcatgaacatgagctggcagagcgtgccgcgcatgctgcatctgatgggcccggcgcgcaccaagcaggcggtgatcctggccgacgaccggatttcggctgccgaggcctatgaatggggcttggtggagcaggtgactgatcccggcaaatccttcgaagccgcgatggcgttcgcggccaagatcgccgcccagccgccgatttcggtggcgatgaccaagctgacggtcaaccggctggcgcatgcgctcgacgatctcgccagccacatggatctcgaccagttcgcgctggcgagcctgaccgaggatcacaaggaaggcgttgcggcgttcctcggacggcgcaaaccgcgcttcagggggcgctgacgggcgtcactgccgtttggggatatcgcagccggagaggtcggcctcccagccgaaaactgatcggccgtcgaggcttggcgaacgggcgcgctcgttggccacgaacgcatcgaaggacgggccggttgcggtcagctccagcctgcgcgcctgatcgtccagccgcttgagtgcctgcatctcctcgtcgcggccgagcttcgcctgttgtaccgccgatttcagcacgccgatggtctcgtcatagaccttgatcggcaccggaaacggatgacggtctttgccgccatgcgcgagtgagaaccgcgccggatcgcggaaacgatacggcgtcccgtgaacgacttcagcgaccatggcgagcgactccacggtgcgggcgccgacgccgggtgtgagcagcagctcggggaagtccagcggcccgcgctcggctgcggcggcgagggtgccgtgcagacggcggatgaacacgtcgctcgagcgcacatcgtgattcgcaggcatgatcagatgcaacagatcgccctgtgccgccaccttctcggtcagctcggcatattcgcgcgcaacgccgtcgggaccgagcccggcaagcaaatcgagctgagcctggcgtgaggcatcggcgcggtggtcggtcagattgacgatctcgccctgcgatggtccgtcgatcgcgctgtgcggctcgtcaacgaagctgcgcaggccctcggaatgccagtgatagcgccgcgcctgccgcttgctgtcgctcatgccttgctggaccacggtccatttgccgtccgtggtgacgaagaagccgtgcagatagagctcgaacccatcctggaccgcggcgctgtcgaccttggcgaccagacggctggcgcgggtgagcgcaacgccgtcaaagccggtccgctcgcccagcgccgtcagttcgtccggcgtccggcgcgaatacctgccgcggccgccgcaaacgtagatgccgagctcgtcctgcagcggtgccagcccgcgcttgagcgcgccgatgacgctcgtagtgattccggacgaatgccaatccatgcccatcacggcgccgaacgactggaaccagaacggatgcgagagccgctgcaggaacgcgtcacggccgtaatgatggaccacggcctgcgtgatgatcgcgcccaacgtcgacatgcgctccgccagccacggcggcacgcgcccaccatgcaggggcagatcagcgctgccggtacgtcgggccatcggtctccaaaccttggatcacgccttcgatcgagcctcgatgcaacgtccgtgacgagaggcagactatcctcgccgatcagcctgtaatcgactcgttagcaacccgtcgaggatcgcgagggattgtggtcgccaaacgcctcgctgtcgaccccgcggaggcccgaccggaacatccgggcgatggccaagaagggccgccggcagccggatccggggctgccggcgactggcaattactttcggttcttgtccaggtcctgcgccatcgcgagatggtgcttgagcgcgagcagggtccgatcagcccagtccttcagcttcacatcctcgccgcccttggcgtagcgttcaaacagtgagaccgcatccttgtgggcgctgacctgcatcggatcatattcgctggcgaaattgtccggcttggtgttgcgcagcacgtcgagcttcttctgtgagctgtcgtcgaggccggtcggcaatgcagccttcatctcgccgctgaccaacgccttcaactcggtactggtcttggtatggtccgtgatcatctggtcggcgaacttcttttccgccgcattgcccttctgctgggcgatcttcgctgcttcgatctccagcatgtcgctcaaggccacttccttgatgaagtcttccgttttcggtgcgacgccaagcacggaattgacaccggtcttctcgccgaccgattgggccagcgcgggcagggtcagcccgcaactgatggcaatagccagaatagttcgcttcatgcgcgtctcctcaggccgcctcggcattgatggcgctgatggcgagcttgctgagggcttcatccgtcttcttttcctcggccagggtctggtcgatgagcttgacggcgtccttcatgttgagcttggtcgcccatgcttttagtgtgccgtaacgcgcgatctcgtagtgctcgaccgcctgggccgcagagactaggcccggatcgagcgccggcgtgtcggcatactcttccatgatctccttgccttcgtcgaggatgccctcgatggcgtcgcacttcttgccgcgcgccggcttgcccatcagatcgaagatctgctcaagccgatcgatctggccttcggtctcgtcatggtgcttctcgaaagccgcacgcaactgctcggattcggcggccttggccatccgcggcagtgccttgaggatctgtttttcggcgtagtagatgtccttgagggtgtccaggaagagggcgctcaggtctttctccggcattggtgtcgctccgtgggggttgatctgtacccacaacagggaccctgcaatgtcgttcctatctgtcctggttcaggcgcggacttatgactgcgcagctttgacgcatcgctcgccaggaacgaagcgtcggcgcacccgttggacgatctcatctttcaacggaggatcgcgatggattggaatcgtgtcgaaggcaactggaagcaaatgaagggtaagatcaaggagcagtggggcaagctgaccgatgacgatctcgatgtgatcgccggcaagcaggaccagctcgaaggccgtttgcagcagcgctacggctatgccaaggatcaagccacgaaggaagtgaatgactggtacggccgccaggaatggtgaccgctgcgcattccagggccccgcttgcggggccctttgctttgcgccgcttggaataggggccaatgtcaaacgttcaaggcgtgccgtcatcgcctcgagcaaggggcatccagccgatcacggtccgaccgacccagcctcgccgcgaggggattggtctatgactgaagttgaagcccgtatgacgcgaagacggtgccctaaccctcgcctagatactggctcggagcaatgccgaaggttcgcttgaacatcgcggcgaatgcgctggggctctgatagccgtgctccatcgcgacctccaggatcgatgcaccggcggcaagccgcggcaggctcagcatcagccgcatgcgtcgccgccactcgccgaagctcattccgagttccttctgaaacagtctggccagcgtacggccgctcatggcgcactccgccgccaggctttccagcgtgacctccgaagcagggtccgcgatcatggcgttgcagaggttggcgaggcgcggatgatttggcatcggcacgtgcatcgacaagcgaggcgccaggcgaacctcatccaggatcagccgcatgaccctctcgtcgcggctatcggtgtcgtagtcgagcggaatggcggtcgcggcgacgaccagcgagcgcagcagggcggagacctcgatcacctcgcagtccggtgacaggtccggtagcgcgtcgggcacgacgaacaccgtacgcatctccacttgtcccgcgatgcggatagcatgcgctatgccggccggcatccagaccgcgcgaccgctcggcaccacccagcttcccgatgggcaggtaacggtcatgacaccggctatggcatgcaccaattgcgcccgtggatggctgtggggtgcgatgatctctccatcgcagtggctgctcgccatcgcggcaagcggccgtggtgcaagctggcaggcttcgtgagtgcgggcgatgtccatttcacgacgattgttgacctaactgcgcgcgaatgacaagcggggcagggctatgacctctgacaaactgccaccgcggcggcgcttccttcagcgtctccgagcgcgggggatcattttgtgacggccgacggcgagttccgttggtcgaaggtctacgcatgtcaggttcaatgactcaactcagcttcaattcgactccgtccagcgccgcgaacatatccaccttcctgcggaccggccgccgctggttgccgcagattggcggtgctctcgccgggctgctcgcgctgacctatggcgcgcattggtggttgtcggaacgcttcatcgagacgacggacaacgcctatgtccgcgccgacgtcgccgtcatcagttcacgtatcgccggtcatatcgcgaccgtcgtggtgtgcgacaatcaggccgtccgccgtggcgacgtgctggccaagctcgatgacgcgccgtaccaggcaagacgcgaccaggcgaaggccgccgttgcggcagcgcaggctgatgtcgtcgtcgagacggccgccatcgcgacgatcgatgcgcagttggcgcagcagcgcagcctgatcgtccaggcgggcgccgagacggtgacggccgaagcggaggtacagcggacgtcgcttgaattgcagcgtcaggaggcgctggtcgcgcgcgaggttgcaagccgccagcgcctggagagcgcggaggcggaccagaaaaaatccgtggcaacgcttgccgcggggcgtgcggctctggccggccagcacgaccgcctgaccgtgttgaccgagcaacgacagggcaggctggcgacgctggaaaaggcacgcgcggccgtgtcccaggcacaggcgacgctggagctgtcgctcatcgatgtcgccaacaccgtgattcgtgcgccggtggacggcgtggtcggacagcgcacgattcgcgtcgggcaatatgtcgatcccggccagccgctgcttgcggtggtgccggtccaggctgtttacgtggttgccaacctgaaggagacccagctcgaccgggttatggtgggacagccggtagcgctcgacgtcgatgcattcgacggcgaaccgctgtccggccatgtcgagagctttgcgccggcgtccggtgcgcagttcgccctgctgccgcccgacaatgccaccggcaactttaccaagatcgtgcagcgcctgcccgtgcggatcagtattgatcccgggcaacatcgcgcagccgatttgcggccgggtctgtcggtggtcgcgaggattgatacgcgccgcggcgaagcgcagcgatgagcgctcaggagagggctgacggcgccgagccgaaggtcgagctgcgagcgtgggttgccgtgatcggcggcgtgttcggctgcttcatggccggcatgaatgtgcacgttaccaacgcctcgctgccggacatccgcggctcactcggagccaccttcgaggagggctcctggatcaccacggcctatctggtggccgagatcatcgtgattccgctgaccggctggctggtgtcggcattctcgatgcggcgggtgctgatcgtcggcaccacgggctttctgttgttctcggtggcgtgctcgctcgcaccgacgatcggcgccatgatcgcggcgcgggcgttgcagggcgcatttggcggggtcttgatcccattgtcgttccagctcattgcaaccgaattgccgctgtcgcgccgtccactcgggatggccctgttcgccgtcgccaacaatgtcgcgcaggctgcgggaccttcgatcggcggctggctgaccgacgtctattcctggcgctggatcttctatctgcagattccgcccgggctcgcgctgctggccgcgatcgccaggtcgatcaggccgcaggcggtgcacgccgccgggctgcgcaatggcgactggggcggcatcgcgacaatggcgctcggcctgagcgcgatgcagatcgtactggaggagggtggccgtagggattggttcgcctcacctttcatcgttcagacctcgatcctcgccgcgaccagccttctgctgttcgtcgtgatcgagctgcgcgccaccacgccgttcatcaatctgcggctgctcggccgttataattttgggctcgcgagcttcatgcagttcacctttggcgcggtggtgttcggcgtggtgttcctggtgccgaactattttgccgagttgcacggctacaatgcccgcgaaatcggactcgccatgattccctatggcctggttcagttcgcgatgtcgttcatgaccccgccgctgatgaagcgggtggggacgcgatggatcatcgtgctcggcttcgttctggtcagcattggctgcttcatgaatattcatctcgatcacgatgccgcgcgcaacgtgatcattccgtcactcatcgtgcggggcattggccaatcgctggtggtcgttgccttgtcggtcatggcggtccgcgggatcgaacaagcgcaacttgggtcggcttcggggctgttctcgacggttcgcaatgtcggcggtgcgatcgggatcgcgatcgcgagccagatcgtggtcgagcgtgagaagctccacgcatcgcggatcggcgaggcgatgacggtcttcagcccagaaacccgcgagcgcgtcatcgcgttggtacgccggttggggggcctctacgtggatcgtgtcgcagccttgcatgccgcagtcaccgcgccgctgcggcagcaggcgatagccttgctcgacagcctcgtccatcgcgacgcgctgatactcgcctatagcgatacgttcctgcttgcaggtatcgccatggcattttgtgcgctggcagctcttgtcttgaaggactcgtgatgagttggtcgtggggggccacgattggctgtggcgcaggcttgcttggagccacgggtataatcagaattcgcataaggtatattatggaatatttatatctacaattagatcagatatttagtgggaaatcttcgcattggacagcagcacggcgtcggttcagacctgtctcggccgttgctggggctcgcccggacaatcgtcgcggttcacatgcaagcgtctcgtcagaaagccgatattgccgcggcgtacggacgctgcaataagccccagctgtgcagagatcgctggtgaccccgcggcatcaggtccgtataggatggcatctcagaacaacaacaagcctctcgagggagcaacaccaatgagcttttcacgacgcacgctgctgaaggtttccgccgcttccgccgtcctgggcggaattggcgcgccgtatgtcgcgcgcgcccagtcggccgagttctcctacaagttcgccaacaacctgccggaatcgcatccgctggtggcgcgcgcccgggagatgtctgcggcgatcaagaccgagaccaacggccggttcgaccttcaggtgttcccgaacaatcagctcggctcggataccgacgtgctgagccaggtgcgctccggcggcgtcgagttcttcacgctgtccggcctgatcctggcgaccctggtgccggcggcttcgatcaacggtatcggcttcgcattcccggactatcccacggtctggaaggccatggatggcgacctcggcgcctatgtccgtggcgagatcaagaaggccggcctcgaggtcatggacaagatctgggacaacggcttccgccagaccacgtcgtcgaccaagccgatcaacggaccggacgacttcaaggggttcaagatccgcgtgccagtgtcgccgctgtggacctcgatgttcaaggcgttcgacgcctcgcccgcctcgatcaatttcagcgaggtctattcggcgctgcagaccaagatcgtcgagggccaggagaacccgctggcgctgatctcgaccgcgaagctgtatgaagtccagaagtattgctcgctgaccaaccacatgtgggacggcttctggttcctgatgaaccgtcgtgcctgggcggctctgcctgacgatatcaagaccatcgtcgccaagcacgtcaacgcggccgccgtgaaggaacgcgaagacaccgagaagctgaacgcgaccgtgaagcaggaactcgcgggtaagggtctcgtgttcaaccagcccgaggtcgggccgttccgcgacaagctccgcaccgccggcttctacgccgagtggaagggcaagtacggcgacaaggcctgggagctgctcgagaagtccgtcggcaaactgtcctgatcgtcaagcgggaggctcgccagcgggagatttgctatggctcatgtcgagatgacgccggccgtggccggcgaggcggcgtcacagccccctcgccgccgctctgttctcggtgccatcgatgcggcgctgggatggctggtcgaaatcccggcggcgatccttgtcgtcgccgaggtcgtcatcctgttcgcgggcgtggtggcgcgctacgtgctgcacacgccgctgatctggtccgacgagctggcgtcgatcctgttcctgtggcttgcgatgttgggatcagtggtcgcgctccgccgcggcgagcacatgcgcatgacggccttggtggcaagcgccggaccgcggctctgggcctatctcgacgtcgtcgcgacctgcgccgcgctggcgttcctggtcctgatcgtgcacccggcctatgaatacgcctacgaggaaagcttcatcacgacgccggcgttgcagatctccaatacctggcgcgccgcggcgctgccggtcgggatctgcctgatggcgttgttcgcgctgctgcggctggcccgcgccggcgatttcaagaccttcctgctggccgccctgacggtggttgccttgatcggggtgttctggctggcgcaaccgatgttgcggccgctcggcaacctcaacctgatcatcttcttcgtcggcgtggtcggcttctgcgtgttcgccggcgtgccgatcggctttgccttcgggatggcgatcttcggctatctggcgctgacgacgcggacgccgttgatggtgctggtcggccggatggacgagggcatgagccacctgatcctgctgtcggtgccgctgttcgtgttcctcggcctgctgatcgaaatgaccggcatggcgcgcgcgatggtggccttcctggccagcctgctcgggcacgtccggggcggcctgcactacgtgctggtcggcgcgatgtatctggtgtcaggcatttccggatcgaaggccgccgacatggcggcggtcgcaccggtgctgtttcccgaaatgaaggaacgcggcgccaagcctggcgatctggtcgccctgctcgccgcgaccggagcgcagactgaaaccattccgccgagcctggtgctgatcacgatcggctcggtcaccggcgtctcgatctcggcgctgttcaccggcggcctgctgccgggcgtcgtgctggcaatcaccctgtcggcgctggtgtggtggcgttaccgcggcgaaaacctcagccacgtccagcgcgccacgcgaagcgagatcggcaaggccttcatctacgccctgcccgcattggcgctgccgttcgtgatccgctacgcggtggtcgaaggcatcgccaccgcgaccgaggtctcgaccatcggcatcgtctatgcgttcctcatcggcctcctgatctatcgcaagttcaactggcggcggctcgtgccgatgctgatcgacacggcgtgcctgtcgggcgcgatcctgttcatcatcggcaccgccaccggcatggcctggggcctgacccagtccggcttctcgcgggcgctggcggcggcgatggccggattgcccggcgggtcggcgaccttcattgcggtgtcgatcctggccttcgtgatcctcggcagcgtgctcgagggcatcccggcgatcgtgctgttcgggccgctgctgtttccgatcgcgcaccaggtcggcgtccacgaggtgcactatgccatgatcatcatcctggcgatgggcatcgggctgttcgcgccgccgttcggcgtcggctattatgccgcctgcgccatcgggcgcgtcgatccggccgagggtatccggccgatctggggttacatgctggcgctgttgatcggcctgatcatcgtcgccatcttcccctggatatcgatcggtttcctttagagcacctagcggatgggatagagccatgagtgcagctcaaaatcagtactcgatcgggctggacaagacatcagccaattacgtgccgctgacgcccctgagcttcctggcgcgctcggccgcggtctatcccgaccatgtcagcgccgtctatgaggggcgcagcttcacctggaagcagacctatgagcgctgcaagcggttcgcgtcctatctcgcgggccatggcatcggccatggcgacacggtcgcggcgatgctgccgaacatcccggcgatgaacgagctgcatttcgcggtgccgatgaccggcgcggtgctgaacgcgctgaacatccggctcgatgcggcatcgatcgcgttccagctcgaccatggcggcgccaggattatcctcgtcgatcccgaattcgccggcgtgatcgcggaggcgttgacgctgatggagggcccgaagcctttcgtcatcgacgtcgatgatgccgcattcagcggcggcaagcggatcggcgcgatcgagtatgaggcggcggtcgcggcaggcgatcccgcattcgccgagcggccgccggccgacgaatggaatgcgatcgcgctgagctatacgtcgggcacgaccggcaatccgaagggcgtggtgacccatcaccgcggcgcctatctcaatgccgtcagcaacatcctcgccggcaatctcggccagcatccggtctatctctggacgctgccgatgtttcattgcaacggctggtgcttcccctggacgatcgcggcgaccgccggcgtcaatgtctgtctgcgcaaggtcgatcccgcaaaaatcttcgagctgattccgaagcacggcgtcacccatatgtgcggcgcgccgatcgtctacaacacgctgatcaatgcgcctgacgcaccgaagggcggcaaggtgaagccggtcacaggcctgatcgccggcgcggcgccgccggttgcggtgctcgagggtgccgagcgcatcggcatcaagctgacgcatgtctacggcctgaccgaggtctacggccccgcttccgtctgcgccgagcagccgggctgggacgagctgtcggccgatgcgcgcgcgcagctgaagcggcgtcagggcgtctcctatccgctgcaggaaggcgtcacggtgctcgatcccgagaccatgcgcgaggtgccgcgcgacggcgagaccatcggcgaggtcatgttccgcggcaacatcgtgatgaagggctacctgaagaacgagaaggcgacgcaggaagcctttgccggcggctggtttcacaccggcgatctcggcgtgctcgacgcgcacggttacgtcatcatcaaggaccgctccaaggacatcatcatctccggcggcgagaacgtctcctcggtcgaggttgaggacatcctctacaagcacccggccgtgctgttcgcggcggtcgtcgcaaaacccgatccgaaatggggcgaagtgccctgcgcgttcatcgagctgaaggacggcgccaaggcgaccgaggccgaaatcatcgcctattgccgcgagcacatgtcgggcttcaagacaccgaaatcggtggtcttcggggcggtcccgaaaacatccacgggcaagatccagaaattcctgctgcgcaacgaggtcggctcggccaaggcgatctcggcctgagccgtggcgctcagccctccgcgaggcggccgagcagatcgtacaggagcttcttctggtctgccttgagcggcgccagcgtcgtcgccgtgcattcgatctcgatcgggatcagttgctcgaccagcgctgtgccggacgcggtcaggtcgatcaggaccagccgcttgtcggtcggatcgcgccgtgtcgcaaccagacgccgcttcttcagccgcaagacgacgtcgcggatattggcgggctccatcgcaaccaggcgtcccagcagattctgcgacagtgccccgcgctcgtagagccgggccagcgtcgcgtattgcggcgctgtcagatcgtaggagccgatccgctccacaaggttggacgacgcgcgctgataggcccgacgcagcaggaaaccgacctggtcctccagcctatagtccggcgcgacacgccttgctggtgccgctgctttagtcgacgttctcggcatcgcggtacatcaccttgtggcgcgtggtcgaaacccattcgtcaatctgggcttcggtcatgaagtgctgatcatcgaacctgttccagttgctgatgtcggtgaggctcttcttccagcgcttgtagggcggcttggccggcggaccgaagcacatgatgtcgagcacggacaattcgtcggggatgccgagcagcggcttcatcgcctgctgagccttctcctgcccgatcgcggtcacccaccagacattatagccgagggccgccgccgcgaggtgcgccgacatcgtcgcggccgccacgctctgcagcaggatccgctcggcattctgcttgtacatcttgtcgagctcggagccgtcattgagtaccggaaacgccttgacccagcggaagtcgctcgcgaccacgatgaagcccggggccgatgcgaggccgcgatagtcgggcgtcgggaacttcatcttgagccgggcgcgggcgacctgctcctcgcggaaatactcggtgatcctgttcttcagctcctgatcggtgacggcaatgaagtgccagggctgcgcatttgcgcccgatggcgcgtgccgcgccgcctccagaaccatgtcgtaatgctcacgcggcatcacgtagccggaatcgaaggcgcgtgtggtcagccggttcttcacgacgtccatcagcgcgtcatatcgcgtgcggtccgtatagtcccgcgcggccaaagcctctgccattgggtcctcccgatattgttatgatcataacgatatccaaagtccgcgaaaggtcaatcccgggctgcgaaggcgggcggcagcctggcgtgcggaatcccgcgcgatcggatgaacgcgcgcggcccggtcgtcacggtcgttgacgtcttcagcccgcccggtcgagcgtcagccgcatgccgtcataggccgggatcacgccggccggcaggctctgccgcagcacctcgtagtcgaggtcggaatgcatgttggtgatcacggcgcgcttcggcttgaagcgttcgatccacgacagcgcatccgcaacgctgaaatggctcggatgcggcgcatagcgcaggccgtcgacgatccagagatcgaggccttgcagcgccggccagctctcctcgggaatgtcgtgcagatcgggcgtgtaggcggcatcgccgatgcggtagccgagcgccggaatccggccgtgctgcaccaggaaggcctcgagcttcagcggaccgcccttccccgtgaccgtatggctctcgccggcctcgatcgaatgccgggttaggatcggcggatagtcgctgccttcaggcgagatgaagcaataggagaaccgcgccatgatgtccttggcggtcgactggttgaagtagaccgggatgcggcggcgctggtgcagcaccaccgagcgcagatcgtcgatgccgtgggtctggtcggcatgctcatgggtcaggaacaccgcgtcgatatgctcgacactggcgtcgatcaactgctcgcgcaggtcgggcgcggtgtcgatcacgacccgcgtggtgccgtgctccatggtgcgctcggccatgatcgagcagcggcggcggcggttctttggattgctgggatcgcaggcgccccagccgagcgccgggcgcggcacgccggcggaagagccgcagcccaggatggtcagtgtcagcgtcatgcagctaccttcggcgtcggcaccttggagaacagccggaagaagttttcggtggtctgccgtgagatatcttccagcgagacgccgcgtgtttcggcgagcaccttggcgacctcgacgacgtaggacggctcgttgcgcttgccgcggaatttgccgggcgcgagatacggcgcgtcggtctcgaccatgatgcggtcggccggcagctcggcggccagcgcgcgcagcgcgtccgacttcttgaaagtcaggatccccgtgaacgagatcgacagcccaagcgcaatcgccttcatcgcgagctcgcggccgccggtgtagcaatgcagcaccgccttgaacgggcccttcgcgacttcgtcctccaggatgcggccgcaatcctcgtcggcctcccgggtgtggatgacgagcggcaggccggtcgcgcgtgcggccgcgatatgcgcgcgaaagccccgctcctgcgcctcgcgcgagccatgctcatagaaataatccagccccgcctcgccgagcgccacgaccttcgggtgtttggtcagctcgatcagctcgctggccggaatgccgtcctcttcatcggcgtgatgcggatgggtgccgaccgagcagtagacgtccggaaagcgctccgtgatcgcaagcaggccgccgagccgcttcacccgggtcgagatcgtgaccatgcggccgatgccggccgcttcggcgcgggcgacgatcccgtcgagatcgtcggcgaagtcggggaaatcgaggtggcagtgactgtcgaccagcatgaatttcgagccgctcactcggtcttcggttccacgtagcgcgggaacacgccgaccggcgccggcagcaccgtgcccggcctgatccgctccgcgatcgccgcgaagtcgcgggcatctgctgctatcccgaggctgtcgagcatcttgccgcaggactcgggcatcaccgcctgcgccattatcgcgatctggcgcacgacttcggcggtgacatagagcaccgtcttctgacgcgccggatcggtcttggccagcgcccacggcgcttcgcccgcaaagtagcggttggcctcggcgaccacggcccagaccgtgttgagccattgatggatctgctgcgtggccatcgcggtccgcgacgtctccagcatggcgtcggcctgcgccaggatcgccttgtcgttgtcgctgaactcgcccggctccggcaggacgccgccaagctgcttggcgatcatcgacagcgaacgctgcgcgagattgccgaaatcgttggcgaggtcggcattgatgcgcgcgacgatggcctcgtggttgtagttgccgtcctggccgaacggcacctcgcgcaggaagaaatagcgcacctggtcgacgccgtactggtccgccagattgaagggatcgaccacgttgccgaccgacttcgacatcttctcgcccctgttgaacaggaagccgtgggcatagacgcgcttctgcaggggaatgccggccgacatcaggaaggccggccagtacaccgcgtggaagcggatgatgtccttgccgatgatgtgcacgtcggcaggccagtagcgccagtgcttgtcgctttggtcgggatagccgacgccggttatgtagttggtcagcgcatcgacccagacatacatcacgtgctcgggatcgttcgggaccttgacgccccagtcgaacgtggtgcgcgagatcgaaaggtccttcagcccgccccgcacgaagctcatcacctcgttgcggcgggaatccggaccgatgaaatcgggctggctctcatagagatgcagcagcttgtcctggtaggccgagagcttgaagaaataactcttctcctcgacccactcgaccggcgtgccctgcgggccgcggcggacattgtcctcgccgactttggtctcatcctcggcgtaataggcctcgtcgcggaccgaataccaacccgcatagctgtcgatatagatgtcgccattgtcctgcatgcggcgccagatttcctgcaccgacttgtggtgagcaggttcagacgtgcggatgaagcggtcgaacgagacgttgagtcgctcgtccatctccttgaaccgcgcggcgttgcgggtggcgagatcgtacggcgtcatcccctcgccctgcgcggtctggatcatcttctggccgtgctcgtcggtgccggtcaggaagaacacgtccttgccgtcgagccgctggaagcgcgccagcgcgtcggtcgcgatcgcctcataggcgtggccgatatgcggctggccgttcggataagcgatcgcggtcgtgatgtagtagatgttgccgcggtctgcggctggcgccgcgacggcggcggatacaggtgctgccgcggccggcctgggttgctttggtgcgcgaaccgctgccggtctcggcgccttctcggcggccggagccttcggcacagcgggcttccttgcagccgtcgcaacggccaccgcggcggccttcttcggcgcggtcttggtggccttcgccgcagccttcttgacagccttcttggccgtcttcttcgcagccttcttcacggtctttttggctgccgtcttcgctcccgacttgttggctcccgtcttggtcttggcggcctgcttcgccttcttggcgacgcgcccacccttcttggccgtgcgcgacttcgcagcggccttcctcgtcgcgcgggcgggcgatgccttcttcgtcttcttggccttcttcgacgatgtcttcttagcggtcgccaccacggaatcctttgcagatcgaaacgagattgtcgggagttttgtcggacggatgtgttgtcagacagatgtgttttgggacttggcgtctatcgggtcgcatccgcgagcatcgaaaacaccgagaaaaccagcggcttgcgctccagattgtaggcttcggtatcgcgcgcggcgcgaacgatcttttcccatacctccgcgagccgtgcaaggcgcggcagattggcattggcgtcgccggtccgcatccgctcgctcatccagcgatcgatgccgtcgatgaaggcggcgagcgcgacgcggtcgctggtgccgagcgcatcgcccagcgcatgcagctcgcgcggatcgacgcttggaagcgttgccagcagcgcagccgtacgttgttgcagcttgagggcgtcgccgccgagcagcgacagcgcccgcccgacgctgccttcggatgcggccgcggcttccagcagcgccgggtcttcagcgtcgatatcggttgccgccgcggctgcgcgcacgacgtcgtccgtctccagcggccgcagcagcaatttgcggcagcgggacaggatcgtcggcagcacccgcgacggcgcgtgactgaccaggaggaacaacgactgctgcggcggctcctcgaggattttcaagagcgcattcgcagcgttgggattgagctcgtcgacggtgtcgacgatgcagacgcgccaaccgtcgaccgcggccgtcgagccgaagaacgagatcgtctcgcgcgtctcgtcgaccgtgatcacggtgcgcatcacgccgcggtcgttgaggccgcgctccagcaccaagagcccgccatgggcgcccgccgtgatctgccgcgccaccgcatcggacggatcgacccgcagcgtcggcgccgcctgaacctgcgacgatttcggattgcggaacgccagcacaaagcgcgccatgcggtaggccagcgtcgccttgccgacgccctgcgcgccgccgatcagccaggcatgcggaatccgcccgctgcgataggcatcgagcaaggtggcctcagcctcgcgatgtccgaacagatcggacgtttcgcgcggatggcgggcagtgcgctcctgttcgaccttgcgcgcgctcatgctggactgtccgccgtgagcgtcgcgcgcagatgctcgcgcagcgcggcccatatcgtagctgtgaccgtgtccggatcgggcgtggcgtcgatcaggacgcagcgctccgggtcttcggccgcgatccggcggtacgcgtcgcgcaaatcctggtggaacttgatgccttcggcctcgaagcggtcagccgtggcgttgccgcggcgcgcggcggcgcgttgcagtccgacctcgaccggcacatcgaggatgaaggtcagatcgggcttgagatcgccgatcgtcacgcgctgcatcgcgttgaccagttcgggcgacacctgcccgagctggccctgataggcgcgcgtcgaatcgaagaagcggtcgcacagcacccagatgccctggttgagcgccggcaggatcaccgtgcggacgtggtcgtcgcgcgccgcggcaaacagcagcgtctcggcctcgggcccgagcagcttgcccattccggacagcacgaggtgacggatgatctccgcgcccggcgagccgccgggctcgcgggtcacgatcacgcgcagcttggcggtgtcgagccgctcagcgagcttgcggatctgggtcgatttgcccgaaccttcgccgccttcaaaggtgatgaagcgaccgcgcaagctcggccgttggactgctgcttccgccatgtcagagtttctcgacccctgcgcggaacatgccgatgacgagctcctgggcaccgtcgagcgcgcggcgcatcgtcgatcccgtgccgacggcatcagccgcgaacaccggcgcctccatcgcgacattggcgccgcgccacacgcgcaccaccccgatcttctggccggcggcgatcggcgccttgacagggccgctatagatcacgcgtgcgagcagcttgtcgttgccgttcttggacaccatcaccttgaccggatcgggactgacgagcttgaccgagcggctctcgccgccgaacacccgggcgtagccgaccggctggttggctgcgatcaaggtccgggtctcgaagctgcggaacccccattccagcatcttcttcgcctcggtcgcgcggtcttcggagtcctcgagaccattgacgacgacgatcagccttgtgtcgttctgcaccgcggagccgaccatgccgtagccgccttccttggtgtatccggtcttcaacccgtcggcgccgggcaaggcattgagcagcggattgcggttctgctggcggatcttgttccaggtgaactccttctcgccgaacagcttgtactggtcgggataggcctggatgatgtggcgcgccagcaccgcgagttcccgcaccgtcatcttgttggtcgggtccggcaggccgttggaattgccgaaggtcgacttcgtcatgccgagctcgcgggcgcgcttggtcatgaagtcggtcgcgaacgtatgctcgttgccggcaatgccttcggcgagcgcgatgcaggcgtcgttgccgctcgggatgatcgcgccgtgcaggaggtcgtcgaccgagaccttgctgttgatcgcagcgaacatcgtcgaggtgccggacggcgccccgccccgccgccaggcgttctcgctgatccggtattcgtccgtgagcttgatgtcgcccttcttgatggcgtcgaacaccacctcggcggtcatcagcttcatcatgctggagggcgcgcgcagctcgtcggcattcttctcgaacagcacgctgcccgaggaggcctcgaccaggatcgcggtcggcgcgtcaccgtcgaatccggcgtcttccttcttggcgccctggacgctgttgttggcggcatagaccacgccgccgcagccgatcgccagcgcgaccgcggccgcgatcaggccgcgcccggcgcgagctgacaacgtgcggggaactgcggtctgggctgccatcggcgatgtcctgaaagactgcgttctaacagctggaagtatcgcaaacaactcaggtttcgccgcttgtgcacggccggctggattgcctgctgcgttgaacgtccgtatcttcggaactaacgacagcaaaaccggcaaacaaggcggaaacgcgaatgtcatcctcccgcaccatttccgccaacggcatcgacatgttcgtgcgcgaggccggccacggcccgctggtcgtgctctgccatggctggccggaactgtcctactcgtggcggcaccagatcgcagcgctcgcagccgcgggcttccgggtcgcagcacccgatatgcgcggcttcggccggaccgccgcgccggccgacatcggtgcctacacgatcttcgataccgtcggcgacatggtcgcgctggtggctgcgctcggcgagaagaaagcaatgatcgtgggtcacgattggggagcgccggtggcctggcacgcggcgctgttccgccccgacgtcttcaccagggttgccggcctcagcgtgccgccgccgtttcgcggccgcggacgtccgctcgaaaccctgcgcgacagcggcatcaccaatttctattggcagtatttccagccgcccggagtcgccgaggccgagttcgagcgcgacgtcgcccacaccatgcggctggtgctcggacgcggcgtctccgatgccagctcgatgttcgtcgacgaggccaagggcttcctcggcaagctgccggccggaatgccgctgccggcctggatcaccgaggccgacatcgccgaattcgccgagggttatcggcagtccggcttccgcggcggcctcaactggtaccgcaatctcgaccgcaactgggagctgaccgcgccctggcaggacgcgcagatccatcagccatcgttgttcatcgccggctcgaacgattctgtcatcaccgggctgatcggcgccaagcgggtcgccgacatggagcgcgtgctgccgaacttgcggcagaagctgatcatcgagggcgccggccactggatccagcaggagcgccccgacgaggtcaacgcgtcgctgatcgcgtttctgaagtgaacaggccaagcacctgattcgtaacgctttgacttagtagagcccgcgcccgctcagcacttcggccggtccacgtgcatcgatcggcacataggcggcggccgggctcggggttgcggcatagcgcgggtcaccctcgtaggagacttcgcgctgattgttcgcgacgcgacggtgcgaccggcttgaggccgacatctccgaggtcgcgttcgccgaggcgtagtcggcctgggtgttgccgaggctgtacggccgcccttcgggcagcgggacgtcgccgcggacccggcccgacgaggacgacatctccgggacgaacggacgtgccgaggtgacccggaccatcgacggcgacggcgctggcgtgccggtgcgcaaggtcgccatcaactggcggtcgtcggagccttcgagcggtgcccggccgacatattcgacgcggacgcgggcgacaccatttcctttgaaatcaagcagttcggcagctttgttcgagacgtcgatgaggcggttgccgtggtacgggccgcggtcattgacgcgaacgacgagcgatttgccgttgcttagattggtgacccgcgcgtagctcggcatcggcagggtcggatgggcggccgtcagcgaggccatgtcgaacacctcgccattggcggtcaggcggccgtggaaatcatcgccgtaccaggacgccatgccctcggcgcggtagttctcgttctcctccggcacataggtgcggccggcgacgacatagggcttgccgatgcggtaggtgccgccgcccttcggcacggggtcgcccagcgccacgacccgcgggctcgacgacacgccatatttgggatcgacccggctggcgaacttgttggaggaggcacaattggcgaggacgaggcacgtcgccaccgcaacggcgccgcgcgccgtccggatcatcgaatctggccgtctagtccccatttgccccaagtaccattctgccggacccgcgcctactccgaggcgtcgggatcattttcgtcactgcgcggcccacctccgcaccagagcttgacgatatcgcaaccggaacacggcggaaatggggagagccttaaccctatggcactttggtaaaccgcctgttgcgcctcctcagttgttctacggagcctcggccacccgaaacgcgctcgcctgtcccgctatcagacacactgttgcagtaaatcatcagtgggtcggcatcttgaattccaacaattgaatctttttgactgtgcaaggctgcaatcgttttctcttcagcgtggggcgcaaaggaagtttgcgatgatcgagacggttacagcggtgatgggcttggtgagtgcggcgatcttcttggcgcacgccgtggaaggctatcggtaccgggcctgacagtccgttgaaggcggaaagacgcgtcacctctttccaggagagtatgttcggaaagctttaatcaattcggatgagcatcgattgaaagcaggtgtgtcatgcgtaatcacgatttggtctccgacggatttctaaccctgaccgcagcaagcctcgtgctgctgtgctcgagcctcttggccttcgctttcggctaaagatgcgatgctccggggcgccatctgcgcccgctcgcctacccctcacctcgtccctcgccgatctcactcacgtcggcatcagcccagtcctgacgccccctccacctttccagcgagaggattggcgaatgaccggctcagcgagggagggaacgtcggcactcctcgtcagcacagacggccggttgctcatgcaactgcgcgacgaccttccgcacgtttccgatcccggcaagattagcctgtttggcgggcggcgggagggcaccgagactttcctggaatgtgtcgttcgcgagatccacgaggagatcggccattacgtgccgccggagcgctttgagctgatcgggagttactccggaccggatccttcgaccccgggcggcagccttcggggcgaggtgttcctcgcccgcgacgttccgatcgaccggctgagggtcaccgaaggccgcctcgagatcgtcgcggtcgaggacctcgaacgtctcagcggcaggctcgcgcgcccggcggagtatgcgctggcgatattcctgaagcgcgaactagctgagtgacgaaaccagcccgcgcacgaggtcatcgatcatcggcagcgcaacggcgggatcggcaacgtcgatgtcgtgcacgtgccaatacgtcactctttcggcaacctcagggaaccgccgctcgacgagcgggcgatgctcggcctccttgagcgcgatcacgaggtccgcgccgtcgaagtcagccagcgaacagggttgcggatagcgcgtcgcgccctccgggacgatgccgctggcgcgaagacgccgatccgcaaacaccgacatggctccgacattgtcgggcgagccccgttcggctgcgcctcgggacaaggcgcgccacggcaggttctcggctcttgccagatgattgaacagctcttctgcgtatcgactgcgatagtagttgccggtgcaaaggaacaggacacgcttcatcggcgcatgatgactggcgccggcggtcggggtcaacgatgatgcctctctggcggcgatttgccgcccggctggatcgccggaaagtgaactcgtcttcgcgctcagatcagtccgccggccgctggcggaccgcgcaaacggccgtttcgccccggcgttctcatcaagttcgcgttgcgttaggcgtcgccctacgctaagggcctgatcgatccggaagggtggccgagtggtttaaggcaccggtcttgaaaaccggcgtgcccgcaagggtaccgtgggttcgaatcccaccccttccgccaacaatgtgtatttctccgttcacccacgtcattttctgtagcgtaaaccctgtattctcagcggcttgctgtactttcctgtctgaaagtgtcatcctaagtcagcccctgttcacgattttgacgtggagggctgcgtgggttttggaggacacttttcgatggccaaagagacgctaaccgcatcccaggtcatgaaggcccggccgggtgacaagctcagcgatgggggcgggctacgcctcgacgtggacccgcgcgggcgctgctcttgggtctttcggtttcggtcccctgtgaccggcaaagagcgctacatgggattggggtcggccgaccgaggtcagttagcgcaggcgcgcaaaagcctcgccagcgctcgtcaggccgccgaggaagcgcgcgggctgatccagagggatgtcgaccccatagagcacaggaacgaccagcggaccgccgtgaaggtggcggcccagaaggcgataacctttcaggtctttgctgagcaattcgttggaacgcacaagcccggatggaagaaccccaagcacgcccagcaatgggagaacacgctcaagacatacgtctatcccgtaatcgggacgacatcggtccccgacatcacaacggacgacgtggtcaaggtgcttagccccatttggctgaccaagcgagaaacagcggcgcgcgtccgtgggagaatcgaacagataatgaatgcggctgaagctaagaaacttcggcccaggggcagcaacccggccgtgcttgcaatcatcaagcacctgctccccgctcaaaaaagaaagaagcacgtcaaacatcacccctccctgccctacgaggaaatgcctcagttttggaagtcgctgtcagaggacgcgtccgactcggcacgcatgttgcgatggatcattttgacggcctgccgttacggtgaagcccgctatatggaccgcgatagggaagtgaaggctgatctgtggaccgtcccggccggtcgcatgaaggctgagcgtgaacacagcgtgcccctgactcctctcgctttggcgcagttacccttcaggcctgtttctgatgcggcattggctcattgcatcgcacgtcacaccaaaagacacgccacaacccacggcatgcgctctacgttccgggattgggctggggacgaaacggcgcacgcatgggaagtcgcagaggctgcaatagcgcacgctaccggcgacgacacagaggcagcatacagacgccgcacagcgctggcgaaacgccgcaagctgatggacgattgggcggcttactgcacttcaacccctgtgagtatccgatgaaaatcgcgttgcccggatacgacgcgctcttggcggcgctgtcgacagcgcttggccccaaccgtgatccgcttctcatcggcatcgacggtaaggctggcgttggcaaaacgtcgttggcgagttggctatcgtggcaactcggaatgcccgcgattaatctcgacctattcatcgagcagaacaaaacgcccgctccaattgcgcgccgcattgccgatcttgaccgctgcgtcaaagcacggggcgaccgaccactaatcgtcgagggagttttactcttagatgcgctggccgaagtccggcgctctccggattttctgatcttcgtggaagagcagcccacgacccgcatccggccgcctgatagcgacctaattgacacgcgggaattctcgctggcaaaccaagtcgccgcctacttctctcggcgttgccctgccgatctggccgccttcacccttcgaggcttctaaactcctacggactaccacccgatatgctcggccattcattggcgaagccgggcaacaatgcgtcgactggagacagattacagctaaccccagcgcccttttgctcgaagtttgatgcttgaattcctacccaaaagagagccatgtccttgtctgctgtgcatagcatcgttggcaagttcgggagccacgcgaatacgtgaatcagcatctcgagcgaacgtaagtccaccaatgcgttataggcgtccacatcacggtaatcggctttgattttcagcagtctcttcgccgggctggccccgttggcaacaaacactgcacttaaagccgccaacacaactagtgaggcgcgcgaaaccccacattgatcagccttactcagcacctcatcccttcgcgcgtgcatcttagctctaccgaccggagcaactaggctcggagccacgccacggggataggcaaaaggacgaaaacggccgccgatcatgcaactgcggcttgcggcggtgacgcgcgcgaggccgtgaaggcgctgttgattgcgaacgaattcttagagagcgagatggcagagcgagtatcgcaaggctacgttcgtggcgtgaagcacggtcgatttagttggccattcgggctgaccacggaaactgaaacaaattggcgcttgaattagctacagtcccaccaaaccaacgtttaagatgacactcatttttggcttcagtcgagcgaatgtgcctcttctatgtggggacgccctactcacagattttgcaaagcaatccgctacgtcgagattaccggcaccggggccgttgagcgcgcagctactggatacgttcggagtgtccgtggcgggactacgccagaaggtgaacatcataaccgactcggtggtgttcgcgtggtcaggtccgcttgtgcaggcttatggactggcaagggagatcaagtctcacgtagatcagttcggcacttccgcgagtgaaataaacaagattatccttgcgaacgttgaccagaattttagttgcatcgcgatggtcgccgaaggtccccaaattagctacatatgggcgggcgctgaagcagccaatctgagacgattcgaaaatgtgcgcgttgccggaaccggagcagattacttcaagagcacgattgcccagttggatagtgttgatccaatcaccgacccgtcagctaatactatctcggaagtcttgggggatgccctggcggtcgcatcacagtcgttaggcagagagctatacacgcaacaaaccctcctcgaacgatggggaggaaccatcgaagtgtgctatcgcgccgccgatgcgtttgtgaaattagatagaatagccttcgttcatttcagatacgatgaggcaaatcccgaagccggattgacctgggtaccacggttgctactaaaccgatataacgggcctgacttggagtgcgtcgccctcgattgcgaacagactagcgacaggcgaatattttctgttgcgcaggacgacaccgttgttattcgtccgctgatctcagacggagtgcttcgcaagccgttgctcggcaatttcgagtatgatcgtttgtgtacgcatttttcctattgccgcgcaggcgaatccctatggagcatgacgaacgtccgcttttgtgcaaacggccctcgcccatttcacgtcgatatgcaagggtcccgagtggatatagcttttagaaaatcgcttggcgactggatgcgagagcagattcgctcctatcagcagggtgagataaagccatcgaccgccccgagcgcttagttcgcgggtcgcggcaaatctcatcgcgtcacgctggcagccctccgtctggaagcctgccagtctgccagcggatcgctcgacttggccgtatcggtgggaagaccagaagcccggtccagataccaatcaatcgccttgcggtcccaccgctgcgtgccggggatcgcccccggcacaatgcccttctttacccatagatcaaaaccgtcttcagagacgccgcagtacgcggctgcatcggtctttgtgaggccgcgaggcgcgatctgatcggtacgcaacatttagcttggtcgggtagtcggagcgctgttggacgcctcgacaaaggcgcgccccacgtctccgagttcagggttgaactcgatctctagacgaccgctattcgcccggcgaacagtaacgagatgacggcggctctcatcgagagcagaggcaagagcctcctgcatttgctcggcgcttagactctgcccccatatatgccgcgtgacgaccagctccataagccgtgctagatcgccgggcactgcggggccgcttcgttggcaatcactgtacgttcgatctgccaaggacactcccgcagccactcaaatacctgttcaaggctgtaaggcttttcgacttcaagttcacccggcctttccgggccttcgatcaggaagaacgaaccgcaggacttgcggaccatttggtctacaagtggttgagtgctttgcgtagagggacagaagttgtcgtaacgtcggattgcgatggtttgcatggcccctgcctttgggtggagagcctgttggcgcaggccctccggtggtgatgatttcccttcggctagttgagcgtgtcagaacacctgtgaggacgcaacaggatatgtgtcaggcgaaacggctgacagtccggacaaacttacagcggctcgaatggatcgctcaccggaaagcgcagcttcagttgcctcaaacgcgcacgaccaagcgcgcgttcaagcaccggctccccacagcacttcactagcacctgcacatggcgtgcaggcacatcctgtcggcgcgatgccgcccatgcaagatggggtaacaagacatcaggcaatgcgtcagtgagccgcaacacgtcgatagcgtccttgcaggcccttagcttcgccagtccggtaacgacgacatcgggcatatcagtttcaacggccgctgtgcgcggcgcgaactgaagcttgatgacgttgctcacggatatacgttcctgggtacgcgaggatcgtcggcgcagtcgaccgtgtcatctttggcccgccctaattgcgtgacggacacgacgacgctcgaaacgttatcaggctgtacgtccgttgcttcaaacagctcacgcgtccgatgcaagattatccgataaccctgctccattggccacggcagcacgccataccgaaactggaagattggcttacgcgtcgatataagaggcgacacattgtagccgccgtgttgtcttcccggccccatcgttacaagctctgccttcgcggtgaaaacggccttcacaatcaccgctttttcgggctcgggtatgcgcgggaaatttactccacctgaacgagttggcgtaaccgtaacaagctcgcccatctcgtcttcaatcgccttcgcaacgtcctgcatgccgacgcgccaagcgtcagcctccggaaatagggtcatcatttcgttcctgtaagagcgtttgccgctgcgggcttggtgctgttgtcgccagggccttgcatgctggtaccgagttggccattcagcgataaggtagcgacgctctcggctcgatggataagaccctcgaaatactgcgacggtctcacttcaatctgcatgttgttgtgcagctcggcttcgccggtcacggtgccctgtacgctgacatccttgaagccttcggacttcccgataggctggatcgagtcctgccagccggaacggctgctcgtcccgtcgtccgacgcgccgagctgacgaagataatcgctagtcgcgccccgacgcttcggccaggcagtcggctgataccggtcaaacggactcgagctgttgagcaggtcttcgaactcagccccgccaccccgctccaattctcggaccatgcgagcttgtgcatcggccctaatcgcctcccgcgctcgcgctgctcgggtatggtcgcgcgtaacaccttgggtctcatcgttcgtcagcccgtacacgagcgggacggttcccgcgacgatggcggttagtccgaacgccttggacgcaagcccgagcccagccgctacacgtgaaccggccgcgacgcccccggcagccgttgcggctgcccctacggcgctgccccccgccatccgggttaacgccgctgaagccacgttggcgctcgctgcaagccccgtaaagctcgacaaaaccgatgcaatggtcgctccggccgcagtcaggcccgacagcgacgcgagcccagccgagacgctgatagcctgcttctgagcgtctgagagcccagccgtgaagcctgccagcttagcgcccgcctctgcgagcggggtaagccagccctcgttcgccttgaccatctgcttctcggcggcgtcaaacgaagcggtgagccggtcgacggcagccgccaagccttgcatgcgttcgttagcgatgttctgcgcgaacccatcgccgtggttgagcttttcgagatattcctgatactggccgagcgcgctgagcagcatcacggcccggccgccctgcttgtctccgaccaaggcctgcatgtcccgtgcggtcgccttttgcaggatcgcgtcaaatagctcgccgccccgtagcgatcctttcgacaggtcgtactgacgaagagccgtgtcgaccaaatgcttctggtccattttggacagcttttcgccgctggcctcaacggcctcgcgtacggccgccgagaagtcttcacggctcccaagcacattccgcgactcgtcgctgagcgctctgttaaggcttgtcttgccagcgtcggaaagacccttcccgtaccggcgacgcaatgaagcgtcgatagcatccgtgctgacagcgccctggggggcgtagtcggcataattgatacccatatgggcgaacgcttcgaaagcctgcttcgtcggtgcgagcaagcgggcggatatggcacgcatgaatacacccgactcgtcgccgcccacgttcgctcttttgagcgtcatcgcagccgcaagggcctgttcggcgcggatacccgcagcggtcgacatgccgataccgaacttgccaaactgctggatatcctccggcgtcatcgctccggctttagaagcgatggccgctaggtcggtcgaccgcttaatctcgcgcgacgcgtcggccgcgctgtgcagatgtatgccctgcccgaatgtgaagccttcgactatcttggccgcttcctccgtcttcacgttcagcgctttcgccaggacaatcgcctgcttcgtggcagcctcggtgatcggcgcagagaagttccgagtcacgaatgcctgttgcgcgtgcagagtgtcttcaggcttcaacccatagacggttgcggcctcgatcctctgcttctccaacagcgccatgtccgaattgctgtagtgctgaattgctcgctggtaacgaacgtcccgttcatacgggatgtaatcggatacagcggacttagcgaactgaaatgccttagcgcccaccacgccggcaaccgtcgcaccgattgcggcttgcaccttgtggattttttccagcgtattgaggtgttgctgagccgcagtgttggcttgccggaattggttcgcgaggttcgctgggccgccgttgtctctgaagaggcctttggccgtctgatcgagctttttcgttagctcaagtagttcgcgcagcttcggcgacgcctggtcattcgcactgatcgtcgccgttacgttgggattgctcatgggaaattatctcccgctgctcttctcacggagcttggtcagctccgcctgcatcttaatgtgagtggtaagccgtcctacgggcatggagtgcagctctgagggctgcactccgaagtcgcgtatcataagcgcgaccgcgcgacggacggtcagatagggcgctcgtcctgcactcccaacagaatgatgttggtggcgactacccgtagctgataaaaatcgcgagcgttgagacccttcagaatgaggtcgtcgatccccttctcggcgatcatatccgtgaggaaccgcgcaaacaccttggagtcatattcgaactcgctgctgtcttctccgtcctcacctttccgacgcttaatcttgaagggctcgccatagtcaataaacgcgccagcggtcggctcccggagcgtaaagcttgtaacttcaccgttgtgtgtggcgagcggacgggacagcgtgaaggtctcggtagcagtcatacgtgtgtatccttgtcggccagatcagatgttggacgggagcagcttcgaagtgtcgaagccgagctgagcgaacacacggctcagcggcgttccggtcgtgtcgtgcgtgtcgagtgcatgcttgagcgtcttggcttcctgggtgtggccgcgaccgctcgcatacatggcgctgtatcgaatctctgcgaggcgcttcagcctcgccggatcgatgtcgttggcgtcggtgcggattgttttgcccgcgtgaccacggctcttattgaatgcgctcatagagcgtacaatctctgccagtcgagtggcgcgcggatcagtatcggtagtcatggtggtggcctcttccgtggtgtcggtgtgttcggtttcgacgggcaggccgcgcaagaacgcgcgggcctgctcgacggtgagtgtgtcgggtgagcgcgatgtgagaagctcggccgccgcagaggggcgctgttgcgcctcgctgagctgagagattgccgccatccaagctgctcgcgggttcggtcgcgacggggcggcagcatgatgacgtggcgcggccacggtcttcgatatcgagaatcccaaccttttcgctattccgggttggactgccagtccaaacggcggcaagcagacaagatcggagtgttctggatgccacgtagcgatccgctccgaatgcacaattagatcagtatacggtgctatcgtgtaatccaacgcttccgcgtcctcccgtggcatgatctcgccggaggcggtcagtacgttgcgacgccactctgggtgttcgtaaaccgttgtcatgggggccgtcatcagtaattaccgacacggacagcgcgtggacggcgcgcggcagctccgcagagcagttcgagccgtctcacctcgtcgcgaagctctgtcacgttgccttggtgccatcgtagccattggtccccgttccttacttcggcacgctgttgaccggccataagggcgtacagtgcggcccgaagctgcccaagtatcgcgcaagggctatcgatcacggggcttgcgccctgcgttggtgtgtagttcgtcatagtatccctcgttagttctgcggctcgtcggaaggcgctgcgtcgccatgtgaggccgccatgctctgaggcgccggataggtaagtcctgcctgctcaaacagctcgcgctcggccttgcgctgcgcgatcacgtcttccaggtccagcccgcgctcgccgagtttctcttcataggtagaaagaccggtgacgagttcgagcgcgtcggcttgcgcttgcttatagggatcggcgacagccttacccttcccgcgccacatcgattgtgtataggcgtcgactgccttcccaaaagctggtgcgttcggaggcaatttaagagcgcccgactcgatctgctcttccaaccagcaccggtacactgccttgtagagccggaccggaatcgcttcgcgccgcctgtcattgatccgagacgggaggtcaagcgctagccgtgacgcgctgaagcttgtctgcgagaagtccccgcttacgtcttcgtagcttgcgcccgcagccttagcggcttcgcgctgcaaactcttgtcgaacgggtcgtacgttgagttcggagcttctgacctgtgaagcttgaactcatctcccggcatcaggtggttcacttgccccgggttgaggcttatccccttctcatcgtaatatactttgtggccttgcagccactcttcgggggagcccgactccggtgttgacggcagcggcccctcgtaagtgatcttgggatagtgcccatcccattcacgaccgctcctgccagagtcgagccctttcagtgcgctcggcaaatcgctctctaccgtcgccgcaaacatcgtttggacgaatgcctgcgcggtcgtgtactctctgagcacgcccttgttctgggcaggtgttagagccgcgatcaaaggactgagcccgcgaatctgaccgggcagaagcaagtcaaacagatgcacaatgcgcggccgtccccacggcgtgtaggccggaacgaacactggcatcggttggtagttgacctgccccagcacgtacgggatgatccaatagccgaccacccggccgtctttgtcgaaaccgatgccattcaccgcgctaccgttgtccgtgatctgagtgcggctctggtcgatctgcctactatccagtagacgcaacttcgtcgccgtctgagcaaagcggctgcgtttccagtcaattgcggccacgacttctccggtcaagagatatgaccgatatgcggccgtgacgagttgattcaaagggtgccgtccactcgcgtcgcactctagcgggttattcacccatgcaacccaagcacgttcgatcctgtgggcgaggtcgcgcgcgtcctccagcgagatacctagcgcgtcatggtctggcttggcagataaggtcagaccatttccgattgcctgggtcggcagattttctgatagcgtcgcgacggtgctgttagtcgtaacgaggtcgcgcgaaacggcgcttactacggctcgttcttgactaatttccgctcccggagccccgccaaagtacggcgacgggtatcccgcgccccatgtaaatccgctgtagttcttccatgcaagcgaccgctggccgtcgttgccatccatgaagcccatctgtgcgccgtgaagcgcgggcgttactgcggcagcgacaggggtactcttcgctgcgacctgcgcaaccgctttcgtgacggcgctacgcctgcgagacgtggccgcacgtctttcccgtgagcccatgaggtcagccccgcctcttcggcctgttcgctgcattgaacgcggtcatgttctcccttatttccttcagccgagctgcctttgcagcttctgcatcctcggtgaaagcaatgttgggagatccgactacgcccacggggcctacttgatccatggcggtcaggaacggattctccgctggtgctcgtgccaaaagcgctttcgcctgttccgggtcgagcgacgtacgcaacgcaagttcagcggccatttccggatttcgcttaccttcggctgactcaataattgcgccaatcctcaggcgctcgcttagcgcagccgcgttggcatcgccactcacagcggcgggtctcttagtggtagtcatggtggtgtgtcctataggttcagccgccgttgagcttggcggccatcgctgcgaacgccttggggtcgaattgcttcggtgccaaggccggttggttgatggcttttcggttcactaagccagcaacggcatgcgcatagacgcatgcgtcgagcgcttcattctcgcgaatgttgggaacaaagcgggagcgcgcgtaaccacgcacgtatacggtctcaatacgttccgacgccaagccacgatagaacgcatctggcaggtggtcgggcacgtgaatgtaatccggtccgaactcaagtttttgcagccgacgatagagcgcagccttcacgctatcggctccgacaatgaagatgtccaatcgcttcttcagcttgccgccgcgatcaatgaacggcctcgaccacccttctttgcctttcactgcgaccacgtggcgcgacttccgcgcttgggccaggacgaagtcgataaccgcgtcgggacgatggccgcagtcaactgccgttaccaagacagggaggcgtcgaccgtctgcaagttcgaatgcctgccccagagcgacatcaagcttgtcccacgtcgcaccggaaaatgtatcgccatcgagcctatcgtggttcaggatagtggtgacaccattcggttgatgcgccacaaattgaacctctagtcgattgtcctgcacgtcgacgccagccgtgatgaattcgatgtcgcgcgcatacggaggccggattggctccgctctttcgcgcaactcgattgaactcatcgaaagttcgagggatgagtcgaagggctcacctagtttcagattgtggaaaacttgccggtcttccatcgtggagcaggcctcccaggctctcgcgagactttcgagcgaagagtattcggatgccagagcggttatgtggtagccgcgaatgcccttctcaccatcgaggtttgtaggctcccatcggccagcttcgagcatcgcggcgcgctgcgtctctgagtgcaaagcgccgcagtgctgacagagcagctctgccgtctcgggcttgcctttcgtccagtgcaggttgtcgaacgttaggtggctgcctttcccgcaagatgggcagtcgacgacgaaacgacgcctgtctgatcgctcaaaccacttcgctattcggctgtcgcgtccggtcggtgtcgagaccagcacgattttcttgccggaaagcgcccaccgctctgtgcgctgtatcgcgagtagaacggggtcgccttccttgccagcgctcgcggcaaagcggtcgacttcgtccatccagacgacgcgaacgctctgtgcggcaagctctgaaggctggtagctactgacaaacgtcaaactcccgcccgggaagtctttggctgacaggctatttgcaccgcccgttgagcccttacgctgtgccatcccccgaccgataagcgatctgagcacgggtgacgcgtcaacaaacggatcaaagcgtgtgcgtacgaacttctcggcggcttttgtatcgggcgatacgtgcatcataggcccgggcgcgttcgcgatcatggccatgatttgcgcttcgaccgacaagctcttcccgacttgcgagcccgccatgattacaatcgtttcgacgctatcgtcttggattgcgtcaactatctcgcgttggaatgtcgaaaatctcagggggccgggcaatgcgtttgaactagcaggcaggcggagctcgcgctctgcgaagtccgttggcgagattttcggaagcggcgcaagcgcgcgaaatatttctcgcgccaagtcagtgtcagtcatctgcggagcgtcctgttatcgcagcgtcccagcatcaagccaggcggttagattgtcgtcacgggtgaacgttgtcagcgttgagcgaatctcgtcttctaccaacctcgctacggtctttgcttcggattgtcccgtgatgcgcggtgcgagccgaacgcctatcgccatcaaggcgacacggagatcggcgaagatgcgggtacaagtttcggtcacgtcgttacggtcgacgagttcgccttcagccttgaggttcataagctctaagcgacgggcgcgatgccgttcagcttgcgcctttgcctcaacgtaggcgctgcttccgctcattgtttcgcctcgccccagcgatgcgtgaccaatcacgcggtcggtgtcagcgaacgccgtaacgatcttgacggccttggcgaagtccgcagcggcctctgcttgagttgtacctgcctccgcgagggctctgcgaacggtcgccggatcaacgcccgcttcgtcggctatttggcgtatgacgcctttgggtctgcccattggttctcggctatcaaaaaatgcagtgatttcaatacaaacggtgcggcggcgcaccgctggcctcgtcgggtcggtcccggcaaggacccgtccgggccgcgctgggtcttcggacggtcgcactgtcatgcggtctggggatcgactgcgccccatgctgcgtggccagcacggggcgcgtcgcgttgacatgcgtcgcgggatcaagcccggccgcactcagtgaattgggcgcgcgccgcgccacgacggcggggcaaccgcctaaagccccgtagcggtcgcggcgcgctatgccgctgcgcttggtgtcgacgcccgcgcaacggtgtgatgttgattagtcgccatcggatggcggtgagtatggcaagccttcagcaacgagctgcttcgcgatctcggcgggcaagcgttcggcaagctgcttgtccgcttccttctgccacgcgacccgcgccgccgcattgtcttggcccattgcggttgatggcatctcagcgtaaagccctttaagtggtagccgctgtttgccgcgtctaattgcgacaaatgtgccgccatttgcgcggacaatgaacgcatccctgacgttcagcttcgagctgccgccacccgtcacgcggaacgtgctagcggtcaacccgcccgcaccaaccgcagcgccctgcgtattcaagatgccgatgcgcagtttgcttgctgtgaacgaagctcgaaggtcgtactgtgtggtgcgcttgaccttcgacacgccgggccgaattcgtgccacgggaacgccaacgtccttcgcgatcacttccagcgccactttgcgggcggccgtcgcgctcttatcgactgcgcggcgaatggcgttccgcagtccgcgcgttgagagcccctctgcccacttctccatcgcggtcgcatcgacactaacttgtaacaagctcatcgtaattatccccaagcaacggcatcgtgagttgcgatcacgcgcgactgttgctaacagcgcaaacctcaacggacgtggagtttgtgagttgaaacgcgtaaagaagaagactcaacatcgtcgcgaatggactgcgacggatgtacggaccttgaagaagcattcaaaggcccgcacaccggtcgcgaaggtctccaaggaacttaagcggaccgttggtgccgtacgggtgaaagcctcgcagcttggcattggcgtcggccatcaacgctgaacgacagtctttgaagctccatgtcggcgcgtacatcttgctcacgcgcgttgcgcataacactgaagccggtcatagcgagccgtagtgttactgtcgccgtagaaggcgcattagccgcgaaggctgcctgcgctagaagtagcagtttgctcatggcttaaatccttggcgtatacgcgctgcacgggaaggatcaccaagaccgtgcagcgcgctgaagcgcgacaccccgcagtgtacgcgcttcaattggaatcgtcggcgttcgctacgctgtcctcatcgcaccggaaatcctctcggccggaaccggtacgcaggaagttcacggcttgggtcacgccggactcatgtccgcaagtgacgttcccgacgccgatggttgaatagaacaacgccacgatgatttcgagcgcctccgcttgacgcgcggcggcatccgcgatgcgccgttgcacggccaagtttgtttcggccaactccgctcgacgctcgacggccttcaggatgcgaagccgctcggcagcccgtagcgcgtcgaggtcgaccgtgatcgcgtccggttcatcggaggcgcgaggcttcaggccctcagcgaggccgtcaaagacaagattggagtaggtcatggcgatgaatccttctgggacgtaagagaaggcgactaattggaacagccacacggaccgtcaggcgagccgcatgcagacggggagaccgcaaggcggctcgcgagaaggccgggctgaatgtggggccgccctacagtaggggtgcggcccgtcgaaaatcgcgcaaaagccagaattcaaccgataaactattgatctcacgtaattttctgatcggggcgatctacgcagtcttcaaatagatcgagatcggtcgggaatgcccgcctaggtttagccatcatcgtagagccactcgcttgggcagaaagcggagttccttatgggcgacgatgtcaagcagagcggccttgcttacgcgaaacggctgtctgaactgagtgccgacgaacaaaaccaacttaacgaccgagcccgcaaacagggccaggaagagcacaaggcgttcagcgagaaattcaaggcaggacaatgctgggtttgcgggaatgctctaacgtcgtttgacgtagctaaaccttgcccccactggcttctcaagccggatggcttcgggaaagagcactttgcgctgattacgaaacagcacggtcttctcaagatcgagcattatttgcgatgggttgcgaacgaagaggcgttcgcgaaaaatatcaacgatcttacggacgaaggttcgggaaaacttgttgaactcaccatcaagtacaacaatctgcagtggtcgttttcgtgcagcgaaactgatcttagtgggcatgaagggggtggagagcaatcaaagcaaccccactggcactttcagatgtacgtcgatgacctgcccttcattcggtacaacgatttccatgctccgctgacgagccaagacattggtgtgctggaatacgcacgcacaaagtcgggaaagctcaaacggcgttttgcaggcgggaccgggatggctgacgtgcttgacccggcaacgctcgaacagctcgttgccggaggacagtcagtagaaacagacgcggaagctaaagctgccccaatcgaactcaacaccatcatggtcgcagagcccggcaagaccatttcaggcgaggatatctacaacctgatccagtctgcgaaggctgagaaggtcacgatcactagcaagcttcgtcagcttcagggcgcgcaggtcacaacgatagtatcccccggagagggtgtggtcgcacaggctgtccgctccggccgccgaaagcgaaagcgcgtcgatatggaagcagtgcaagcggatcgcgaatggcgcgagcgtgtaaagcggcaaacaaacacggccgattagccccactccgccttacatcatccgccgctgcgtctgatccactgccggacacccgtctctaaagagacgggggttgtccggcacttggtggattttcgatccggcactttccggcactttccggcacccgccaatttcaccaataatatcagacgctaaagtgccggatcgaagtgccggaaagtgccggaagcaagtgccggacgaagtgccggaaaggtgccggacgacaatccatccggcacctgatccggcacttgttcccgtggctacggaagcctgtagagcggctttgacttcgtcccgccgactgagagcctgtcagcctcaacggcttctcggatgtagtcctgaacggtcgcgcgcccgagcggctcaagtccgtccgccctccgacgctcgtttaccgcctgaacgatctctttcgtctgcaactcgatacgctgccgagcgaccgtaacggactcgtcgtccgccttctgccgcctcgcttcagcctcaaagacatccagtacgtcctgcgcgcggtcccctcgccggtcagacagcttgatcgtaggtgcttgcgcgtcatcggcctcagggtccgtcacagccaggtcaacgccaaccgacgccacgacggtttcgatgggctccccgtcttcgtcggtgcctaccgtcacgccgcgcaggcgaaatgtgaaatcgatcttgtgggggtcaccgacgcgaaacttgctccccgctttgattcggccctttcctcgctcgtcacgcgacaccacgagcacgaagtcagtgttggcttcaaacgcgccgctacctcgaacgctcgccccgctcttgggcgggtgcgcgagcgtaaccacacatgcgcccgttgcgttgcagatgcgctgcgcagcggccgtgtagacacctgcgtcttgggcgctgttgtcgtcgcccggcatgattgcttgcgccagggtgtcaatcactaccaggctgacaggcacgccgtaccgctgctctacggacttcgcgtgctttatcagctcgcgttcgtccttggtcggcgtaccatcgggcttgtacaggctgagcggcccgcgatgcagagcgaaggcaccgtcgcgagcggaatcgcccgcttcaatgcgccaagcgtgaatgcgcctttcgacctcggccgaattttctagcccgcaatagatcacagcgcctttcgtcaccttacggcctgcgaatgagatgccatgggcgatgcgcaatgcgatatccagaagaagtgccgtcttgccactgccccatccacccacgacaaagcccgtcgtcgctaacggcacaacgtgctttacggcccaatcaagacggggcaatccgctcgctagaaggtcatcgaggaaggcgagttttgtgggactgacagacttaacgctcggttcgtcttcgtcgacgactgcgccgaacgcttcgccggtagacgccttgctgaggccctggttcttcagccactcgcgagcggtctgccggttgtcgtactcgccggatcgcggcttaccgtcgacgaagtcgccagcgccatcccacgccaagaaaaacgacgcgagatgctcaacaggcatttcgggccactcgcgcatgacgtggcgggcagccttgaagcgattgtccgaacaatcagtgcccggctccacgtaaagcgaattgaactcgctgttatcggacttcagcttgtcgaagtcgtagtcgccgagcggcgagcacagctcttcccactccggaatgtcggccttatcaagctgcccgatgacttcgcgctctttggtaatgggaaagtcctccccagattcagaggacggcgtaccaatcagctcaacgatataatccgggagcggcggaatgcggttgctggcgtaagcgtcgacgaacgctttgagcgcggcttgatcgccgtagcgcttgccgtcttcgcgccaagcgcccggagcaatgaattgtccccctcgcccccgcacgtcgcagccgtactgcttcttgagcgcgccagcgctattcgtgaaggcgttgtcgggatcactgaaaatgtagtgacggccgcccgattgtgtcgtgatgatctgcgtgccttcgggcacgccgccatgctcgtcgaagagcttgccgatcaactcggggccgttgaacttggtgtcggcgtcgatcacgaccaggcgcgcaggcccgcacgctacggacgggaccgcgtctcgattgggatgacgccacatgcgcttgacgatgtcgggatcggtcgtcgcgccgacgaacacggtgagctgcttgttcccttcctcgcgcgcctgcgcgatggcggcttcgcgatcctcgcgagcgatctccgtatctttctggttgtagagctttacgagagggattttgccactggacggaaacacgggaatgccgttgcgcgcgagcaatatcgcattgtgcatgttctgtacgcggcgcgcatcgtcctgattgatcggcttggtcgacttgaccggcaactggacgacgtttgcccccatagcggaattagccatactcaagcagccctctttgtcgcgatgcgcttcgtgcctttgcgcgcaggtgtggtcggtgtgttcggcttcggcaagaccggcccgtcaggatttctcccgttagctttgaggtacgctttgatcttcttcgcgtacctcttggagtcatatcgccctgccattttgcgcctttggtgagcgtctccgcaaagctcggcaaggtcatcggcgtcacgctgcgcaatccactcgtcgcgatcagtctcgctaagcgcacccagcatccggcagacttgcggcgtcaagacacccaactcatcgagcagttcaaggcggctttgcgggatcatcttaagggcgcggtcgctgcccttctgaaagtccaatcggctcctcgtcgtctcgcgcgtgagcgcgtgcatgatctcgaagcgaagactaacgtaaagacgctcgatctcgcgatgccacgccgggctgtcaaacacagtgcctttcgtagctaggcgaacgtcgagctttaggttgcgggattgacgcgcttccgcaacggcttgatgtttttccgcagcaattgccacgattgcagcttcgaggctcgcgtctttcattcgcgtgtatacggtggacgtgctgcaacccaggatcactgcaagctcggcgggcgtggcgacgcccagaattttgcagtcgcggtggattgcacccacaatgaagtcaatctcgaagtcggattgggcgtcggtgagcagttggaggccatcttcaatacgcttaaagcggcatgcgtcatcggcgcagggtttggtgtggcccgtgtagtaatgctggagccgcacgcggtgtagccgcttcgtgtcgattgaggcttcaggatcgtcgtgcaagcgagccccgctatgcagagctgcttcgcttacgaactcggggcgcggctgtgcggcccgagcctcgctcacgcgcttgccctgtgacataaggcacgtgcttgcgacgtgcaccccgtcaggcgtcagctcgtttgcattggcgtcaaaaccacgctcggccaaccacgcatccccggcagcttctagatgctttgaggcggtggcgcaggtcagttcgttaacgtcggtctcgccatctcgggcgagtgcttcgcggttgtcgaacagcgaagcgggtgaagtgtaactcatggaaggtagttccccgtcgccgcgcgacgcgctgcccctgcctgagaggcttcacgacgctgcggcgtaatggctggttcagttctggtctgcgggctgttcggcgatgcgagcggccaaggtcagggcgatctcggacacaagaggctgttcggccgggtggccgatcaacgccgcaacgaacgtgggcgcgtgacggcggtccgtcgacaagctcgccagccatgcggccaacgggatcgcggagttgccgcgaacgatatgcgagggaagcggcaggcctccggtatggcgacgaaccaggcgctcaagggtgtcgatatcgttggtcattaggcgacctcggtcacggccgcaaagcgcttatcttccagggcgaccacgtcagtgagtcgccaaaaacgcttgccgccaactaagacagagcggggtaagtcgccggtttcctcacagtgatagatgtaggttcggctggcaggtttgccgttggtcccatagcgggcgcgcatgtcggccattgagagcagaggggcagtcattgggacagactccaagggttgggcgcgcggaagcgtttgcttccagcggccacgaatggacgtttcgatgttgggcggctgtctggccgtgtccgacgcggggaattccccgtcagaatgctgcgctgatttcccggccccacacctgtctacacccaatgggtgctgcgagacttcccgactgcgcgagataacgtcgtgtgccgcgtatcggcggcagggttagagaaacacagacttggacaatctgtcgattatttctccctcaaacttcccgatgcagccgtgagcgacacatgtgttcaacacccgaaccgtgccttaggccgtagcttttgagagaaaaaaaatagactaagagcccctccccacatttcggcgagtcgacgtggagggctacgtggagagtttacagaaacaagaaaactagcaataattacagctacatacggaagacaccccttccgccagtacactgttctccgttgttctccaccgttcggaatccccagtaaaatcagcgctttcgtcggcgaactgtattccctagttcgcctcgttcctcacaatcaaagcgcaaaccgtagcttgggaccgtgggttcggaggatggttttcatcggaggaacacgtggttggaaaactcaagccgctcgacgtcgaacgcgaaacgaagcccggaaagtatgctgacggcgacgggctctacctgatcgtaactggtcccgcggcgaagagctggtcttatcgttactggaaggacggcaaggagcgatggcatggcctcggctccttcagggatgtatcccttaagaacgctaggctcgcacgagacgcagctcgtctatgcgtgaagggggaccgcaacacgcccggcatagacatcgtgcaggagcgccgtgaggctcgccaagaggcgaaggcggcagcggaccgaagcccacagctcactacaggtttggttgacggcgtcgcaaaggaagcctcgcgcagatcgtccgctttgccccaaagcttaggtcggacgtcgcgccaccgccctgctggctttgcgtgacctcattcagaacgtccactgacgtggcggaattgatgataggtccgattttgtttgccgagctgagcttcacatactgttagaacggcgggtccgttcgcgagatcatcttgaagcagttcttgtcagttccgccagctctgcgtctgcatctacgacgccttgggcaacggccagctccagccagtagctcgcctccttagggtcactatggccagccgcaccgctacgcaaatagcgcccgagcatgagttgagcttgaccatgcccgcgctctgcggctgcgcgaaaccaatgctcggctttggctcgatcaacggcaatggcatggccgccgctatacattgcgcctagtgcaaacattgctccagcgtggtctttcgcggcggcctgttcgcataatttgagcgcggcaggagtgtcttgtggtccccctcgaccgttcacgagcatctcggccagggcaacctgagcatcggtgatccctccctccgccgcacgcgcgaaccaaccgcgtgctgctttcaggtcggccggcacacctcggccgtcggcaaataggcgaccgatcataaactgcgcctccggaaccccttcggcagcgcgccgcaaccagacggccgcctgctgttcgttgcgctcaacgccgatgccctggagaaggcatacgccaagattgaacgcggcgacaagattgccgcgttgcgctgtattcatgaaccaatccgctaccggcgggcattcctctcctctgactgctcgttccagcaggtcatttccgacgtcgacttgagcatctacatttccggcctcggcagcgatgcgcaaccatcgggccgcttcatgattgtcctgaggtactccggctccggtcatgtaaaatgaactcaacgaccgagccgccgccgcattgcccccctcagctgcgcggcgataccagtttgccgcttccacgtaattcggcggtagtgctccgccctttgcatagaggtcgccgaccaactccgctgcacgaacgtcgcctgccagggccgcacgacgaagccacgtctctcccaaaacaaggtctctcgcaacaaccgtgccttcaatcagtaaggtgccccattttatctgcgcaccgcgatgtcccaattctgcggccttgcggtacagctcagcagcggcgcccgggtcatgcgggccactgatcccaccttcggtcaggacacccagcatgaagacggccgtcggaatttcggcggcggccgccgctcgcatgttttcgacgacctcgtcccgatgaacggcccggttcgggtctccagcaagcgacagcgcatatcccaattgtccttgcgcgcagcccgcggcggcggagcggcgataccattccctcgcctgtatgaggtctctgagcggcggcggaccataggtcagaatgtaagccaatagagcttgcccatcgggagaaccggcgtcagccgctagacgggcccacttcagggcggcttcgaaatccggcttcgccgtgctgtcgtgcgaaaacaatcgcgcggcagcatcgccgctttcacgcgattgcgggccgagcccttggagcaagagcgccgccagcagggactgcgcttccacgtggccatccaacgccgcgcgttccagccaacgcgcgccctccgttcgactgaacggaacgccaccgccctgaaggtagagctttccgataaaatatgcagcttccgcgctgccggcctctgccattcgggccagatgcggcaacgcttcagcaaaccgctctttctcgataagagcgatcgcccggcgtagccccgtttcgggtgacgcctttccgatcaagcgatcaaagagcatttccagaaggctccgtcgggtcgtacagcaaagccatctcgatcagggctcgcgcatcgcttcctgcgtcaccggaagcatcaggccgagcatgtattttagtacggtgcgctgccccaccttgatatcagcggttacgggcatgcctggcgtgagctggaaaccggccggcacgtcgtgcagggccacccgatcgatacttatgcggcttcggtaaaatggctccagattcgtcgtcggaatggcactggtcggattgcgcgcctctacctgagcattaaagctgtccgggctcacgatgcgcacgacaccctcggccataccgtactgagagaatggaaacgtgtcgaacttgatggccacgggatccttgacgtgcacaaagccgttatccttgcccgcgatgttggcctcgatctcaagcggcgcgtctgccggcacgagcgtaatgaattgctggcccgactgcatgacggatcctaccgagacctttgcgaccgattgcacgatcgcgtccagcccggcgcggatctcgaccagcttgcgtcgcaggttcgccttggtcagcagctcgcgtgtatcggccgccttgacggtgatctcctgcaacttttgcgatgcttcagccttccagccacgaacgtaggcgtcgcggtcggaagcaagtgccgcttgatcgcgcttcgccccctcccctgtcgcaacagcgttggaaagcgaccgctgcatttcaacgcgtgtatcctttgcgatcagcgagttcagccgacttccggtctgggtcgcctccagttgccggcgcatatcctcgatgctttgggcgacaccgaggcgatcacgatagcctacagcatcagagtccgccctcgctataacggaattcagttcctgcaggcgatgctcgtagttctcgaccttggcatcaaattgcgcctttcgatggttgaaaatcgaggcctgcaaggtccaatttggatcattgccggagtacgtgaacggctgtccatctgcctcagcgcgcagacgcgcaagttcgggctcaaggctgttcagttgcccctctaaagccactcgatctgcttccgcgaaggttggatctagccgtgccagcacgtcgcccgaccgcacgcgctggccttcgctgacgtcgattgaacgaacgattgcggtttcaagtggctgcacgagaacggtggaggattgcgaaaccacaaggccgcgcgctgtgacgacctgatcgacgggcaatacacccgcaactagaaccaaggcagcgaccatgctggagacgatccagacggtgccacgggctgcgcgcgggacaggtgcattaacaatcgccgttgacggttgctggaattcaagaatcactggcaacgtcggatcgctcttcttcgatctgaacggtagcggcagcaaattggcctgcacttcgctcatggtgcgttcgctccgcccgtgaccagcttcggagtaaccgactggcgcgtcggttcgacgtgccggttctgctggttccaaagttgtcggtagatcgtgcaacgctccaccaaaacgttgtgcgtagcgcagtcgacgatcttaccttgatcgagaactagaatttgatcgcagccgaccagcgacgacaaccggtgcgaaacaatgaccattgtccgtccgctggcgatacgttcaaggttggccgtcacgacggcttcactttccgggtcaagtgcgctggtcgcttcgtccaatatcaggatgcgtggatctgcaatgagcgctcgtgcaatcgccagtcgctgcctttggccgccggaaaggtttggagatccctcttcgatgtaggtttcgaagccattgggcatccgctcgatgaattcctccgcaccggcgagccttgccgcataaacagcatcggacaaggtcagccccggtcgaccggcgatgatgttatctctgatggaaccgcgaaagagaaaattctcttgcaagacgacaccgaggctctgtcgaaggtgccgtagatcaacgtcgcgcagatcagcgccatcgatcttcacaaatcccttgtagtcacgattaataccctgcagcaggcgcgtaaccgtcgacttgccggatccgctgcggccaactatccctagcgtcgatccggcaggaacggagaagctgatcctgtcgagtgcggggacagttgtgttgaggtaggtgaagctgacgtcctggaaggctatttcacctgcgaacttcggcctcaagcctcccgctcgcgcaccgctctcagtgggccgattgagaacggagctcgcttctccaatcgcggccccaacctcctcatagtcctcgatcagtcgcgccagcccgaccagcggctgggcgacccgcgcgctcagcatcaggaacgcgaacaatccgccgaccatgtagcctgactggtcgctcatcgcgagatatgcaccaagcatggtcgtgccaagcaccatcaagcgctctatcggtgtaaccaaagtctgcggccaattggacaagcggccgaattcgagccgccattttcctgcctcggcaatgcgttcgtcccagagggcgcgacgttgcggctcaagcgccaaagccttgaccgtcttgatccccacgatcgtctcaccgagcgtcgccgatttccacgtctcggcggtggcgacccgtccatacatctctcgcatcggcttcaggaatgcgatgatgatcagcaagatcaggcaagcgcagccaagaacaatgctggcgaggatcggacttagatagaacaggaacgggagcagcacgcaaagcgtcatcaggtcgagaaacgtcgtcagaaggcggccggtcagaaactcgcgaacgcgatagacctgcgcgatgcgatacatcgtttcgccggcaggatggcgctcgaagtaatccagtggcaggcgaagcagccgattgaagacgtgcagattgagttttgcgtcgagcctcgcgccgacgaccgcaatgatatgacgtcgcgcatgtcccaggagggattcataaatgatgacgaccgccatgactgccgcaagcatcaccaaagtcgacgtgctgtgaaattgcaggaccttgttcaccatcgtcatcaccaggagtggtgggaagatggtgaggaagctgatggtgagcgaggcgatgccgatgtcccgcagcaagcgcctttcgcgcagaacgagatcgaaaagccagcgcaaatcaaacggagcgtcggccgcagtgccgcttcggctcgcgcgcaccaggatggcctcaccgctccacacctgagaaaggcgcaactcatcgacgggcacggccgcgtctgccggggcgccgggatccctgagcataacgatattctgatcgccgtttgcgccaaccatgagcgcggcgctgccatcggcaaacaacaggacgacgggaccagcctcgctcatgccctgcaagtgccgccaactggttcgtaccgcacgagaccacagaccggcgttctgtgcccaggtcgagagtgcggcagccgatggatagatatcgggttcaccagctctcaattcgctggcatcaagctcgacgccgtaatgacgggccacctgaataaccgcctgcagtcgtgcctggtattgcggactgcgttgcgcgtccaggcgattgattgaatgcccttgttgcggatcaaccccggttaatttcggtgcggatgaaacggcaagcggctttgacagagcctctacgttgacctttgcggcgagctccgcgcaaatccgttgtgcggagtggcatgcgcggacaccgagatcggtcactagctcgccgcctccacggagactatccatgaatctacgcgggagaccggaccatcgcgccgcgaattgcgctttcgccgtttgccaggcacgtcgcgaggtgctcggccctttggcggcgcgtgagcgtcctcgcgggcgttcggaacgaatatctcgtgacgccacaacgtgtgaccggtcaccgctccgagccgggatgacatccaggtcgccggggacattgtacgatggcgttctcaccggtgccgttacgccgggtcggacctgcccttcgacgcgccatactgcctgatcgaaatcacctttctcagtgtcgatttgtgcctgcgacatatcccttctggcggcgagccggctctccaaaagggcacgtgcccggctgtaaagcgcatcacgcgacgcttcatcgtccgcaccaagatcgtcaattgcgttctgcagcaagcggacatacttgccaggtcccggctccccaaaggctccgctatgcgggtccacggtcaccctcctaaatcgacaacagaataaaaatcttcactatatcgcggcaatctagacgaattcgaccggtcgcaacaccgaaatccctccagttggttgacgcgattggaccctgctcgcaccgacatctcacgcgatcgcgaacaattgccgtagccgggacggcaattcgccggtggagccaattgcaacacagctttctgtccacaaatcgagatagcgttcgatcggaacggaggtccgctccggccagcggttcaaggctccgagatcatcgaggcaggttggtttgccaggtttgacgtcctcgtagatctggaggacaccgaccaccgcgggtccccacagaacgtccttgccggatccaatttccagcttcgcgcgattcatccggaaccacttgagcggggaaagatagtcagctttgaatttgtccagcagcgcggagccatattgacgaacagcacgggcaaaacctgcgtcccccgcaaatggcggcgatttctcccagctatcggcgagcagccgcaggccgcgaaccgaaaatgtctccacgagcacctcctcgagccattgtgtcggaggttgtggttttgcggaaaattgccagctgttgctgaggacatgcccaagctcgtgaccgaattgatacgcgagcctgcaccagtcggcatagccgatgttcacgacgatcgaagccatgtcgggctgatcgctgtgcagccagatcgccggcgcaacttcgctatggttttcgatacgaagcttcctgggttgccgatccgacagcaatcgcattcccgacagatcgacctcccggatccgcgtgagtacacgcatcacagcgtcggtcggcgccgcatgccaatcgcccgacagttcgatcggagcgcttcgaaggtcttctgtcggggcgacctcgcgcccgaagcccctcccgattccaacgacgctaagaaccgccgcgctgcccgagagaacgaggaagcgtcggcgattgattttcgtagtgcctaccatcggcaattctcggcctgatcggagaggagcccagggatgcgatccctggcctcctcatccatcactttttcagccgccgaccttaagagtcgtgtttcggcagattgaggttgggcctgttcgattgatcgagttgaccaatcgttccggcaccacccggacggttctgatcgaaggccgagccgccatccgtgttgcccatgcgggacaacagcatctgcgccaagctcttgatcgtcgtcagatcggcctgcaactgctggccattcattgatcctcccgccattgcaagcgccaggtccgcgacagcagcctccaatttcagcagcaccgggttcaacgcgccaatggtcgtatcgggattgatcgtcgtggtcagcgacgtcttatcatcatgattaccagacgttcccgttgcacccgccgagcccgtcgagccggtcgctccaactcccgtcgcgccggtagctccggtcgaactggtagcgcctgctgcgccggtcgcaccagttgctcccgtcgctccggcagtgccggtcggaccagttgggccggtgtgaccacggtggcctcgcggaccagtcggcccccttggaccacgtggaccagtcgagccggtcgctccggtcgaccccgccgggccggttgcccctgtggctccggctctgcccgtcgagccggttgcacccgtcgaaccggt

SEQ ID NO: 4 - DNA, 259035 bp, Bradyrhizobium enterica
  misc_feature (71304)..(71313): n is a, c, g, or t
caggccgaatgtctcgccgcgatcgatgcggaacgaaacgccctcgaccgctgcgacatggctgccgccgtcagcgagatcgatgcgcaggtcctggacttcgatcagcggagccgtggtcatgcacgccggctccgcgactggggatcgagcacgtcacgcaagccgtcgccaagcaaattgaggccgagcaccgtcaggaagatcgcaagcccggggaagaccgacagccagggcgccgtggtgatctggtcgcgggcctccgacagcatgctgccccagcttggatagggcggacggatgccgaggccgaggaacgagagcgaggcttcggccagcacggcgccacccatgccgagcgtgccgatgacgatgatgggaccgaccatgttcggcagcagctgcgtgatcatgatgcgcaaatctccatagccgagcactcttgctgcctgcacatagccctggctcttgagcgacagtgtcgaggcccgtgcgatccggcaggtgaaagaccagttggtcaagccgagcgcgatcaggaggctggtcaggccgggtccgagcaccgccatgatggcgagtgcgaagatcagcgacgggatcgccagcatgacattggtcagcccgttgacgaaatcgtcccaccagccgccccaatagcctgcggtcagaccgagcgtcacgccgatgatgctgttgacgagctgcgagacgatgccgaccgtcagcgagatgcgggcgccgtgcacgacgcgggaatagatgtcccgcccctgcgcatcggtgccgaaccaccagatccagctcggcggttcctccgcgttcatgagattggcgcccatgaccggatcggtatgtgccagccagggcgcgaacaggccgacgaagaccgccagcgcgaacagcaccccgccgatgatcgcgctggttccaagcttcatcgcggccgctccgcggtggcggcctgcacggccgatcgtgcacgggcacaatgaaaccggctgccgctcatgcgtatcggatcctgggatcgatcacgccgtagagcaggtcaaccagcgtgttgacggcgagaaagaacagcaccaccacgagaatggtgccctgtacggtaggaatgtcacgctgcagcacgctgtcgaccagcaacgagccgatgcccggccaggaaaacaatttctcgacgaccaccgcctggcccatcaccaccccgaattgcaggccgatcgccgtcagaatgatgacgagggcgttgcgcatcacgtgccaggtcacgacccgggtctcgctcatgcccttcgagcgcgcggtgcggacaaaatccgcagtcatgatctcgagcaccgcggcacgggtcgttcgcgccagcagcgccatcggcgagacgccgagggtcacggcaggcagcagcagaaatttgagcccgccatcgccatagccgaagctcggcagccagccgagcttcaatgcgaacagatacatcagcaataacccgagccagaatttggccatcgagaggccggacaccgccagcaccatcgagagcgtgtcgacgaggctgcctggcttcagcgccgcgatgaagccgagcggtacgccgaccacaacggcgaatgccagggctgcgaatatcagttgcagcgtcggccacatccgtttggcgatcatgatcgtgaccggctcgcgggtccggaacgaggtcccgaaatcaccggtcgcgagcttggcgatataggcgccgaaacgcacgtaaacgggatcgtcgaggccgagctgtttcttcatgcgttccacgacttgcgggtccgtcggacctcgaccatcgtcgcccatgctcgacacgatgctgcccggaacgacgctgaacagcacgaagatcagcagcacgacggccagcacggtcggaatggtttgcaggacccgacggatcgcgaacgacagcatgggacgctttcctcactccctcgatcgtttgtcgcgatggaggagcacggcacctgtcacttcgcgggtgaggtctcgtcgacccagaggtcttcgacgttttgatgggtcagttcggttgcgtccagctgaattcccttgagccagggctgcaccgccatgacggccttgttgtagttgaagaaccagatcggcgcttcgtcgaaaagcagcgcattggccttttgcagcagctgcacgcgtttttcggcgtcgtcggtctgcccggcttcatcgatcgtcttgtcgaactccgcgttcttgaagttcgcatagttgcaggccgattgcggcgtcgccgagtggaagcatttcaacgcggcctgcggatccggaccggtcgcctgggaatagatgaaggcctggaagtcgcccttgcggatgacctccgccagcaccgcggtctcgacctgcttgaccttcaccttgatgcccaccttgtccagcatcgggatcgcggcttcgacgatcggcagcccccagctttcattttggctggtggtccattcgaactcaaagcccgtgggataacccgcatctgcgagcaattgcttcgccttcgcgggatcgtaggggtagggcttcatggccttgtcgtaggcgggcgaggtcaaaggcagccagctcgtggcgcgataggccttgcccttgaccagcttgctgatgatcagattggcatcgatcgcgtagttgacagcctgccgaacccgcttgtcggcgaacggcttgaacgccggattcatccccatatagcgcgtgaagacctcggcgacctcgacgatggtgcccttgaggtcggggtcggcctgataggcgacatactgtgccggccccagcaccgaggtgtcgatctccttgttgcggaaggcgacgtcgcgggccgcggcttcgcccatcagcgagatcacgagcttgtcggcatagggcttgccgggcttgtagaaacggtcccagcgttccagcacgatgcgcgatcccggcacgtgctcgacaaacttgaacggaccaagaccgatcggcttctggaggaagctttccttgccgccctcgtcggcgggatagatcgaggtcagcgcggtgaagaaatagaaggccggatcgactttctctgtcagcttcatttcgagggtgaagtcgtcgactttcttcaggccggagatctccttggcctggcccttctcgacctcggccgcgccctcgatgatgcggacgaagcgggcgccgggataggccttggtgccgtccatgatgcgattataggaccagatgacgtcgtccgccgtcatcttgcggccgttgtggaaataggcgtcgtcgcgcagcttgaaggtgtggacgaggcccccgcccgagacgacgacctccttggcaagttccaggaccggcttgccctcggtcgagtcccagatgtagagcgatcggtgcaggcccttggcgtagatttcgtcctgcgcgcggggtgtcgtgtggatgtccatgctggtgaagctggagccatagggcgccgtcatgcgaatggtgccgcccttgcgcggcgtctcggccgccgccgtggcggcgagtgcgagacccaggccggccgcgatcgcaatcatcttgaacatcatgtttccccaacgatgcagaagcattccgatcagcgagttgaccatcggcagcacgtcaagcgcaaggtcctcgtgtcgggtcaatggcgaccggcaccaaatatttgtgctgcctcgatctgaggggtggattcataaacgcgcagcgcgcggcgtgcatccggtccggggtggtgtcgagcggcgtgcaacttttgcttgtatgtaagggattgcgattgaacggatttcaggttccgtcctgaattcgcgaaggcagggttttcttctgatgaggctggtaggtcgggtcgggcgaagcgagacccgcgatcatgtgaattacagcagtccccgatagatccccggcgcggagtcgtcgatggccaccgcgccgacggctttcgcatagaagtccgccggtccgacgccgccgacgatggcgtagccgaagccctggtgcctcatgtcctcgagacaggcgaacagcagcgccttgccgatcccgttctgctgcgacttcggtgcgacaccggtcggaccgaagaagttgcgacaggccgcgtcgtagcaggcgaatcccatgatcgccttttgctggatcgcgataaagcaggaaaccggctggcggctgaacgcgacctcggtttcgctggcccaagcctcactgaaggtctcccgcacccaggctgtgaccttgtgcttctcgggggcgagcgcacggcgcatcacaattccggcctgctgcagccgatcgtaggcgggccgggagtcgggcagggcgtagagcttgacgagcatgtccatccggcgaccttagttgaagacgcgccccctgggcaaatcgcgcgaggataagctcttgcacgcccgcggctctctaagtacatgtacctcgcgtatgtgggaaatatgcccacaacatggataatcggttgccggacgtaacggtcgcagcgcagaacatcaacactggccaggcggttgtcttcattgtcccgctcaacggcttcgccgcggcgctggagcgcaccattcaacttggcagccgacgtgcgcgctgcgaggccgcaagtggcgtgcgatcagccacatcgcggcggaactcggaaggcggcctgcaccgcccggcataagctcgggcgcgaggcgccgtgctcgccccgcgcctcgcgcgggtcgccgtgcaatggagatccgagcacctcgacggtcgcggtggctcccgcaacgagctggcttcgcgcggcgggatcgagcgcgatccggaccggaacgcgttgcgccaaccgcacccagttgaaggtgggattgacgttggccaacaaggtcgcgccggcgctgcgatcgcgatcctcgatgccggccgcgacgctgtctaccctcccgtgcagcacgtggtcactacccagcagtcgaacactgacggcgtcgccgagatggatgcgtggcagcttgatctcctcgaaatagccctcgacgcgcagcgtgtcggaatcgagcagcgccatgacgcccttgccggtggtgagataggtccccggacgcagctcgttgttggtgacgacgccgctgacggcggcacgcacctcgctgcgctcgagattgagcttggccagatcgaggtcggcgacggcccggtcatgggcggcttgcgcctcgccctgggcggcgatcacttgatccaggcgttgcttggaaacgaccacgtcgggcgtcagcgcgctgtagcgcttcaggtccgcgttggcctcatcgagttgggcgcccttgcccagcagcaccgcctcggcctgcttcagtgcgatctcgtaacgcgctcggtcgatccggaacagcacgtcgccgcgctggaccggttggttgtccttgacgagcacgtcggtgacgaagccggatacgtcgggggcaaccggaacgacgtcagcccgcacatggccgtcgcgcgtccagggctcgttcatgtagtaatcccagagcttgtagccggcccagaccgcgaccagaaccacgagtgtggtgggtgagacgcgacgcagcgcgttgagaacggatttcatgagatcaactccctggagatgaagatcaggccggcgaccagacagacgtaaagcgcgaaattgaacagcgcgccgtgccagacgtggcgatagagaccagcctgtgcgaacagtgtgctcgccacgcgcgtgagcatgtatgcgacgacgccccacagcaggaagcttggaacgatcacgccaaacaggtcgaactcgtatctcatgccgcgataccctcttgatttgacaagcgcggctgataggacctggcgccgggaaacaagccggcgcggattccggcaaggccgatcagcgcgtcgttacgactcttgctcgcgggctcccgcaacgtcgacgcgatcgcgttgtcgagccggccgaccagctcatccggcagccgcccggccgtgtggttccgggcagccgatgcaagacggtcgaacagcgcgtcgatgccggcgacggcagcgcgtgacagaccgaggctcgcgtgcctgacgtcgatgacgttcagcgccgtccgcaactgcagaaggttggcggcgtcactctgcgcctctgccggcaccacggcgatacgagccgcaagcagggcgagacgatgctgtatcagaccgccgatcacggcgcgatcgcgcggcgcgctgcgcgcggccacggcagcaagcgtgcgccagttgcttcgcaccaggcggctcgcgatccaagccgcgcccagcgtgcgaacgatgccgcacgtcgcggccgtgagcgcgacgcccaccacgagcgacaggctggcgttggcgaacgagccgaaatcagccgagtaggatgactgcaatgcaagctgcaccgacgtgaagatggcaagccaggagccagcggacccggtcgccggccgcgccgtcatccagccgaacagcaggaaggtcggcgcgagtgcgacgaccagcagctcgaacgtggtgacgcgcggcagaatgccaaatgcatatatgccggtgacggcgatgacgaccaggatcacgccgaagaacctgcgaaaagccggcaacggatcgtccaggccggcgagaaacgaccctacgagggctgcaaacagagccgccgatgcgccatcggtccagccggtcgcgatccagaatgtgcagcaggcgagaacggacagcgtggttgccgcggcggcccatagcgcaagcccgtggtcgcggtgccgggcggccggtgccgcaggatcgagcgtcacggcgagcgcaagcgagcccggatcgcggccatcggcgatcgcctcgtgcagcaggcggcaatcccgcatgaggtcgacgaggttgcgcaatcgaagggcgaggccggccgccgagatatcgatccagcccgcgtcggcgccgagttgtggtgcgacgtcaccaagtgttgcacgcaatccgtcggcctgtcgtccgtcctggtcgccgttcgcgagccagcctgcgatcctctggatgacatcggcgatggccgctggcacaccgccgtgagcgttgagcgcgttccgccgggcctcgatcgacgccagcagcgggtgcagtaacagcatcggttggcggagcagctcgaggccgcgcgcggtgttcgccgatgtcacggtctcgaagccgagatgccggctcaactggtcgatctcggcggcggcagcggcaagccgcatgcgttcgccatcgtgctcctggtcgctgccctggccggtgaagacgtccaccgtgagccggcgcgtgttggcgagccaggcgtccgcgcgcgccgcgatcgtgtcggcgacggtgctcggcagcacgatccttgatgcgatgctcgcgcaggcgatgccgagcaggatttcctgcacgcgagcggcgacgatgtcgaatgtcgattcgggcgtcgaaaggatcgggaagccgagcagggcgacggtgtagccggacagcaggagcatgtaactgcgcggggtgccgtcgatcagcgagaagtacaggaacatgccgacccacagtgcgatggcaaggctgagcagcccaggtgcgttgacgagattcgggatcagcacgatcgtcccagtggcgccgatcagcgttcccagcgcgcggtagaccgccttcgacgacgtcgctcctgtcagctggttggaggtgatgtagacggacgccatcgcccagtaggggcgtggcatgtcaagcagcagcgcaatcgagagcgccaccatggccgcggcaaacgtccgcaccgcgaagacggaagcggaatgccgcgacagaaatgaatgcgactggtccatcgtaagtccgacaggaatggcggtgcgcacattcgcgcgcaccgccggttgcatgactaggcgttgcgcagcgggcggaaggcggtgcgcatttcggcgacaaacagctcgggctgctcccacgccgcgaagtgcccgcccttgtcgagcttgttgtagtggatcagcttcggataggcctgctccgcccagctccggggtgccgtgtagatttcgtcagggaatgcgctgacggcgaccgggatcttgacgccgcgcacatcgaagaagccgcccgtcgatacctgatgggtgtcccagtagagccgagccgaggagatcgcggtgttggtcagccaatacagcgtggcgttgtcgagcacgtcgtcgcgcgacagcccttccgtctcgccgtcgaagacgcgggcgatcatctcctggctgcgcgcgtcgtgatcgagcatccaagccgcgaggccgaccggcgaatcgacgagcccgtacagggtctgcgggcgattggccatctcgatcgcgtagccgaggcccttgtcgtagaagaggcgcagctgatcccaggcacggcgctcgtcggtcgtgagagtggccggcggcgccgaattgaacgccagcgcccttgagacgtcggccggcacggtggccggcatgttcgtgtgaatgccgagcagctcgaccggctcctgcaaggcgagcgtctcggagacggcgttgccccaatcaccaccctgcgccacgaactgcttgtagccaaggcgccgcatcagggtggtccaggcccgcgcgatacgaaccggggtccagcccggtgcagtcggctttccggagaagccgtgacccggcagcgacggaatcacgaggtcgaacgcatccgcggcgctgccaccatgtgcggtcgggttggtcagcggatcgatgatcttgatctgctcgatgatcgagcccggccagccgtgcgtcacgatcatcggcagcgcgttcggatgcctggagcgaacgtgaatgaagtgaacgtcgagtccgtcgatctcggtgatgaactgcggaaggccgttgagccgcgcctcgacgtttctccagctgtagccgttctgccaatattgagcgagctgctgcaccgtcttgagctgcacgccctgagatggatcggcgacggtctctttgtcgggccatcgcgtcgcggcaacacgccggcgcaggtcgatcagcagctcttctggtacatcgatgcggaagggacggacggcctcgccggcagccgcggtgcggattcccggtggaagcacggttgccgcgccgaaggcggcgacccccatcgcggcggtgctcaaaattcggcggcgacgcaggtcgatgatttcgtcagttgtgctggtggtcatggctctctccttgtgcattgttggcttcgactgagatgagaattcgcgtgaaagcactggcgacgcgtgtggggcgtccggtgggttccggccgcagcgttgccaggaacatcgcaaagcaaagcgcgccggtcgcgaacagaaggaggctgaagatgctcttcatggcggctccagtgcagcttccgtcgtggcggggacatcgctgcgcaggccgtccggcacggcaacaacaggggcgcgcgccgatcgcggccgcattcgcggtggcactgcttgacgtaggctgtgcaggcgccgccgcgcgacgacgcggttggcgcgcagttcgcgtgcgccgagcggaaacacgacgaggaacgacgagaactgcggaccgaagccatactcgatccggccgccgaggccgcgggccagatcgctgaccatcttcagaccgcgccccgaccgcaagcgctccgagtgcgagccattgtccgcgacgatgcaattgacgaccgttccgacgacggagagcctgatcttgatcgctccctcccggccttcgaaatgcgcatgttgcgcggcattggtcacgagctcacggacaacgagggcgaggcgccagcagcgctccgcctcgagtggcaggctgtcggcgctcagcgcgagacgaatcccgatcggctccagcgaggatcggctgaggccgagagcgagcttgcggatcgattcggcggcgtccaccaatcggtcgcggtccggcatcgccagtgcgcgatgaacgctcgcatgctgctggagcagttcgatgacgccggcaagtgcgcgcttgacggcagggttgtccgtgcgcagcactgcggcggagaccgtgttgatcgacgagacgaggtcgccgtggatgcggtgcgtgagtgcacgcagcagcgtctggtcatcgagctcgtgagtaggtgcaacgctgggcacgcgggcctcctggcattcgctggatgtgcggctttccggcctgacccgaattatggggagtccggcctcccattgtttcgcctagattgccgtgatgttgtcgttgcttgctgtcgacgaagttcgaagcgctcggtcaatctgtggatcaggagcgacaccatgctgaggcccgcgctcacgagcatggtgaacgatcgaaaatggatcaggtccatggctgcacatctcctatgccgatgcgcaagcgagcacgatggcgcgcgcatcgctgctgccgcgtgcgcgcctcgctccttgctgcagatgagaatatcgaggtgtgcggccgatcgctttgtgtcgaatgccgtcgttttttataggttgctgaaggtcgcggagagcgcgaccgtcagcattacgccaggatcggaatcgcgttccgaatgtcggccagcgacaacgccggctgcgatccggacccgcggcgatactggcccggcgctacgccggccgcctgcttgaacgcgcggttgaaattggcctggctggagaagccgagcgccagcgcaatgtccaccagtggccgatcgccctggatcagaagggctttcgcacgctcgagccgtcgtgcggcaacgtaacggtgaggaggttggccgacggcctgtttgaagccgcgagcgaagtgaaatcgactgagaaaggcaatcgatgccatgcgatcgagcgtgagattgccttcgaggtttgcttcgatgtagtccagcacgcggaaaagccgacgccggtccagcccttctcgtgccgaggcggcggcggaccgtgcggccgaactgctggtgtacttttgaacaagccgtatcgccatgccgcttgctaatgattccaccagcagcttgccggcggaggtttcgctccgcagctccgatgcgatggcgcgtgccatctcacccagcaggggatcctcgaaggcgctgtcgtatcgcaacgcgccgagtaccgaagcgtcgacctcgacgccgagcttgcctggggagaactggcttggcggaaggtagatgtgagcgatctccggcaggtcgccgccgatatcgatggagccttcccgccagcgcgcgggcgtgagccaaatcgtatcgcggcgggtgatggttcgatccgacacgccgctagcctgacgcgtgaccggaaatccattgccgtggacatcgacacatatctccgtgtcggattgcgtcccggtccacgggaccacgctcttgccatgcgcccgcacctccgccgacaggcccgaccagcctcgatcgatcgaagacgacagcagttttgtcgggccgcggccctgccagaagtcgcagtaaggccgcggttcgtgccggctctcggtgacgagatgcgcgctgtgcgtcgacatggagcggtccttgttactctgacgtcgatctgtgtctgtcggcgtgcatggcgccggccggtcgtcgttcagtcgcgccgcgaggccagccttgtcgtcctgcgcgcctcggccttgggttggaagaacaggccgggcagcacggagaccagtccgaaggtcattccgaggaatgccaggaaggtgtcgagataattcagatccattgcacttgcctccatcttggcttgcgcgggctcggcccggtgcaatccgtccaatgagcttaggtatgatccgacacaaagatcggtacaatagaaacattgatctcggtgcaattcttccaatgctctgcgctaggcggcggcaatcccgctccgtcgaagcgcatccgcgtgtcgctgctcgatggctttgacggagttttcgaacgccttctccagcacgcttctgccgacggtgcggagcacgaggccgagcagccatcccctgaggttcttgccgtcgcgcaccacgaccacttcgatgtcggtggtgccatcgggccggcgcgtgaagttgtaggtgtggccggacgcgccgccccatacattggagtcggtcgtcgtcaggatgacatggttgggatcggaccagtcgtagcgcagacgttcccagatgccgcccgagccttccgtcacgtcggcggccgaagggccgcgatgatgcaccttgagataggcgtcggcgctgttgctgaagagtttggagcggcccgggccgaagtcggtgaggccggcgacgtactgctcggctgtcaggctggttgttcgatgaaggcggatcgtcgacatctgtggttcctgcacaagtgacggaaagacgggtggcggtgtcggaactagttggagaccgggcctgacgtgcggacggtcaagccttcgccgttccggctgatctccagcgcgcctctctcgttcggcgtcgagagcagggcacgctgaccgggcgccagcactgatacgaagcggaccggcgtcccggcctcgccctgcgcgagggtggtcaccacgcgatatccgtcgggctcgacggtgtagtagacgacgcctgcgagatcgccgagatggacgctgtggccttcgatcggcttgagcgagcttgcgtgcacggctcccagcgaggccagggtgaacgcggcggcgaggactgtgctgcggatcgacatgggatcctccgttggcttgggtgtggacttgggcggcgggcggttgcccgacggctcccttgtcggaggacatggtcaggctatgatcatcgatcaaacagatgggatcgataatggccatcgatatcgctaatctaggtcgtatcgacttgaatctgctggttcatcttgatgcgctgctgaccgaacggagcgtgaccaaggctgcggcctgcgtcggcattgggcaatccgcgatgagccacaaccttgcccgcttgcgcgagctgttcggtgacgagcttctcacgcgtggggccgatggcatgcgtctgacgccgcgtgctgtaatcctgcgcgagccagtgcggagcgcgctggcgcaggtcgaggccgtggtgttgcgcgatcagactttcgagccggccacggcggtgcggaccttcaggcttggactatcggacagtatggaaatcctgatcatgcccgcgctgctggcgcgcatgcgcgagatcgcacctggcgttcacttccggattcacaacgtcgacgcgtcccggctgctcgatgacctcgacgccgacgagctggatctcgcagtcgcccatgggccgctcccgcagggacaattgcatcacaagcaacgcacgctgctgaccgagcgcttcgtgtgcatgttcaatgcagagaaaaccggtatcacgtcgccgatctcgctcgaggactacgtaaggctgcctcacgtgctgaccagcttgcggcctgcccgcaccgtgcgcgggatcgtggacgaggcgctcgacaagctcggcctgcggcgcaccgttgcgctgaccacgccgcgttttctcaccgttccgcatctggtggcgcaggcgcctgttatcgtcacgatgggggcacggctggccacgcggttctcggccgaactcgggctcagcctcagcccgcctccggtggagctgagcgagatgccggtgacgttgctgtggcacgcctcctacgaccacgatccggcccatgcctggttgcgaaaccaggtggcccagctggctgccgagctgtgagccggtacggcgatgctgcgagaaagcgggcgtatgactcgcaggccgcgccacatgctcgcagccgtcccggcgaaggctgggacccattaccccaaatgcaaattgtcacctgatgctggaacgccgggtcccgcctacaacggctgctgcggcgtatgggtcccggccttcgccgggacgacagggttattcaacatcgcccttcgtcttcaaccgcctcaatcccgatacgaaggatcggcccgatccagcttgcgcagcagcgccggccaagcgagttcgccgttacgtgcagcgcggccgggcttcggcagcatccgctcataggtgtcttcgaggatgttttgcggcggatagatcagcttggtgttgcaggacaacgccatcacctgggtctggcaggcgcgctcgaggcggaacagcacgttgaaggcggcgggtacggtgcggccgaccaccaggagaccgtgattgcgtaggatcatcgcttcgttgtcgccgaggtcgcggaccagccgctcgcgttcgtcgacattgtcggcgatgccttcgaagtcgtgataggcgatgtgcaggaagcgcatcgaggtctgcgccagcggcagcaggccgcattccattgcggagactgccatgccggccggcgtatgggtgtgcgcaacgcagtccatgtcgtgcttggccatgtggatcgcgctgtgaatgacgaagccggcaacgttgacgtcatagtcggtggcgttgagcagcgtgttgccctcgacgtcgaccttgatcaggctggaggcgtcgatctcctcatacagcatgccgtaggcattgatcaggaactggtcggtggtgccgggcacgcggcaggagatgtggtttgcgatcatctcggtcatgccgtacatcgccgtgagccgatagcaggcggccagatcgacgcgggcctgccactcctcggcgctcacctgctcgcgaacggatttcacgaccttgatcgcgggcgagctgacggggggattcatggcgttctctccttgagatgtctgcgaggcaggggcccgactatttggcgggaccttagcagaatcggcgcggcggcaagccgtgacgcgtctgcttatttgcaggtctggcgggcaaaaaccgaatgcggattggcgcgcggcgccatcgatgccacactgcggaaaacagccgaggcgcatcaaaatgagcgatcgcaagatacgtatcgccgtcctgcatttttcccacgaaaccgtctcgttcctgccgaacgagaccacgctcgacgactttatctatccaggctcgccggccaagggcgaggcgctgctgcagttcgatcccaagaactacatgggcggcttcgtgcaggttgcgcgcgagttctccgaggtcgagctggtcggcatcgaatcgccgctctggcccaagacctacaccggatcgggctggatcacccaggaggcttatcggacctttaccggcaagatgattgccgggctcaaggaggaggggccgttcgacggcgtctatctgtgcctgcatggcgccatggcggtgcgcgacgtgccgcggccggaggctgatctggcgcgacaggtccgcgaggtggttggccgctcggcattcatcgccgcaaccttcgatcctcacggcaacgaggacgaggcgttcctcgaacaggccgacatggcgttcgccgtcaaatatttcccgcactatgatgcgcatctgcagggcgagcgcgcggcacgcatgctggtgcgggcgatccgcggcgactacaagccggcgcacaggaccatcaaggttccggtgatctcacctaccgttctgcaatggaccggggcgcgcccgtggatggatctcgtgcagcgcgcgctggtgtgggaggcccgcgaggtcgatgtctacgtcaacatcttcttcggctttccattcgccgatgttcctgatgtcggcatgaccgtgcaggtcctgaccaacgacaacccgaagctcgccgagcaaatcgcgcgcgatctcgccggcacgatctggcggctgcgtgaggccctgctgcaatcgacgaagctccacagcatcaccaagggcgtcgcgctggcgaagcaggccacggccgaccgcaacacgccggtggtgctcgccgatcacagcgaccgttcgggatcggcgacctggctgctacgcgagatcatcgcgcaggacctcgccaatacagtgattgcgaccatcgcggatggcaaagcgacggcgagcctaaaggctgccggtgccaaggccggcgataacttcgacatggagatcggcggcctcgccgacgagtcggctggcgatccggtacggatccagggcaccatctcggcggcggccgagggctacggacagttctgggtctgcgtgcgctttggccgcaacaatgtgctgatcctgtccacctatctggtgcagatcatggagccgttttcgctgaaggcgctggtgcctgacatcggtgcgttcgacgtgatggccatcaagtcgcgggtccacttccggcgcggcttcgacgacaatggcttcgccaagacgatcctgctggtcgagccggagcagccattcctcggcaccacgcgtctcgacaagctgccttacaggaatgtcgatctcacgcggtactatccctacggcaatccagcatttccggaggcgtcgtcatgaccggaggccgctaccgcctgatcggttcgaccgcgtcgccctatgcgatcaagctgcgcgcactgatgcgctaccggcggatcccgcacgactgggtgatcatgaccaaggcgctgcgcgcggccaccgcgcatctgaaaccgatgctgatcccggtgctgcaatatcccgacggcagctttcgcggcgagaccacgacgctcgcctatgatctggaagcgcgccatcagggccgctcggtgatacccgaggacaaggccgtcgcattcgtctgcgatctgctcgaggacctcgccgatgaatgggcggtgaagccgttgtttctctatcgctggtgggacccggaagaccaggcctacgtctcgcgctgggccggtgaggaatggtcgacgtcggaagctgagaccggcagccgcgaggagatcgaggagttccggcagcgccagatctcgcgcatggtcattctcggcgcgacggatgagaacaggccgctgctcgaggagagctatcggcggacgctggcagcgttcgaggcccatgtcggcatgacgaactatctgttcggcaaccggccgtcgctggcggatttcgcctggtttggccagctcagcgagatggcgaccgacccgaccccgatgcgcatcatgcgcgaacgcgcgccgctcaccgatcactgggtgcgacggctcgacgacgcgtccggcgtcgagggcggttggtactcgcgcgagcaggcgctcggcgggttcgccgaggcgttgctgcggatcgcaggcgaactctacctgccattcctggccgccaatgcagatgcgttcgcgaagggccttgagcgcctcgagatcaacgtctggggcctgccttatgcgctggcgccgttcaagtatcaggtgaagtgcctgctgcagttgcgcgagaagttcgccgcgctcgataccggcgatcgcattgcggtgaagcccgtgctggaacgcaccggatgttgggccatcctggatggaggctgatcgaccgcggagggcacgcaggttcaaaacagcgtgagcttaagttcggtgtctgctcccgagcgcgagtgcgatcgatcccggatttctgatccgttcgatcagcaggtcgatgcggtcgccgccccagaacagttccccgttgaacaccatgctgggaacgccaaacacgccgagcgcttcggcctcgtcgatgatgcgatcgtgctcggcgcgggcagggccgttgacataggcctcgaacgcgtcggcagaaccgccgatcgcggcaatcacgccggcaatctccgacaattcgtcgatctccagttcatggttccagaacctctggaaaaccgtgtcgtgatagggccggaacagcccatggcgctgcgcgaacagcatcccggcgcttgaatagaaggcatcgtagatccggcgcgggcccttcatggtcagtccctgcgcattggcgaaccgccgcgcatccatgtaggagtagcgcaccttgcgccagaaatgcggcgtgcgcccttcgaccgtgcccatgaattcgggaatgcgcagcgtgtagggcagccattccagttcgacgccgcagatgttctcgagctcgaacagccgcttgttggcgacataagcgtaaggagatttgtagtcggtgtagatcctgaccttcggcttttccatcagcgttcctcaccccgtcaggacaattgttcctgatccagtgcgatcgcgcaatgcgacgtgatgaaggggatgcgccgcgcaaacgaatggaccccggtgcattcaagcatcgcggggtcctgccacttcgttttagcgaaggatatctggtatagaccagtggtgtttcgggatccaagagcgcttggcctttgcgctctcgtcctgcggatatgttcagattgtcggcagcgcacgcggctagcagctgctatcgcctcaacgtgcaccgagaccttgccgctgagcaaggtcgctggctttcgccggtggcgtcatgctcctctccaagggtgggccgacggacatctgtccgcttctgctgcctggcggccgatcccataatcgtccgccaattcctgcgacgcgaggagcaggcgctccagcaccccaacaggtgcagtcagccaaatgctgcggcagttgtggcctgctgtcaagttaacgcgtaagagaattcaggtcaggtttcctgtcgcgccttggtttttcgatactgcgtgaagtcgggatcatgcgtcattttccagtaatcgacgaaccgccacggcatcgccgagaacacccggccgcgactgttgcggtagtaggtcgtcatgcccggatgcgtccagatcaattgctcatgctcggcatcgacattgcggatgtattcgtcatgcgcggcgggatcgacgtcgatcgccgcgatgtcgttctcgatcatctcgaccagacaggcagagatgtagcggctctggcactccgactggaagatcacgctgccgccatgcgcgggtcccgagttcgggcctagcatcagaaacaggttagggaagtcgggcacggtgagaccgagataggcggtcggattgtcatggctccagacctgcttcaggttcttgccctcgcgtccggtgatgttgagacgcgccgccatctcggagaccttgaagccggtcgagatcacgatgatctcgtgctgccgcgttgtgccgtcggcggtgacgatcccgttggctgcaaagcggtcgatcttgtcggtgaccagctcgacattcggcttggtcagtgtcttgaaccagttgttatcgagcaggatgcgcttgccgtagggcggataggtcggcatgcacttctcgatcaaatcgggacgatccttcagctcggagaggatgaagtcggctagttcctggcgatgccggtcgttgcccttgttgacggcgcgatctggatgtggccaggccggatccttgcgcaggaacggcagcagcccgtcgccgtagcgccagaacatgttgaagcgataccactgcacataaaacggcagatgcgccagcagccactgcgcgccttcgctgatcggatcggaatagcccttcaccggccgcgcccactgcgcggtacgctggtagacggtgaccgaggcgacacggtccgcgatcgaaggcaccagctgcatcgcggtggcgccggtgccgatcacggcgacatgcttgccatcgagcttgatgtcgtcggaccacagcgccgagtggaccttgagaccgccgaaatcctcgtcgtcattgaagcgggcgggctggggatcgttgagctggccgatcgcgctgaccagcacggtggattcgaaggtctgttcaccgttcgccgtcctcagcgtcgagatccagcggcggttgccttcgtcccagtgtgaagcgaccagctcggtcgagaggcggacgtgcctgcggatgtcgtgttcgcgcacgaccttgagcagataatccagcaattcctggcgctgcgcgaaatagcgggtccatggattgcgggcgccgaaggaaaacgaatacgagtggttcggcgtatcgacgccgcagccgggatagcggttgacgtaccaggtgccgccgatctcgtcctgcttctcgacgatcgtgtagggaatgccgagtcgcccgagcgcaacgccgagcgcgatcgcgcagaccccggcgccgacgatcagcacatgctgccgcgccaatctctcgtcggaggggcgcgcacgccagcgtgcatcgcggggaacgaagcccatctcctcccgcatcagcggtgcatattccggtgcgacgttctcgcccagcgtcgcgcgcatcatccgcagcatcagctcattgccgggatcggtgatgacgggcttcggcgcaccgttcgcgaacaagttcaggaccgccgcgcggatctcgtcctggatctctttcggcacgccggcgtccgggtcggggatcaggcggacgtcgcgcttcggcttgtagggcggctcgagccacttctcgtcaccggtcatgtgcaccagcaccatcagcagcacgcggatatcgccctcggcgatggcggaggacaggtcgaggcgttggcgcggaagctcgatattcatgcgttgtcctcagctgcgtggagcttcgggcaggccgccataggccgcccatgtggtacccgcgatgtagccggcatcgaccgggaggttgatgccggtcacgccgctgctctgcggcgagagcagccaggcgatcgcctgcgccacttccatcggctcgaccagccggttcatcgccgtcgggctggcgagcaggtccttgttcagggcgcccgacgcgatgccggcttcgagcgcggccgtgcgggtgaagccgggggacaccgcattgacgcggacgccggtccggccccattcggcggcgagcgtctgggtgatctggatgacgccggccttcgccgcggtataggcgtggatcggccccgacgtcatgccggccaccgaagcgacgttgacgatcgcgccgcgtcgccgcttcgccatgccgatgccgacgctgcgcgcgaccaggaaggtgccgcgcaggtcgatattgacttcgcggtcccattgctccatccgcacccgctcgatcgtatgcatcttgccgaacacgcctgctgcgttgacgagaccggagatcggtccgtgcgccttctcgatgtcggtgattccagcgacgacggcgctctcgcttgcgacgtcgaatggcgcgggccaaagaatagcgctggtcccctccaatggctcgggcgcgatgtcaacgatgacgacgcgatgcccctgatcggcaagcagcgttgcggttgcagcgccgatgccgcggctgccgccggtgatgaggatggtgccgtcagcgctcatcgcttcttccctacgttgctgttgaacaggccatgcgtgaccagcttctggtaggccgtgatgacatagtcgggcacggcggtaacgccttgctcggagtaggaatagcgccggctgagatagccgcgcgcgcccatcaggacctggacgacggcctcgaattcctcgtcgctgaatgtgttggtagcgccggcagcgcgcgcacgctggaggatccggacataggcattcgagatgttgtcaaagtgcttctggtacccggtcggtgcgaagaactcggcttcattgaggatgcgcaggaactccggcacctcgcggatgaaatcaaagaaggcgctgaagcgctcgatctcctgccgggcttcgctggcggtgccggtgcgcgcatggatgaagcggaccatgtcgaggccgatcttcggcagcagctgatcgagcagctcctgccggttttcgaaatgattgtagaaggtgccctgcgcgacgccggcggcttcggtgatacgggcaaccgaggcttcggcatagccgtatttgccgaccaccttggtcgcggcgtcgaaaatcttctgcttggtccaggcgttgcgctcgacccggttgagcttcgtcaccttggcggatgtcgcttgtgtcatgcggtggcctcgagttcggcgcggagcacgcgtttgagaaccttgccggatggattgcgcggcaggctgtcgcggaggatgagttgcctcggcaccttgaaggcagcgagtcgtgcgcggcagaaatcgatcagatcagacagatcgagcctggcatcgtcggccagaaccacgatggcgaccggcttctcgccccagcgttcgtccggcaagccgatcaccgcgacctcgcgcactacaggcatttcgtagatgacgcgctcgacctcggaggaggcgatgttctcgccgccggagatgatcatgtccttcttgcgatcggtcagatagaggaagccgtcttcatcgagatagccgatgtcgccggtgcggaaccagtcgccgaagaaggcggacgcggtcttctcgggatctttccagtaaccctgcgtcaccttcggaccgcgcaggcagatctcgccattgcggccggccggcaggcgcttgccggcgtcgtcgcggatttcgatctcgacatgggcgatggcgcggccggtcgaaccgatcttctcgatctcgcggccggcatccatgaaagtgtcgccgccgcagctttcggtgaggccgtaggcatcgatgtagcgcgcattcctgaaatagtccgagaaggcgcggatgcggacctcaggcgtcttctcgccgccgccgatcgcccattgcaggctggcgacatcgtagcgttcgcggtttgggcaggtgagcagcgccgttgtcatgaccggcgcaaaccacgcggcgttcagtttctcgcgctcgatcgcggcgagcgccggttcgggctcgaagttgcgatgaatgcacagcatgccgccatgccagagtacggcgatgcctggcaggtcgagcgcgccgacatggtagagcgggccgaccacgagcagccgcgtctcggagttaagcccgagcaccagcgtctggtcggcggatttccagtaaatgttctcgtaggtgagcatcacgcccttggggcgatcagtcgtgcccgaggtgtacatcagccgcattaaatcgcgtggctgccgcacatggatcggtgccggcgcgatgtcgggcgcgaggttggtgacgctggactgcgcgacttcacccagcagcaccaccggcgcgccgccggttacgatcgcggcaaattcctcgtcggcgaccagcagccgcgcgccggaattgccgacgatgtagccgacctcatcggccgacagccgatagttgatcggcaggaacaccgcgccgatatggcttgttgcaaacaccagctcgagaaaggaggtgctgttcttcatcagcaccgcgacgacatcgcccggcgcaatcccgcatgacacgagccagctgccgacctggcggatgcgcaggtcaaaatccgcataagagacgttctcgccgcgatatttcagcgcacagcgatccggagtccgcctggcatggaatgcgatgaagctggaaagattgatcatttgcgtccgtcgggccgattccggcgccggttttctccctggatgaattatgactcgtaattcatctttggcttgacgtcaccccccttgctctgaaaacatcgcggtcacggagacggcacgatctccgacagggattttgggaacgcgaacccgatagggaggggaatatgaacaggacccggaaaccgggcatcagccggcgcgcgacgcttgcgttcatgggcgccggtgcggcgacctttgctgcgccatgggtggcgcgcgcgcaggccaagacgatcaagatcggcatgccgacgattctgtcggggcgcgtcgcgcagctcggcacatcctcgcgcaacgcggtgatgctggaagtcgagaaggtcaatgcggccggcggccttgccggacggcagatcgagatggtgatccgcgattccaaagggcagccgcaagaagccgcgcggatcgcgcgcgagctcgtcaacaccgacggctgcgagatgctgctcgacggcgaggcgtcatcgggatcgttcgcagttcacgaggtcgcgcgtgatctcggcgtgctctgcatccatacctgctcggaagcatcgtcgctgacggctgatccgaagcagcacattccgaacgccttccgctgcgtgcggcagggcatccacgactcgatcatcggtgcgggttacgcggcaggcatcgccaaggccaaggggctgaagaagtgggcgacctgctcgcccgactatgcctatggccgcgataccaccggcgagttcgtgctgtacctgaagaagttcgcgcctgacgtcgagatcatcagcgagtcctggccgaagctgttccagcccgactacaccgaggtcgtgaccaagatcctgcaggccaagccgcaggcgatgtattcgtgcctgtggggcggcgatctcacctcctacatcgatcaggccaacatctacgcgctgttcacccagatggaggtgttcgcggtcaacatggccgactacaccgcgctcacggtggtgaagaacctgcccaagggcatccattccggcgaccgctacatcaagaccttcccgccgacgccggagaatgccgcctggggcgatgcctacaagtcgaagtacaacgaatacccgaccaactggtcgtggcagaacgcgaccgcggtcatgttcctcaatgaggcggccaagaaggccaattcgaccgacggcaagaagctcgccgaggtcctgaccggactgaccatcaagtgcccgttcggcgccgatggcaccgtcaccatgcgcgccgacgaccgcacgctggttggctacgcgatcggctggggcaccacgatcccgcaggagccctacgtgctcgatatgaaggccggtgactggaagaccatcttcgaactcgaagccgagtggaagaagagtaagggctacacctgacccgcatgcggggcggaggcgcactcgactgcctccgcctcccatttgatgtttgtcgcgcgccggcgttgcggcccgccgtaatggatgattcccgtggacctcgacgcgcttgccagttgcttcgtcagccccgcttgcctggtgacccagaccaccagcgggctgatcatcggcatgctgctgtttctcgtcgccgtcgggctgaccctgattttcggcgtgctcaaggtggtcaatttcagccacggcgccttctatatgttcggcgcctatttcgcgatgacggcctatcagctcaccggcagcttcgcgctgtcgatcctggctggcgccgccggcaccgcgatcctcggcctgatcttcgagcgcgtattcatgagccgggtctacggccgcgacgtgttgatgcagttgttggtctgctacgccttcgtgctgatcttcgacgacgtcgtccgcatgatctggggacctgaattcaagtcgatgggcatgccggccgcgttccaggttccgccgctcttcatcgccggcggcgtggtgccgccgtattacctgttgctgatcggcgtggcgctcgcagcggccgcggttctcggactgggactggcgcgttcccggatcggcaaggtgatccgcgcggcggcgcataatcccggcatggtctcggcactcggcatcaacaccgggctgatctacggcggcgtgttcgcgctcggcggcatgctggcggggttggccggagctctggccgcgccggtgcgttcgctgacgccgggcatgggtttctcggttctgatcgagtccttcatcgtcaccgtgatcggcggcatgggctcgatcctgggcgccctgatcggtgcgctgctgatcggcttgatccgctcgttcggctcgctcggctttccgctgttcaccgaggggctgatgtacctcttcatggtgattgtgctggtgtcgcgtccgaccggcctgttcggcaaggaggtcgcatgaccgagttgcaggccggagagggcgcgcagcccctcaaggtgcctcggatcgacgccaggccgcagcgctatcgcgacgtgctgatcgcgctgatcgcctttgccctgctggcgctgctgccaatggtgttcagcagcaaacagctgctcgatttcgtgatccgctgcgcggcctacggactgttcgcgacgtcgctcaatctcctggtcggctacaccggactgatctcgttcgggcacggcatgttcttcggcctcggcgcctatggcttcggcctgatgatgcagaagaccggcgtcccgatcccggtggctttcgtcgcgacgctggcgatgaccttcttggtcgccgtcgtcatcggcgcgatctgcgtgcggctgaaggagatctacttcgccttcgtcacgctcgcgttccagatgctgatccactcgaccatcctgtcatggcaatcgctgaccggtggcgaccagggcctgcgcggcggcatcccgcggccgccgtttctcggcatcgacctgtccaaccatctgcatctctacatcacgagctgcgcgctactggtgatcgggctgctgctgatgcgccagatcgcgcagtcgccgttcggctacacgctgcgcatgatccgcgacaacgccacgcgggcgagcttcatcggcatcgatgtctggcgcgcgaagttgacgatctttgtgctggcggcgttgttcgccgcgaccggcggcatgatcatggcgctgttcgtctccggcgcctatcccgaattcgcctactggacggtctccggtgaaggtatcttcatcaacatgctcggcggcgtgaccaccttcctcgggccaatggtcggcacggtgctgctcttgatcctcaacgacaccgtcacgcgcttgaccgagtatcacggcatcgtgctcggcattgtgatcctgttctttgccatcggcttgcggaagggcctgatggactttgtcgtcgagcggctcgcgcagcgtcgcggagaggggcgcggttagccatgctggagattcgggccctctcgaaatcctttggcggcgtcaaggcgaccgacaacgtctcgctcgactttgccgatggttcgctcaccgccgtgatcggccccaacggcgccggcaagagcaccttcttcaacctgatcacgggggcgctgcggccggacgccgggcagatcctgctcaatggcatcgacttggcgggcaaggcgccgccggagatcgtgcgccatggcatcggccgcgccttccaggttgcgagcatcttcccgtcgctgacggtcgaggagacgatgctggccgcggtctgtgccgatcagcgccgcgccggcgtcatgcatcgccgcttccctctggccgagacgcgcgaccgcgccgagcatgcgatggagctgcttggccttgccggcaagcgcaacatgaccgcggcgacactgtcgcatggcgaccagaagctgctcgatatcgcgctcgcgctggtgctcgagcccaaggttctgctgctcgacgagccgaccgcgggcatgggtaccgaggaacgctggcgcatgatcgacaaggtgcgcgagctctgggagaagcagaagatcacggtcgtgttcatcgagcacgacatggacatcgtgttcaagatagcgccgaaaatcgtcgtgctgtgctacggccggatcctggcgaccgggacgccggacgtgatccgcagcaatgaagcagtgatcgaggcctatctcggcagtgacgaccatgcgggagtggtggcatgagcgcgcagccggtggtgcaggtcgagaacctcaacgtctattacggcaccagccagatcctgttcggcgtcgacctctccgtacggaagggcgagaccatggcgctgctcggccgcaacggcgccggcaagtcgaccacgatgaaggccatcatgggccttgcaccggcgcgccgaggcaaggtgagcctccgtggccaggtggtgtcggggatgcggccgcatcatatcgcgcgggccgggctcggcttcgtgccggaggatcgccagatctttcccgagcacacggtcgaggacaatctcgtgatcggccagaagaaggggcctgacggcgaggatgaatggtcgatccggcgtgtctacgacgtgtttccactgctggagccgctgcggcatcggattgcgggaaggctgtccggcggcgagcagcaaatgctggcgatcgcccgcacgctgatgggcaatccggtgctgttgctgctggacgagccgagcgaggggctggcgccgatcatcgtgcagcgcatcggcgagctgctgcggcagctccgtggcaccggtgccacagtattgatcgccgagcagaacatgcatttttgccttggccttgcgagccacgcgacggttatcgacaaggggcagatcgtctacacatcctccatcgaagagctgaaggccaacgacaacatccggcagcgctatctggcgttgtagggctcttagtaagacgtgggaggataaatggcgggcgaacgcaagttgacgccgacgcatgaggcgccgtatcgcgggctgaaggtgctcgatttcgggcaggggatcgcctcgccctattgcgcgatgctgctcggggtctatggcgccgacgtcatcaaggtcgagccgcccgagggggactggtcgcgctatctcggcacgacctacggcaatcacacgacgctgtcggcagtgtacaaccgcggaaagcgcagcctgtgcctcgacttgaagcacaaggacgggatcgcggtcgcccagcggctggcacgcgaggccgacgtgctcatcgagggattccgacctggcgtcgccgagcggctcgggctcggctatgagagcctgtcgcgcgacaataagggtctggtctatctgtcggtcagcggcttcgggcagagtgggccgtactcgaagcgaccgggctcggattcggtcgcgcaggccttttccgggctggtctcggtcaatgtcggcaccgatggcgtgccgcatcgggtcggtacgaccatttccgacgtcgtcaccggcgtctacgcattccaggccatcgcgacgactctgttcgcgcgcgcgacggtcggcaccggccgctggatcgacgtcaatctctgccagtcgacgtccgcgctgctggggcacaaggtcgccgagttcatcctcgagggcggcacgccgcgggcgctgaatgtgccggccggcacctaccagacgcaggacggctggatgatggtgacgttggtgaacgagccgcaatacaagcggctgtgcagtgcaatcgcgcgcgaggatctcgcaagcgatccgcgcttcgccgactttgcccggcgcgccgacgcggcggacacgctgatcccgcagctgcgcgaggtgttcctgacccagccgacggatgcctggctcaaggcgctgcacgcggccgatatcatcgcagagcggattctcaaccccggcgaatggctgcgcaatccgcacgtcgaggcgaccagggcgtcggtgtgccaggatacgcccggtgtcggcgcggtctattcgccgcggacgccggggatcgcgagcctgtccgaggatgatctttgtcccgcgccggacgtcggagaggacagccgtgctgtgctgatggaagctggacttgactccgcggagatcgacggcttgctgatgtcgggcgcggtgcggcaggccagggcgatgacaggaggcaaaacatcatgagcacggacctcgttggttactcggtcagcaaccggatcgcggagatcgtgctggatcgcgcgccggtcaacgcgctcagcatccccttgatcgatgcgttgctggcggcgctggcgaaggcgcgcgatgacgacgcggtgcgcgccgtcatcatcagcagcgcccacaaggtgttttgcgccggcctcgacctcgacatcgtcaggggcaagccggcgatcgagaccaaaaagttcctcgagcggctgtatttcgcgctgaacgatacgcagtaccgcatgggcaagccgacgatcgcagcgatcgacggtgcggtgcgggccggcggcatgacgatcgcgatctcctgcgacatgatcgtcgcgggcgacggctcgaccttcggctatcccgagatcgacgtcggcctgatcccggcgatccatttcgtgcagttaccgcgactggtcggcaagcaccaggcgttcggccccctgttcctcggcgagcccttcgatgccgcgaccgcccatcgaatgggcctgctcagcgaggtggtgccgaaggggacggcgctggagcgtgctcgcgagatcgcagggaagctggcaacgaaatcgccgatcgtgatgaagatcggccgcgatgccttcatgcgcgcggtcgacgccgatttccgccgttcggtggagaacacggcggaaagcttcgtggtggtcgcctcgacggaggactgccaggaagggctgaatgcgttcgtcgagaagcggacgccaaattacaagggacggtaaatggctggattgtatttcgaagagttcgaggtcgggcaggaattccatcacgagttcagccgcaccgtgacggagatggacaacaccatgttcagcctcctgaccatgaacccgcagccgctgcacctcgacgcgcatttctccgagaagaccgaattcggccagcggctgttcaacagcctctacacgctcggcatcatgatcggaatgagtgtttacgacacgacgctcggcacgacggtcggcaatctcggcatgaccgacgtcaagtttccgaagccggtgtttcatggcgataccttgaaagcgcataccaagatcatcggcaagcgcgccagcaagtcgcgaccgacccagggcatcgtcgaattcgagcataccatgaccaaccaacgcggcgaggtggtggcgagctgccgacgcaccgggctgatgcactgcaagccgaaggcgtaaacgatgcgatcttttctgttcgttcccggcgacagcacccggaagtttgagagcgcgaagaagaccgcggccgatgcgttgatcctcgatctcgaggattccatcgcgcccgaccagaaggtggttgcgcgcgggatcacgcgcgagatgctcgatgcacgcaatccggagcagaagctctatatccgcgtcaacgcgctcgataccgacctgacgctcggcgacctcgccgccgtgatgcccggcaagcccgatggtatcgtgttgccgaaatgcgccggcgctgccgatgtcaacaagctcgcgctctacctcgacgcgttcgaggcggcctccggcatcgcgcaaggcacgacgcggatcatcacggtcgcgaccgagacggcacgggcggtcctgaaaatcctcgacttcgagaatatgagcccgcggctctggggcatgatgtggggcgcagaagacctcgcggcttcgcttggcgcaacccgcaacaggaccgacggccgctaccattcgcccttcatcctggcccgcgatctttgcttgatcggcgcggccgcggccgccgtggtcgcgatcgacaccatcgccaccgatatcaacgatctcgacgcgttgaagaccgaggcgatcgccgcgcggcaagacggctttctggccaaggccgtgatccatcccaagcacgtcgacgtcgtcaatgcggccttcatgccgaccgacgaggagatcgcatggtcggagcgggtgatcgctgcattcgccgataatccatctggagtcgccaagatggacggcaagatgctggacaagccgcatctgcgcgccgccgagaagatcttggcgtcacgtaggaaatagtcagcggtctggttcgatcagcgcgccctccttgaggagggcggcaatctccgcatccgcaagtcctgcctcgtgcaggatctcccggccatgctcgccaaggttcggcggataggtccggatcgacggcggcgtcttgctccaggtagcggccggacccgcgacccgtagcgtgccttcggttgggtgttccagcgactggatcaatccgacctcagccagatgcggatcgtcgatcaagctgtcgagatcgtgcagcggcgcgtgcggaatgtcagcctccgcgaagaagtgcatccattcggcggtgctgcgggtcttcatcatctgcgagaaccagtcgtagacgaaatcgtagttccgcgtgcgcgccgagatgctgttcagccgcgggtcgcggtcggcctcgtcggcgaggccgatcttggcgaaaaatgcgttccattgcttgtcggaatagaccagcgcgcagatgtagccgtcgctggtctggtagggccggcggtcgggcgacagcagacgggagtagccgggcggtccgatcggcggatcgaagctgcggccggccatgtgatcgccgagcacgaactgcgccatggtctcgaacatcgggatttcgatggcttgtccttcgccggtgcgctcacgatggaacagtgccgccaggatggcatggaccgcgttgaggccgacgatgcggtcggccatggtggccggcgagtagcgcggctcgccggtgatccggccggtgagcgcgggcagcgccgtcagtccctggatcaggtcgtcataggcgggccgtccagcatagggcccagtctcgccgaagccgtgcaggctggcgtagacgatccgtgggttggctgcgagaagatcgctggcgccaagcttcagccgcgccatcgccgcaggacggacgttgtggacaaacacgtcggccgctgcagcaagccgcagcagcaccgcgcggccgctcgccttcttcaagtccagcgcgatcgagcgcttgttgcggttgccctgcaggtacatcgcgcccatcccgggatggcgcatcggggcggcgtggcgcatcacgtcgccatcagggctctcgaccttgatcacgtcggcgccgtagtcgccgaggatcatcgtcgcgtagggtcccatcatgacgctggtgaggtcgatgatcctgacgccggcgagtgggcccaccggcgcaaatgatccgtccctcgtcgaagccccgctcaatgggcggccgccagcgcttcggtgaaggccttgaacacgtcgctgcccggcttgccgcgcttgtcgacgtccttcacccagtcctgcgctaccgacttgaaggcagtatcgaacaccttcttgtcgtcggcgccgaagctgatgaccttcatgccttgcgacttgatcttttcggctgccgccttctcgccgtcctcgaaccgcttgcaggcctcgcgggtggtctgctcgccggcttcgacgagcgccttgcggacgttctcgggcagcgacttgaacttcagctcaccgatcgaataagtgaagatcgccgtgccgaagttcagtccctcggtgccggatttcagcaacttgccgaagtcgtaggacgccgagctctgataggagaagatcaacccgtcgagcgtgccgcgggtcagcgattcatagatttccggcgcggccatccgcaccggtacgccgccgatcgagcgcatcatcagatccatcgcgccgccggtggtgcggatcttgaggccttcgaggtcctttgcggccttgatctcacggctggtcgcaagctgcacctgatacgccggcagcgccagcgtcaccagcggccgaagctggttgggtgcgaactccctggtctccaggatgccgccattgtgcgagaccttgtagaaggcaagcgagccctggcattcattgtcgaagatgccgggcaactcggcgaccgccgtcagaggaaatttgtcggacgaataggacggcacgatgtaggagacgtcggcgacgccgagcgcggtgagctgggccatgtccttggccttgccgagctgctcggccgggaaatgctggaaggtgacttgaccattggtcagcttggtcacgagctctgagaacggcttgccgacgagctcatggatcacgtgaccggagggcaggctgtcggcaagacgcagcgtgatcttctcctgggcagaagccgttgatgtggaagcggccagcaagaccgtgccgacgccggcgagcaaacgagaatagagattcattggggtctcccagacatggccatctcaaccgacggcttcttcaatgctgcatgtggttcggcagccagaggatgatctccggaaatgccacgaaaatggcgatggcgatcaggtgcgcgatgaaatgcgggaaggtgccgtggaatacctcacccacagggcgatgtgcgtagcgcgccacgatgaagcagttcaatccgatcggcggcgtgatcatgccgacctcggcggtcacgatcttgatgacaccgaaccagatcgggtcgaagcccagcgacttgatcagcggcagcacgatcggaaccgtcagcaccaggatcgcgatctgatccatgaacgagccgagcacgatatagccgcacaggatcagcgtgatgatgatccagcgcgagacgtcgagcccgccgacccagccgacgatattctgcgtgacctgcgtcagagtgaagaaataaccgaagatatgcgcgcacatgatgatcagcacgatcatgcaagtgccctgggcagcgtggcgtagcgtcgtatagagtgacgtcaggttgatcttgcgcttccagcaggcgaggcagaaggcgccgaatgcaccgaaggccgaagcttcggtcggggtcgcgattccgagatagatcgtgcctgtgacgatcgagaacagcaccaccatcgggctgacctgccacagcaggctgaaccgctccgaccacgtcaccgccgagatcgtcggcgcgcgtgagggatcgagcaacaccagaatgtagatcgtcgacatgatgatgatggtgacgaagatcgccgggatgatgccgctgatcaggagctttccgatgttgacctcggccaacaggccgaagatgaccagtgccaccgaggtcggcagcagcatcgcgagcgtgcccgagatcgcgacgacgccggccgccattttcggctcgtagccctggcggatcatggcgggcaggctggtcgaggacagtgttgcggcggaagccgtgctggtgccgcagatcgagccgaaccctgcgccggccagtgcggtcgccatgccgaggccgccgggtatgcgtccaacccaggccgccgcggtcttgaacagatcgtcggcgacgcccgacagcagcacgagatccgccatcagcaggaacatcgggatggtgatcagctcgtaggaggtgacggccgatagcggcgtcgtctgcaatacgccgagcaggatcggtaggccgccggtgagatagaggccgagtccgccggagaatgccatggcgaacgcgaccggggttccgatcgccagcaggaagaacagcagcgcgagaataaaagtcgggatcattcgaaacctccggcagccttctccgaatggccggagatggccggcagcggcagcagattttcgccggtcagcaggcttgcgatattggcgatgagatgaacggcaaggcgcagcgcgaggatgccggcgccgatcggcacgaaaatcgaggatgcccaggtcggccacgggatcgcgcccgccatcacgtcgctggagacatagttgtcaagcgcccgctggtagccgagccaggtgatcggaacgaagatcgccaggccaacgatgtttgagatgatgacgcaaaggcgttggaggatcacggagaagcgcggcagcaggatatcgacgctgatatggccgccgaccgcataagtgccggagagcgacagaaagaacacgccggccatcacgtagagcgagatcaggtcgtaggcccaggagaacggccggttgaagacgtagcgcatcacgacgtcggaaaacacgatgatcatgattgcgaacatcaaggccgcggcaatggccgaggtcaccttctcgatggcggccagggccttcaggcttgtcttgatcaatttgggctccgtctgcgttacttggccggcaccgccgcaacggcggtgctgaattccgtcagcgcatcactgccgtgcttgccgcgcgcatcgagcccgtcggcccacgccttgccgactcccttcgtcaggtccttgagctttgcgacgacatcggattgcaaggtgtcgaaatggacgccggcggcctccatcgacttcatggtctcgctgtcctgcttctgtacttccttgcaggcagacggcaggatttcctcagcggcatcgaccattgccttctggatatccggtgacagtttcttccaggcggtctcgctgatcgaataggcgaccacgaagcttgcgaagccaaagccgtcggtggaatgcttcaccagcttgtcggcgccataggcgacgacgctttcgagcggaaacagcaggccgtccatcgtgccgcgtgacagcgactcataggcatcgggcgccgccatgcgcacaggcaccgcgccgattgcgcgcagggtgagatcctgtgcgccgccggtcgaccgcagcttcagtccgttgatgtcagctgtatccttgaccggctgcttcacggtcaggatgcgatagggcggcaggctcaccgcgagcagcaggtggatgccgttcgcggtataatcctgctgcgcgatcacgccgctccgtgcggtcttccaataggcgagcgtgccctggcaggaatgctcgaacacgccggggagcatcgcgacttcggagaccggcatcttgtcggagacgtaagcgggcgcgacatagccgatgtcggcgacgccggtttgcgtcagcttgagcatgtcggcggccttgccgagctgctgcgccggatagtgctcgaacgtcaccgcattgttggtgcgcttctggacctcggccatccaaggctcgagcacgaggcggacgagatagtgccctttcggaaaggagtcggcgacccgcagcttgatcggttccgccgctgccgccagattgaccgatgcgatgaggaagccgtaaccggctaatatgcgccgaagcccgcccatatctcctgcccctgaatatcactgttgttttgagcagctgcgcataaacgaaattgcgcgtcaagcatggcccgctcagcatgatgaaagccgatcctgagaaagccccggatctcgacatccattttgtccatcacgcgggaaatttcgagcgtgcggtcgacagctcggcacggtgcctactgttatcgtcgcgcagtccgagaccggtcagaccgcgggaaactccagctcgaaggcgacaccccggtgggacggcaggagacggatcgtgccgccatgagtcaccatgacggcttgggcgatggcgagccccatgccggtgccgccgctgtcgcggcgggtggtgaagaaggcattgaagatcttgtcgctgttggcatcggagatcgggtcgccatcgttgctcacggtcgcccggacggttgcgacgtcggcggtcgcctcgagctgcaccgacccggcattgtgacggaacgcgttgtcggccagatgagccagcacgatcagcgccttctcggcggacatcccgatcgagcggtcgaggcagcccttggccacgatcgtccgcccgggaaagcggctcctcaaattcgcgatgacgctcgagagcgaggtctgctcattctgcggcgcgctctcggcgcgggccagctcgcgcagccgttggctcatcgcatcgagccgctcgacgtcgccaaggatgttggagatgaagctccgttgctcggaccgggtcagcgtatccgatttgctttgcagcgaatcctgcaccagctcggcggccccccggatcgccgtcaacggagatttcaactcgtgcgtcaggtgggccgagaaggttgcgatgtagtcggagcggcgtgacagctgctgggccatgtcgaggaagctgtcggagagttgggcgagctcgcgggtgccataatgttgcagcggctgaaatgcattgcggtcgccgcggccgattcgcgcggcgcgctcgacgagctcgcgcatcggccgggtgacggtgtgtgagaacatcagtccgatcgcaatcgtcgtcagcagcacggccaatgtggcgagcacgaacttgccgcgttcctgatagagatgatcgaagatgttgctcggcgtccgtgacgtatagatcacgccggcgacgtggtcgttgacgatcacgggcatcgcggaaaagacatggacaccgacgccacggctgatcgagtagatcggcggcgggggtttgtccggcacgcggatgcggagcgcggcgctgtactggccctgcagggccgcggccacctcctcgatatgggcaagcgattgtccgacctcctgccgtccagcaatcaccacgccctgcggatcgaggatgcggaaacccgccagggtgactttctgggtctccaggatgatcggcatgagccgggcgccgatctcgacatagccgggatccgcgggtttcggtgccggcagcgcatcgggccgtcgccgcaacaggtcgttgccggcgagatcgagcgcgggccggatcggcgtcacctgatcgccgggatcaggcagcgtctccggcggcactgccgcgccgagcggaatgccgttgtcgagccgtgcctgtacgtcccgcgcatagattgcggccagtacgcggctctgcgcgatcaactcggcctgggtctggtggatcagctggttgtcgtagagacggaagaagaacagccccatcagcggcaggaccgcgaccaaagcgagcaccgtgaagatcacgaaaccgagcgacggtcgccacttctgatcggcgcggtgagacgtcatgcctgcggctcgcagcggccgagcttgaagcccacgccgtgcacggtctcgatgacattgtcgcatttggcggccgcaagcttggccctgatattgcggatatggctgtcgatcgtgcgatcggagacctggatgttgagctggtaggccgcgctcatgatctgctcgcggttgaacaccgccatggggcgggtcaggaaggcgcgcaggattccgaactcgatcgcggtgagatgcagcgccgcgcctgcgaacgttgcgacgtgctgctcgggatcgagcgagagctgccctcgcgagagcacggtcgcctccggcattgcgcacgccgcgcgcggcgtcaaccgccgcaggatgacgttgatccgcgcgaccagttcgcgaggactgaacggcttggtcacatagtcgtcgccgccaatctcgaggccgagcacccgatcgatctcctcgtcacgggcggagaggaacaggatcggcacgtcggatgatttgcgaatctcacggcagacgtcgaggccgtcgaactccggcatgccgatatcgagcacgatcaggtccggtctttctccggcgaagcgggccaatgcgtccttgccgtcgcgggcctcgatcacgctcatgccggccttcctgagagcgacgcggatgacttcgcggatatgcgggtcatcgtcgacgacgagaatacggtgggtcaacgggatctccgaatgcggcgttctggccacgcctcgctctcgcttgagccaattgttctacaaggcaactgcggcgggagacaagaaccgaacggcttcatgtcagcgggctcgtgcgggttagtccatcgcgggtggattgcttcagccccgcaatctggagaggttgagccgtgcatgcgcagggcccgagaacgcggtgagcaggagttcaggatttttatgcagattgcgtgcaggggcggcttgtcggctcgcgctggtgaatctcgtctgatacggacgaagccgatcagcctcttcagtcgcacgtggtcccatgcaagtcggcaagtgtatcggaatagtcctgctctggatcgcagggctggtcttcgtcttcgcgggcatcaacaccaacgatccgtatctggttccgctgcgcgggccgggcaaccttctcctcgcggtcgcaagcatcgccgtcgcgtatatcctgatccgccgcgtcgcgtggcgcaggcggagttgggcaggcaggcttctggtcgtcctgtggagcctgccgccgcttgcgatgctggccgcacatggcgtgttcgaggtgcggaagcaccgcgttctccaggcggacccggtgcttacccggtcgcttgggcggcattttatcgtcggttatcgctcgtttgacgaggtcgtaccacttgtggagagggggttcattgccggcatctatgtcacccggcgcaatgtcgcgggccgggcggctgagccgttgaaggcggaaatcgcggcgctccaggccaggcggcatgccgcggggctgccgccgctgatggtcgcgacggatcaggaaggcggcatcgtctcgcacctcgcgccgccgctgacgcggctgcccgcgcttgcctcgttggcggagctggcgccggatgagcgaaaggcaaaagccgaggagttcgggcgtatccatggacgcgaactggcatcgcttggtatcaacctcaatttcgccccggtgctcgaccttcggccggaagccaagcgcaatcagctcgatttcaacacactgaccaatcagcgtgcgatctccgatgatccggccaaggtgagcgcggtcgctggcgcctacatccatggcctcgaatccgctggcgtcagtgcgaccgtgaagcactttcccggattgggccgcgtgcgcgccgacacgcaccattttgatgccgatctcgatacgccggtcggcgaactcgaggccaccgactggcgtccgttccgcgatgtgctgtcgacgagcggcgcgcgcctgatggtcgggcatgtggcggtgagtgcgctcgaccccggacggccggcgtcgcattccaaggccgtcgtcgacggactgatccggaagacctggaactaccaaggtatcgttgtgacggatgatctggtaatgggcgcgatctatcagcacgacgtctgcacggcggtcgtggaggcattgaacgcgggcgtcgatctcttgctggttgcctatgacgggttgcaattctaccgtctgttcgcttgcgcaaccgatgcagcggagcgagggggcctcgacaccgcaatgttgcgcgacagcgagacgcggctaaggcgcgcgcagctgatcgactaaagcgcgatgagaccaggttgaggcgtcatcgcgcgggctcaggaatgagcgccgacggccgatttgttgtcctgctgcttggaccacgagacgtagtaggcaacggccgtcatcgccgcgatgccgccgaggctgaccccgatctgccgcgccagcgaatacgggccggtgatcagaatcaagtgcgcggcgaaagagaggaacacgcctgcacagaacacggccagccattcctcgccacatttgatgatcggctgcagggcgtaagatcgcaggtatccccaatcgcgcgggaccaaccaggtgaacaggaacgtcagggtcaggaaatgcaggatgcgatgaggcgcgacatcttcgcggtcgttctgcagcagcacgtcgctcaatccgctgggcatcatctgggcgagtgccgggatttcgctgctggaaacaatcgtcagcgcgaacagcagatagagcagcgccgtcgcgcgtagcgcggaattggcctgcatcgcgcggatcgcaggagcatagcgcgtgccgatcagcgcgagccaaccgcccatcacgaacagcaattgccagcagaacggattgagataccaggccccatacggataggatgtcaggttccagtcgagtacgcgggcggccgcgtaaagtgcgacggacgcgagaagcgtcgcgttcgggacgtacagcagtccgaagatgacgatcggctggaatgccattagcgcgatgatgagttgcagcacgtcgagattgagcggcttggcttgcaggaacaagccgtagatcagcgtccggaccgggtggtcgatgaagccggtgatgttgaattcgctgatgatctcgggcgctgcggtgcgtgcggcgacatagctgatcaactcgacatagatcacgaacaggacgatgtaggcggcatagagctgccatacccgcttgaagatgcgggttgccgccaccaggaatccgcgctccagcgccatctgggcgtagaagagcgtcaccgcataaccgccgatgaatacaaaaaggtcggtcgcgccgctaaagccgaaattgcgcatggtcagcgcgctgacgaagttatgcggaatgtggtcgaggaacagaaaccagtttgcgatgccaagcagcagcgcgatccggagattgccgtcggctctcgcgatctcggcgttggttgtcgaactcatctgaagctgaaatcttgccggcccgagaaaacgattcgccaatctaaagggaacccaggcctggtccgaatagactctgcgtgaaccctatctagtcggtttcgggttccggccaagtggtcggctcaagaaagatcacgttttcgcaattgccatgtgaacgctgtcacaccggctcgtgcttgcgccggtcgcggacgtgatcaagcgtattggcttgcagctcggcgccggtcagcgggatttcgggcagggcggcctccgaaaggatatcgtctgtgacatcctcgaccgaacacccgtcaatctcgtgaatgaagctgatatttgcatattctcccgacgcgatccgcgagacgacctcgcgccgcgtcagttcgggatcgacgatcgcctcgcggccacgccggccatagtcgatcatcacgacgaaatattgcattgcccgagaggccggtgtgttgactgttaccacccattgtttccgataatcggaattttgtcaagataaattgacgataatcagaattcgcgccgctcgcggcgagaccgatccggtgcgatcgcgtccgaatcggtcaggccggcagctgcagcgttgctatttctcggacgatcggccgcccttggggcccgacttgcgccctttcgccgccgtcttgccgcgcagccgctcgatctggccgcggggcaaggtgacgcagatttcgccgatccattcgagcttaacgccgttgatcggcttggcattgaagctcttcaggttgaccgtgccggaagaactgccgcgttcgatcgtcttcagataacgctcgccgctcttcagccggaccgcagcctcctctccgtagaagctcgacagtggatagcgctgctcgcgatagaccacgatgacatcgccgttctcgtatttcggcagcatcgaatcgccggaaacctcgaaagcaacggtctcctccgtcatcgggaacggaagttcgatctccccgagaccctccggcggcacctgttccagctccggctggatcgaagcgccggcgccgacccggcccacgatcggcaccgagttcagctccagatactccatgatcggggcgatctccgatgccttgatcaatcgtattcccgacaggatttcggacaccgccccggcccgaacccccatcgcgcgggccagcccgcccttgctcttacccgtcttttccagtgctcgttcaatcagtgccgcgtccaacatgttccatcctctccaaacccggatacattactaccgttacgattatcagaaatcaagcttgactttttgttcggaatatcggaagttgtgcgaggcgccggcggaatgacagaaatgggaatttggaatggaaacgatgaactggctgccggagcattcggcagccttgaaggacctgcgcgcccgcggcttgtcctattcggaaattgctgacacgatcaacgcaaccttcaatacggcctatacccgcaacgcggcgctcagccgggcgcagcggatgggaatggcgggcctcgatcggcccgagccgtccctgccgggacatcttgaagcacccaagccgcccctgccggagctcccgcgaatcggccgagcgcgcgaggggcaggccgagtcgacgcccgatccgctccgttggccgaaaatcttcatcgaaacggtggagatgccgcaacttcgctgcgcggcggtcgcgccacggcacctttcgctgctcgatctcgaacgcggagattgccgctatccctatggcggggataccgacggcgaagccatgaccttctgtggtcatccgcgccggccgggttcgagctattgcacggcgcattttcacttgagccgcgatcctgaggcctcggcgcggccggtgctgaacgacgcctggcttcgagccgtcggggccacctgaggccgcttgtccgaccgacggatgccggtcctgcaaccgcaaccgcgcggaaggctccgcgcgctctcgtgacacgtttttggaggttgccaatgccgcgcgcaaaacgccggaaaccatacgatcccgcaacacatgaccgtcgctcgcaggatctgcccattaatgcccaggttgcgaccattgcggtcgacgatcccctggcactcgaaccgggtgagaagatcatcacgtttcgctcgatccgcaacgatccgctcggccggttgcatgcacatcggcagatcgacgacacacagtatcgcagcggccgggccttccagggcgactgggagaaggctgagcgtggccctcgcgcgatggatacgacgcgtgaatacgttgacggcggtcagcaacgcgagccgattaccgaggggcagcgccaggcgaccttgcgcctgaatcgtgccgaacatgagcttggcgccgacggttcggcgctggtgcacgacgtcctgatcctcggcatgaccatggagcaggtcgggcagcgacgcggattgcgtacgcagcgctggcaggactattttgcgcggcgcctcaaggaatgcctggatcggctggcgctgacgtacggacttgcgaccgcgaaccgggttcccggaaagcaccgtcaaggctgacttgaggtgacttactcacgtgccggttgccgcgcagcatccggcacggcaacggctcatcgcattgcggcactgtgcgttgcctcaccccgagtgccccctttgggtgacgtgctcggctggcggaagatggtcgacagcggcgttgactctcatgtaacttcgcgcgcgtcgacgacctgcctgcattcgagcgctgcgtaattgcctctgtgtggggaaaggtccggtacgtccacaacggagttcgcagcggctacgcccgcctacatctcatcccgcatcgcgaacatcacgagtaacgtgggtcgatgctggcgcggagtccgatcaattcacgaaagggagaaccgaccgatgaatcacactggaaactgcttttgtggcgccgtcgagctcaaggttacgggggagcctgaggcgatgggctactgccattgccgttcatgccgctcctggtccggtggtccggtgaatgcgttcagcctctggaagccagaagcggtcgaggtcaccaagggcgccgaccacgtcgcgacattcgagaagaccgcgatgagccagcgcaaatattgcgccaagtgcggcggtcacctgatgaccaaccacccgacgcttggactcgtcgacgtgttcacggcgacgatcccgacgctgaagtttagccctggcgttcacgtcaactactcagaggcggtgctgtcgatacgcgatggcttgccgaagctgaaggactttccggctgagttcggcggctccggcgaaatgatcgccgaataacgcgacaactctcgatgaggacaggcgggtggcaacagaacgttgctgccggcctgtatccattcttccgcttgccggacgcaccgatcgatatccagtatccgggcggcttacttgcctctcggttcgtccgatcgtgtcggcgctgcggaccttcatgccgacgacagccatgtcaggcgaacgtcccgccctgcaaaatccgggtttggtcttggtgatgggcttccgctaaaaggcgtgcagtgccggtcctggcaggggccgtcgtatttcgcctgacaaaataacagaggaagcgtcggatcatgaccaaaccagaattgccgggacgagagccgcgtggggagggcgttccgacggcgctcgatggcctgctggttgtcgacttcacccgcgttgtcgccggcccggcctgcactcagacgctggccgacttcggggccgaggtcatcaagatcgagaatccggatggcggcgacgatacgcgcgcctacgagcacgccgaaatcggcggggagagcgccgcgtatctgagcctcaaccgcaacaagcgcggcattgcgctcgatttcaacaatgaggctgcgctcgaaatcgcgcgcgcgctgatcgccaaggctgacgtcgtggtggagaatttctccggcggcgtcatgaagaaatttggtctcgactatgcgtcggtggcgccgaccaatccgcggctggtttattgctcgatctcagcctacggccgcaagggcgatttcgcgctgcgtccggggttcgatccgatcacgcaggccgaaagcggcttcatgtcgctgaacggctttccggatggcgaaccggtgcgtaccgggccgccgattgtggacatggcaaccggcatgtcggcctgcaatgccattctgctggcgttgatcgcacgggaccggctcggtcgcgggcagcaggtcgaggtcgcgttgatcgacactgcggtgtcgatgaccggcttctacggcatggcctatctcatcaatggcaccaaccccggccgttttggcaactctccgaacggttcgccgaccgtcggcgtctaccgggcctccgatggcccactctacatggcctgtgccaatgaccggctctatcgccggctcgtcaccgacgtgcttgaacgcccggatctcgtcaccgaccccgagttttctcaccgcaaggcgcggtccgccaacaaggaaaagctgcgcgccatcattgccagcgtgtttgcgagcgatacgctcgagcactggatggcgaagatgaagaaggccaacatcccggtcggctatctgcgcacggttgaggaagggttcaacgcgcccgaagtgcgcgatcgtcatcgcctcagcaagatcgcacatccaaccgccggctcggttccgaacatcgagtcgccggtcaatatgagcctgacgccgacggtcgatcccgttgcggcgccgctgctcggtcagcatacaagggatgtcttgatcaagacgctcggctatgacgaccggcgcattgacgcgttggcagaggcaggtgcgttcggcagggccggcaacactggctagcgggtcgatctgcaccagagataaagcacgaatagaacaacccgagcgcaggcgagagcaaagcctctcgcctcggatgatgtcgttcaaacgtcgccggccgcgcgacggcgcctcggagtcggaacgggcgagaatccgcaacctcagttcggcttgctgcgcaggttgttccttggcatactttcagcctcttcgggttccgcccggtcgatctcgaggcgggccatccggagtatcaaggttgccgtggtcaggccgaggcgttcggcctcctgtgctgcggtgtcgaccttctgggccaagccttcacgcttacctgggtatgccattcgtaatcctcacttaaggtgcgagatgaaaaatcccgcatatgttgcggagctgcagaacaagctcggagctccatcgagcgaaacactggaaggcttgcggactgctgaaggccttccttcgattggcgcccgaccggcgctgcgaggtcatcgagctggtcgaacgtttggcggttgagccgccgcgcgatccttcactgtcctgaggtgttcgcgtttccctggatgtcagttgttcatcggctttgcgggcggctgcgtcgcgatgacgtagatcgcaccgccctcaagcgcttcggattgatgtcgggtaccagcaggcagaaagatggtgtcgccggcaccgacgacccgctcaccgccgtcccagatgaagttcagccggccgctgatgatcatcaggatttcatcgaccggatgggtgtggaagtgatgcaccttgccggccgcatcgtgctgcagctcgacggaaccctgggccgggagcaggttcaggatatccgggtcgatggcaaattcggtcttcgtgcctgcgatgatctgggtcatgccgcctgttccttgttcgcgatcgatggcgtcttgttctgcgcgagcttggcataggggcagccgccgctcgcattattgtcgtcgtgcaggaagtactgcagatattcgcggccgtcggtcgcgccgtagcggccgagaagcggagaggggctcgcgctgtcgtacgggatcaggcgtttgcgcacctcggcgaaggcggcgttggccgccttttcggtcccgaggatcttctcgaacacccagcgcggctggaatgtgagcatgaaggcgctggatcggcggctctggcgcatcacatgggcgggcgtcgtgcaaacgacgaagatcggctcgcccgcaaacgagaattcccacatcgggtggtcgatctgttccggaatatcgctcggccacggattcttgtccaagcgcgcgagctggtcgagcgtcagccacatcttgcgataataggcgtcgagcgtctgcaccgggcggggccgcgtgaacacgatcaacgatgtgttggggccgaacgagcgcgcctccgaaacatattgtgcgagctgttcgccgagcaccgcgacatcatacggatcgaggaagaggtagcgcagctgatcctggcgatgcccggtcactccgaacacgcaaggaaacggccttgcttcgctgctcatctgcgcttcaaactccgagaacatcacgctctgccagctgctgaccggaaagttcgacgcaacgtcgccttttctcaagaacaagcgctccataacaccccctacagacataacgatactaacgagctatcaacttgcttctcatcagcagcggcccggcaatgcccggcagcgacatcagaagcagaatgacgatcaaggcgctgtagccgccgtcaccgatcgcggccgtgttgtgcacggcatcggtgccggaggcgttgctggcggtaagcatcgcaaagccgatgatcggctgcgagataccggcgaagatcccggcggcggtggtgttcacggaagcaccgacgccgatcaagtcggaggtgtagagcttcttgacgcatttcagcaccagcgggaccgtgccgccggcaacgaggcccaagaccgtgaacacgacggtgacgtaagcgaggccgaatgtctcggcgatcggcggcagcagcatcgcgatcagcagcatgcgcagcacgcagatgccgatcagcgcgcggtcgagcgccgtcgcggcacgatcggcggcgtgaccgaggaagatcgagccgagcgcattaccgatcatgaaggcgagcagcggcgttccggcagccgttggggagatatggaagaggtgggcgaccatcggaatgccccagacgcccgacagcgtcgtcacgaccgcgaagtgcgacgcaaacgtcattgcgcaaccccagttcgcgatatgagccagcgattgccgcgcagcgatcacgacgctcttcagcgtcttgttgctatgcgaggccggatcgggcttgagcgtgaccttggcgaaggcgaggttggcgaggccgatgcaggcgatgaacaggaagcaggcgcgccagccgaaccccgagacggcggccgcgagcggtgtggtggcaatcacgccgccgacatagccggagacttgcgaaatgcccgacatcatgccgaaccgctcgtccgcaaagctctgcgcgacaagcttcaagagtgcggtgaagaccagcgcatcgccgcaggcgacgatcaggcgcgccgcaaacacgtcgagcaggttcggcgccagtgcaaatgccgcgctgccgagcgatgaagcgaccatgctgacgaggacgacacgcttgacaccgtagcgatcgaccaggagtccggccggaatctgcatcagggtgtagccccagaagtagctcgaggcgagcatcgcaacaccggccgcgtcggtgttgaagtcgtgcatgaagctgaggctgaccgattgcggcgacacgcgctgcaggaaggctatggcataggcgatggcgacggctgcccaggcgagataggcgcgatcggtgaagcgcgtcgtcgggacgtaaacagcttgttgtccgagcatcgacatcacaccctcgcgtaacccaccgagaaaagagcatccgctgaattcggaatctttcgcgacatcgcggcgtcgaccagcgacgcagtgccatgataggcctgccgatggtgcttaatgtggccgtaagcgccacgcatgatcatgtcgggcaattcgagtggcttgccgggataaagcgacgtgcacatttcgacacaggcggcctgcagcgccgggtcctgcgcgtcatcgagcaaagatggagacactttttcgcaaatcttagcgttcgctgcccacacgatcggattgcgggtccgccagccgtagagcacgttgccgtcggcccgctcggcggcgcccgaacatttcaggacttcggcggtgaagaagccgtacaatccgcggccctgatgcgccgggagcacttccgtgccgctacgataaattccaagtccggcggacatctgcaggatgcggtagaccgagaaggccacgagcccggagccgtcatagacgaggaccaggctgtacttccggtcgaacggcgaggaggttgctgtccaatgcggctcggtggcctgccagttgacggcaatgataccgttcatggcgtccatcagcggctgacggtcgcaggcttcgatccgggaggcgtcgggcaggctgtaaatcgcgtaatccgtccaaggcgatttgatcgcctcgtatccactgcccagatttcgcgacatggcagaactccagaattctatcgcgagctatacagggcggcctcgaatggcttaaaggacaatatgccctcgaaaactgccaaaccgccccggcctgagccgcgcgacaggaaagcgacgcggcggatcgcgatcgttgcctttccgggcgtgacattgctcgacatctcggggccggctcaggtgttcgcggagctcgaggccatcgaactccctggaccggactactcgctgtcctacctgtcgacgtcaggcggcctggtgccgaccgatgtcgggatgatgatcgacacggcgccgatcaccagtatcgcgcctgccgaagtcgacacgctggtcatccccggcgggccaggcatctggaagatccgcaacgacgccgcgttgatggactggattgcgcaggcactgccggaggcgcgccgtatcgcatcggtctgcctcggcgcattcgcactggcctggaccggaattctcgacggcaagcgtgctgcaacgcactggcgctattgtcctcgcttgcaggacagctttcccagcatccgcgtcgagcccaacgcgattttcgtcaaggatggacatgtctggtcgtcggcgggcgtcagcgccgggatcgacctggcgctcgccatgatcgaggaggatttcggccacaccatcgcgctcgacgtcgcgcgcagacttgtggtgttcctgaagcggccgggcggtcagagccagttctcgaccgtccttgcggcccaggcgtccgacgtcgagggacgcttcagtgcgctgcatgcctggatcatcgagaacatcacgagcgacctcaaggtcgagacccttgcggaaaaggccgggatgacgccacgcacctttgcccggacctatgtcagccgaacgggcatgacacccgccagcggtgtcgaagcgctgcgcgtcgagaccgcgcgcttgctgctcgaaagccgccagatcggcggcgtggtcgaggtcgccaaacgcgccgggtttggcgatgatgagcggatgcggcgagccttcctgcgccacctcggcgtgtcgccgaccgagtaccgaaaccggttttcgggcagctagctcggttcggtggtaaccgcgtcgccgaggaagctgatctatctcacaagcgaatagctggccttcgctggccggattcgcgggtcaaggcggtagcttttccggtttgtctgcggctaatgtgccggccaaatcgggagaagaaacaccatgaacgacgggacctccattcggcaggcgcgcaatgtcgaactcggcgccagcggcgaggaattccagaacctgcacgaattcgcgcaaaaggcccgcgccaagctcaatcagaacgcctgggactacatcgtcggcgcttcggagacagagaccacgatgcgccgcaacaggatggcgctggatgagatcgcgttccggccacgcgtccttcgcaacgtcatcaacgtcgatccctccacagagttattcggccgcaagcttcggcttcccgtgatgatcgcgccggtcggtgcgctcgagatcttcgatcccgacgccggcgctgccgtcgcgcgcggcgctggaacgttcggcgcggcgcacatgctgagctcggtgtcggaacccgggttggagaataccgccaaggcggcgcccgacgccttgcgtatcttccagctctatgtgcgcggcgacgatgcgttcgtcgaggatacggttagccgcgccatcgacaatggttacgccgcgttctgcctcaccgtggacaccgcccattacagccggcgcgagcgcgacatcgccaaacgctatgtccgggaaagccgtatccgcgccactggcggcgatttccagaaagggctggaatggcggacggtgaagttgatcaaggacaagttcaagattccgctcattctgaagggtattgctactgccgaggacgcaaggatcgccctcgatcacggggtcgactggatctacgtctcaaatcatggcggacggcagctcgatcacggccgcgggtccatgcatgtgctgcccgagatcgttcaagccgtggccggccgtgccaagatcatggtggatggttcgatctgccgtggcaccgacatcgtcaaggccatcgtctcgggggccgaccttgtcgggatcggccgtctgcaatgctgggcgctcgccgcggccggcgaggccggcatcgttcggatgcttgaattgctggaggacgaggtgatgcgctgcctcggtctgcttggcgccaccagtttcgccgagctggacaagtcctatctgcacccggcaacgccgaccaatctgccgagtgtgttcagcgcattcccgctgctcgatattgacccctaccgttactgagccgctgcgagaggcgattggagcgataacgcgatcggggtgcaggcatcctgatcgcagcagcgggccatcaatctgtggtgtccatgaagccgccgcggcaaagacaaagtctgatcccaatgccgcactagtcgaggcgaatggcagataatccattcgctgaattttcactcgagcgcgcgatcggcttgcgctggacccttcgggatatccaggcccgcaggctcaaattgtcaccagtcagcgacgaggatctgcgtgtcctcatcgggctcggcttgatcgaattgcatgatggcgagcccgaactgacggaggcgggggccgcggtgctgaacgactgaacgggccggcagcctagcgggcgttcaggaagctttcaccggaattgcagggcgtgcactgataagtcagcacgtcgtagacttggtcacgcggctcgatcaaggcgagccgcatttgcgtgccgcacttcatgcacggcatctctatgctggtcttgaagcgagtgcaggtcggtgtcggacgaagggcgcgcagcatcggatccccttaattccccaagagacgcgaacgcgaccaacggcgaaggccgaatcactatgccacagtgctgacaagattggaatcggctgaggcgcggtccgacccggactgggtaattattcctcgacgccggcgctgacggcgtcgcgatctatgctaacctcggcaacgcttatttcaggggacgcgatcatgattgaaccgaagcttgaagttcccgccgagttgcgcgatctcgcggagaagaccatcgaccaggccgaacaggccttcagcctgttctttgatgccgcgagcaagtcgatgacggcgatgccagggacggggaccgagatttccaaacaggcgctgtcgttcaccgagcagaacatgaaggccgcgttcgagcatgcgcgcaaactggtgcacgcgaccgatctgcaggaggcgatgcggatccagtcggaattcctgcgcagccagttcaccaatgccggagaacatatgcggcagatcagcggaagcgtgatgtccgcgaccaaggacgccacgaagggcaagttctagggcggacggccttcacggcgcgtcggcgtctagcgtcggcgcgctgcagcaacaccgagcagaaacgcgacgaacaggctggcgagcggcgcttcgcgcgtcaccgcactgaccgtggcgaggaccccgcccggccggcgcgaggtcgcgatcgcgtcgctgaggcgatcggccgccgctcgaagtccgtccgacacctccgtgatggtgcgcgaaacgtccgtcgcggcgtcgatcgcgcgctcaccgagcgtgggctgaagtggggattcgggcggttcggtgctcatgtggcgtgctgctgtttgactggcggtcaggtgtctttggccgctgcgcgatcgcgtgttctgaacggtgggtcgcggccacatatataaagttcagtagttgtggattggttccatcggcacgtctcgctttctcatcggggaactggaaacttgcgcgcaggtcgcggtttgtctccatggaggagacaacgatgacaatgcatgcgcatggcatggcggacggccgttcggccgagcatcgaaaccggcacggcggcgcgccgctgctggttgcggccgtggttgcgatcctcggcgtgtcgggcatgctgatcgtcgaccacggtccgtggagcaagccgaaggtgcagccggccgcgaccgcaaactattcaacgaccggcgaggcggcgcgtgcggctggcgcaagggtgatgccgaccgagccaagggccccgatcgaaccagctccaccaggtcccaagcccgcacaaccggctaacccgatcgctgcgcagtaatgcgaggcgccgacgcacccggcgcaaagtgcgggaattgactcgtcgggcaaatcagcggcgacaaaattatcgtcggcgacgtcgctggtgatcagcgcacgctgaccagcataccccacgcggcggcgaatcccgcaccgacgagaaccagcaccgggctgtcgcagaagaggccgccatactggcacatggtggtaccgagcgaaccgatctgatgatggccggcggcatagaacaggccggacagcaccgcgagcacggcagcaacgaaatacatcgacgcttcctccttgcaatcgaactgcggcgcgggtcgatcgacgcgagccaaaactgtcctgatgtcgatccaatgataagctgctttgtccccttgacgcgtcgggcaactcagcggcacactgacatcatcgcaacgaggataaggcgatccccgccggctcgtattgcgatacccggatcaaactcagactttcgatcaactcggtttctcactgccgaagctgacgcatcacattttaccgatcgtattcagctcgaaaaagggtttgacacgtcgggcaactcaggggcataatccgaaaatcagaaattgttgagcccgcgcggagcaatccgcgacgggctttttgtttgccgtttcgccaatcggacggcggccgcaatgtcacgacgccacatcctcccagaccgtcgcctgagcgtcgcaagcgtgccgccgtccgaactcaattgaaatgaacaacgaattggccggtgcgcgcgaacgcgccggtcctgcggcgcggcgtaagccggcgccgcccgcggccccgctcgtcagggataaggttcgcgccccaaagatcgtcgcccgagcgcggtctgccgcacatttcattcgatggccaaaccgtgtgccgccggccatcatcgagactcgcagcgcaaccccggctgcacacgcctgcgtcgccaatgccatcctcgactgcggctggggcaaagcgccgcaggcgattgaggatggcgacggtgggctagaacttgtgcatcgcatcgagcggatcatcgtgcccgaggaggttgagacctgacggaggtcgcaagccgtccaaatgtcggcggtccgcccggtgcggcacttcaacagacagatgttctgacgaatacgtcgtctgaaaatcgcttttcaagattcgtagggcattctgcacaaagaatcctgaagccgtgcgcaaagaatgttcgagtcgaaatgaacgatgcctgatatcttaggtgagcagccaaaaagccaaacacgcccttgccgaaccggacaggcggcgacctagctagagcgcttctgtggaaaacgtcgccgaccagatcttcgacgcactaccgctgatcaatcacatcgccacgattgccgctatcgggttcgtgcttccaacgtattttcttcgccttcgacctgcgacttacagactggttttgtccttgggcatcgctttcgctcttgcccgactggcggcggagatcacggttgcagtcttcattgctccgtatctgctggttttggtctttccaccgttcacggtcgtgctgattgcgatactgctccggatcgcgcgcgtgaaccgcgtgagtctgtggagcacggtagtcctggtgtgcgtcattatcgattgggcgcaacttgccggtcaggtctggttacattcataaattgtcaccaaccgatcccgctggctgatatccaaaaagaggccgtccatgaatgctcttccgtcatacggcaagaaaatcctggctgacgttcagtcgatgacgccacagatcaacgctgcggcggcaaggtacggagtgcccgccgaagccattgcgggaagtctggctcaggagctactcgatcgaacggcaagctacgagaatcaggcaagggcagttggttcatctctcaatgcatatcgacttctcgccgacgcatttgcggagggcgtaataacgaaccctctcgacccgaagcgcggcgcgtcggaccatatcctcagccgatacaatgtcgctccaaatgcgataacggtcggatcggattatcagaaaaaatgggagaaccctctgcttaccgactttggcgcggcgggagtgaaattccacaacgccattcaagcgattctgaaaaatccagacgatcccgcctttgcgccttatcggaacaatctgttttccgcaggcgtcgccttacagaacggcagcgacaaagctctattggcatcatcgatggccgcatatttgcggcatggccttggtgtttaccaagccaacatgagtgtcagtggagatcctgatacgggcttgagtgcttggaataacctaaatccggcgctgcaacaggcgttgcttgtgcaattttacaagcagggcccgactccggagcgggtgctaagaagcaaatcgaatgctgcggagcgcggtgctccctatgttccgcagattggcgcagatggtgcgggcgcgacatatctggcaaaccaagccgcagtggctcgggcgttggctgacgcgccgacagactttgcagggcgctggaatgcgatgccagcaactgcttcgaccgacgtcgctgcgccgtccgtcgctgcggcaccagacgactgtttgcgggacgatgtcgccaagagggctactattcgacatctcgcacgtgtaccggccacaggcgaggggcaatctgcattcgatgctggagcgccgcctgtaccgttcgctcccgcttcgacaatacgtcctggccggtctgctgcgttcgatgaacggtttcctgcatccactccgccgaaagatgcgtcctcaacttcgatgacacagctgagcccgttcagtggacagcccatgcgatatctgccgccgtcggtgtttgactttccggacagttccgacgttccggagacggatttcaatgattggctcgccggcctgatccggccacgttctcgccggtaaccgtgcacgggcaaccatcgctgcaaggcggcaactcgacatgtggtctcgccttatcggcagatgcctcgtcgatcttgaaaattcccaccgcaaaagtgcacgagccgctgtagcagctgacgcgtcgcatttttaccgatcgcattcagtttgcaaaagcgattgactcgtcgggcaactcaggtgcataatctgaaaatcagaaattgttgagcccgcgcggagccatccgcggcgggctttttgtttgccgtgtcacccatcggacggcggccgcaacgtcacgacgccacatcctcccagcccgtcgcctgagcgtcgacagcgcgccgtcgtccgaacccattgcgacaagcacgagattggccggcgcgcgcgaacgcgccggtcctgcggcgcggcgaaagccggcgccgcccgcggccccactcgtcagggataaggttcgcgccccaaagatcgccgcccgctgcgcgatctgccgcacatttctttccgtggccgcatcgcgcgctggcggccgatcaatgaggtttgcatgactgcttatctgatatcgcttgcggtcgtgagtctgatcgccattgcattgctggaggcggcatgagcgccgagatcatccagttcatcccgcgaccgcgccaggatcgcgtccagacggactttcccacaatcgcatttcgttcggcgtcgcccgatcccgatacggatcacgcggacacggctccgagtgaatatctcccgtccgattggcaggagaagtagggtggcgaagacgattacacagatccgctcgcttgcgaggagccatacgagaagcgcgatcaacgtgttggtcggtgtgatgcgatcgaccagcgcaaccccggctgcccgggtctccgccgccaatgccatcctcgatcgcggctggggcaaagcgccgcaggcgatcgagaacggcgacggcgcgctcgagcttgtgcaccgcattgaacggatcatcgtcgagcctgaggtggttgaaggggaagagacttgagcgccgccgggcgtcgcgactgggccgtgtcgctttgtcgaagctcaccccggcacgttcaatcacatctgtgagaggtcggacgacttcgccgacgctcgccgggttccaacggagccgctctacctgcgtgctcgacagcatgctatcaatcacgacgtgttcaggcggagtagccgccacggcgcgggccaatgtgggtcattgagaatcttgttgggctgttcctctcctttgttgtggatgtgatcggatacaccgcagctcggctcattttgcccgccgtctccttgggacatatacagtcgcggcgtacagccgtgacgaagaagagttcggttggcttggcggccggcgtgacggccctggacggttgatgcttggggcaggcatcgcgagcggaacagggcttctgattcgcgcgctttatctggctgcggtataatggttcgttgggtgatgtagcgatggctctggtaatagttgcgatcttcgatctgatttggcttggggccggctatgccgtcgctcggctagtcttgcctcttgtctcgttcggcaaagtccgggctgctccattcgaatctgatggattcaattggttcggctggaggcgcaatgaagtcggttgcctggaaatcaaggccacgctcgctgctttggtcggcttgttgatctgctgcgccggccttgcggtagctctgtatttttcccattgatcagtgcgcattttggcgaatggatcgcgtgggccgtcgtccgcagaagccgccgcacgtaggttcgcagcctccgtcctgactgcgtaactcgaggctccgacgattttcgaacgagtggccaacttccaatagagcgtactcagcagatcgcgcatgcgcgagccagttcgattggcttcacgctgatacttcagatttctatggagatcgaatatgtccaaattgcctgccaagatgggcagaggagcgtcgacatggttggcggctcaagccattgccaatgaaatcatgaaggtgagtaccaaccgcgatgaaccgtatgtcgatcgaatcaagcgggagttcaatcttcacgattattctcaggcgcgggctctctatgactccgatccgtcatattgggaggggctctatggcaacgatccactgaactccagccatcatcccgccttcccgccgtctagtttgttaccacgcgtcgggacagcgcgggatccgcgctacaactatctcaatccggagccaacgaatgccggcgcattcggtcgtttcggtaccggccggcaattttcgcctggatcagcgtcgtcgtcgcaaccgctctacgagacgcaatcattcgtcgcaccacctgacagtccttggcaggcttcgaggagcgatggaccgcctcctcgtcgtctcgttcgtgtcccggtctcaggcgaggagcaaaatgcgttcgaggctggagcgccggctgtgccgttcgctccgcgaggctcgatgcctcgccccggcccgctcgcttcgttcgaagagcgctttccagcgtccgctccgccggcgggtacgccttcggacgcgatgaggccgctgagccctttcagcggacagcccatgcgatttctgcctccgtcggtctttggctttcctgaagagtccgaggttccggagacgaatttcgacgattggcttgccggccggatccggccgcgtcctcgtcagtgacggttcacggccgacgatcgtcgaggacaccgcccggcgcagacccgtttgcctatcgagagcagccttgtcgatcctgagaattccaaccgcaaaagtgttcgagccgttgttgcagcccgcgcgctacaagggggcatttggcggcaggggctccggcaaatctcacttctttggcgagcttctggtcgagatgtgccaggccgaacgcggcacgctcgcggtctgcattcgcgaggcgcagcggacgctcgcgcaatcttccaagcgattgatcgagggcaagattgcgtctctcggcatcggtgcgggcttcaagctctattccgacaagatcgccgcgcccggcgatggcgtgatcatcttccggggcatgaaggatcatacggccgactcgatcaaaagcctcgaggggttcaaggtcgcgtgggttgacgaggcgcagtccctcagcgcgcatagtctggctctgctgcggccgacaatccgcgcgccgggttcggagctatgggcgagctggaatccacgacgcaagtcggatgcgatcgatgatttcttgcgcggccgcaagccgccgggatcgattgtcatcaacgcgagctggcgcgacaatccgtggtttccacccgtgctcgacgaggagcgacgcaccgacctttcgctctaccccggccgttacgatcacatctgggaaggcggatacgtgcaagcattcgaaggcgcttacttcgcggagttgctcggccaggcgcgcaaggacggacggatcggcaaggtcgccgcagacccgctactgccgctacgggccttcatcgacatcggcggtgctggtgcgacggccgacgcattcacgatctggatcgtccaatgggccggcagcgagatcaaggtgctcgattactacgagtcggccggccaggtactggcgtatcacgtcaactggctgcgctcgcgtggctatcaaaacgcgatcctctatctgccgcacgacggcatggcaaccaacaacgtcacgggaaaacgctacgaggaccatctccgcgacgccggctttgccgtcgagccgccggtgaagaaccagggccgcggcgccgtgatgatgcggatcgaggcgctgcgcagactcggaccgcagatctggtggaacgaggacacgaccgaagcggggcgcgacgcaatcggcttctatcacgagcgcaaggacgaactgcgcaatgtcggcctcggccccgagcacgactggtcgagccacgccgccgacgcgctcggcctgatggcgatctgctacgaagcgccggggagggcagggagtttcaatcgagtgatcaagtaccgggagcaggggtgggtgtaagtcgtggtacgaggcgccatcagaccggatccggagatcagttacttcctttgctttgaagtggcgtcgtagattcgctgcaccgcttccgggcagtatgcaagtggactgccatcgtccttgaattccctgttcgagcttttccgcaggagcagggctttgtcatcgatccgtttcaagatcacggtttctgaacttggtggcgtgttgcaggcgacgaaaacctggatgttgtccggattgtctcggatggaggtcacgccgcacttgtcggtgccgctcgcaattgatcgctgatcgagatcgatggtggtggttcctgactgcagacagcgctcgctgaaatcagtgccaggggtcgcatagacgccaggcttcggtcgccaaggatgttgcatcgcgctttgctcggcggccttcctttcgtcttgtgctttgttgtcggcatacaggcgctgagcccccggggggcaatagtcggccctccatgccggtcctttgaattttccattaagtgttttccggaccgagatcgccttcccgtcaacctgtctgaccagcatggtctcccggaatttcctgtcctcagcgttgcggccccgcgagccgagagtttccgcgaggttgtaatcgtcgcagctcatgtcaagtttgacggtaccatcggccatgtcggaaaccgttctgaccctgcagccccattcgtttccgccgactgagtttcgcgaaagctcgataatgaagtcaccgtactccaaacattgcgcctcgaaatccttgccgggactggcgtaaaggccatcggctggacgccacttctcgacggtcaatttggtcgtgttctgcgccgagacatcggtgatttggccggcaacgcaggcgagcgccaaggcggcgtatgtcatgcgcgaacccgacgtcgatcttgcatctggtccgagtctctcacgcacggtgcctgctccgtcaaatcgaagagttgtcggaccgaagatacctgatcaattcaaggttgatcaatagaataaccgattatggagttcgatatgtcatggcaagatacgatgcgaagaacattgcctccactggttgggatcgaccctcatgtcactagccgatatggtgaggtaaagcagcgaccaccgggctcaacgaacccgcaccgaggcgtcgatttcaactacaacgtcccggggcaatttggccccaatctaatcaatccggcattgcgttcgccggtggcgggtgtcgttacgcaggcaggcggaggtcggtatggaacgatagccatccgagatgcagatggcttctctcacgaaattctgcatagccattcacagtacgtctccgttggcgatccggtcgctgcaggccaatttattggaaccatgggcaatacgggcgcatcaagcgatcccaaaaaggcaaatcacgtccactaccaacttcgagaccccgcgggtcgtgtgatcgacccgagcgccttctgggatcaacacgcaccgtttgaccccaacccggcaccgccagcccacgtcgacgactaccggcgttacctgggagcagccggtagatccgccgcggatcgagatgccccgggcgccggctccgacgataacagggacgttcgtcgccttgtgcggatgtcaccgcagaccgcggcgatcctttccgaccaaatgacaagaccagccacaatgcccaacgagcttcccgacgaccagcccgcctcgttcgaaagccgcttcggggattggacgtcttcggggccgacagccgcaccacgtggcccctatcaagcgatatcaccgaacgtctactcgcaatccgggatcgtctctggcgatccgacgccggattatccgtttccgatgtcgatccgaggcgttgtaaacgaggccggcgcgccaggtgaatgggctaacggcaagttgcggtcacctaactggaagagaacacagtagttcaatgttggcccggagcatggctgggtcgagccgccgccccgccggctcgactgtcctgatttcgacctgcccgaggcgccgggctgggcaggaaatatcaaccgagggatcaggtatcgcgggaccagccgtcagcccgccgtcgtttgatcagttcgccggagaagcggcgcttactgaggtttctttcgagcgttgacgtacgctttctgagttgccgcaggacaatatgcaaactgtgcgcccgggcgcccaaattttccgttctgagtctcacgaagaaagagcgtcgtctcgttgatcttcttgagctggatgatttcggtgtgaggcgtcggcctctcgatgtcagtgcaggtcaggtcaagccgcaattcacccggcgccgtatccgtcgtccggttgatcttgcattcttcttcgccgccgttgatactattgtttttccaatcgatactggtgtcaccaaattccaggcatcggtcgttaaatcctcgtccagtcacggcgtagacaccatccttcggacgccaagcgtccatcgcgggctttgcgggttcttgcgcagagaccgtctcagccgcaatcaccaggacccgcgatgccgaaggtgaaccgtatcgccgagcggccggtcgatggtttgatgtttggagattgacgtcgagattgcattggtcctcgcaccgcgggttcgatgttgcgcaatatatcgcgctagctccgggttctgcaattatcggcccgaaacatgccgcggttgacagttcattacgttattccaagttgtcatgcttatctccggggtggttgatgcgacaaaatggccgtcaagatcgtggccaccgatgcgagccgggcaatcgtcggagttggttgtttgcggatgcgcctctgcgaacgagtaggcaatcaagctgctttggcgtgcgtcctgaccggcgcaactgcctgtcagaatagcgatctcagacgtcacattcccatacccaggttttcaatcatggcaaaaatgtcgacttccgacctcaaggcaatgctcgcctccgaaaaggccgacgcgctcgcggcgctgtccgcggcgcggctcgcggaggagcgggcggatgcaatggactactatctcggcgacatgcgcaaggacatgccggcgcaggacggccgctcgcgcgccgtctcgacggacgtcgccgacaccatcgaagggctgatgccttcgctgatggacatcttcgctggctccgacgaggtggtgcgcttcgagcctgtcggccccgaggacgaggccgccgcgcagcaggagaccgattacgtcaatcacgtcttcatgcagcaaaaccccggcttcatgacgctctattctttcgttaaggacgcgctgttgtcgaaggtcggcgtcgtcaaagtgtggtgggaggagcgcgaggaagagagccgcgagacctactatgatctcaccgacgaccagttcgcgctgctggcgcaggcggtgacggagtcgaacggcgcgatgaagatcatcgagcataccgcgcacgatcttgccggcgagacccagaccgaagcgacgagctgacattgccgtcccctgtcgacgcctgatctcggatgggtcgtcgccggggcgcgatgaaggcaggaacatcacgatggagggagatcgcagcaatgggcgcaatcaattttcgcgacgggtacgaattcgaccccggtacttacgccaccggcggtggcctgtccggcctgctgcggcgtgcgatgcaacagcggaatttgctgcagatggagggtgattctggcgaaccgccgaacgccgtgcccaactacggccgcgatattttcagtagcgcgcagggcgggctgcttcgcagactccaggcgttgaaaatggagcaggaccaggaccagtcgattccaggctctggcgaaggaacgcttcgtatgccgcgtgatccaagcttcaggcagctttcgcgacttccaaacaacgttcaaccgcaggtgcccgacgatccagcgtcacgggcgacacctccaccttcgattccacaatctgagagcgatcaggcgctgcaagcgcgagaggtggctgcggcgcgagtggctcgcggcgtgagaagtgcggttcgagcgaatgcgccggcaccggatccgcttgatatcgcgaagtcagcagggattggagccgtcaacggtgctatcggtatcgccggcttgcccggcgatgtgcttaccggttttggtcattttccgaagaacgccgttccgaacctgtggagacggagtaacgatcttccgccgctccccgacgatgcacccgattacttcgagtcgtggaatgcagacgcctggcggcattcgctcgaaaaccttgtcggcgaattgtatcagccgaagactgcggccggacgttacgcggaaacgattggcgaaatggtaccgaccttggtcggcggagaagggctcgtcgccgcacgcaacctggcgaagtcgggcgcagttctacgtcggctgcccgcgacattgtccaaacatgccgtgctgccaggcgtggcggttcaggcgatggaggatgcctatccggagagttccgcggggcaggctttgcagaaaggctggccctggctgcgccgcggtgttccgttggcgctcgcaattcggggaaatcgtggaaagtgaaaatctcgtccctcgcttcactttcggaatgcgagcaggacctccaccaggaaattcacgatattgcctgcgattgaactgcgtttcaaatcgggctgaggacttggaaattgtatttcgatcaacacgaatatcagccagcccgcctgaatcaatctccaagagccatctttgtcttctcccaggagcggattgggaatcgccaacaaacatggccaagccagaaagcatatccaaaacaataccgaaagcacaaggcgagcaatcgagcgcttctcatcgtcaggcggtggtagtgcttcgtttgtcatgatctgcgcagatgcggacattttgtcacatctagcttcctttcgtctgcatcgagcagttcgaccggttgtgcctatcgatacctttcttgataaaaatattgattgctaccagaagtttcaacccacttgtctttgctgcgagccccgttggtcatgacttttgtctccaacggtccgccacgcgcggtgcggtttgcattgggatggcggactcaagtctcgctcgggatttcgccgtaagcgctccgatcctctcgggcttccggtcaatttccgatctctggtatcctcgggcgtcgatcgctcactctcagttcttgaaatagtacaccgcgtatatcagcagcacgctgcctgctgccaaccacatatacaatatccgttcgttgcggatcgcccgcgcgagatgttcgcggccgtcctcggtgaggcgcgctggatcgatttgtgtcggacggacgccgcggaaatcaccgaggttgaagatgcgtccgaacactcgcatggcgacagcgatgccggggccaaacgaaaagcgcatcaatcagccagagcccgcccttgcgcaccaccgccgcttgcgatgatcgcacgtcttgcggccgcatctgttcgtctggcgagatgtggcggacaatccttctctcatctctcacattcaatgaagcgagaagatacaaaccacaaagccatatcgcgatgaggccgcttagcaggtaactcatggtcgtctcgccatttgagtttctctcgatgccggcaacgctatggatcggggcatcccgggcgtcgctctggcgtgccggttcgatcgtagagatattcgctatcacggtaacgttcaaaccggagcatatgaatgacagtcaacgaaaggaaggtccggtagccagatggcgtgtccgtctgtctgcctgttccgttcggaagggtcggtggaacgtactactggagcccgggcgcaggccgatgccccacactttaccgtaacgcgaagctttggtctgccgggcgccggcgcgactgtggtcttccgcaggcagggaatgacacgcttggtccaggcatcagcggaaatgtatcgacggtttttccgtgtacgtatcggtgtcggatcggtcggcgctgccagcgaatcgccggtcagctatctgggccggagcgagcgaggtccgttccgcgagagcatgggggattggcctacgtcaaccgcgcccgtcgagccttggagtccagcaggggcggcatcgcggccgcgaccgggtggcttgtgcggtttgatgctggattatccgcgcgacaaccgtcgacgggtcgctgacgtctgccgtgggatggcgaagcgcccggaattcggtgcatagtgtcgactgtcgtcgaaatgtccggggaattgccatgtccgccgtcttctttgtcatcaccgcgatcgccgtgatctggtcggccgtcaaaaccgaagttattcaccgcgagcttgtcgattcatttcctccccagtttcaggacgacctcatgtcgagatacgcgctccacacctatgctctcgcgtcgtcgacgccactatctcagcaagctgaatacatgaagacgctgtacggcgggtgtgcggcagccctgagcggttcgctcggattcttcgcggcaggaaaccctgtattcggatgcctcgttctgatcgggttcttctgggcctcttatcagacattcaaatcccggaagatctatcaagcgaactgcgcgctggcagacggtcaggcgggataaggagcagatatgacagcaggtacttatggtggaggaacgtttggcagcaagtggggtgttggaggtggtgcatatatcgacaatcgtggcaggctctatcctcagttttacgttggaacgcctcgcttaggactgtctgcgggatatacttcagatcttgaaggattgctgacgggaccgtctgcatccggcggcgtcggattcgggccagttcgcgggaatatcgggacgagcggtggtgccaccggtgttggctttggtacgcctggttacggcataacatatggctttgggccctacgagctgtccgatgattattcgcagccctggaagaggccactgatccgcgattctgccgcagctgcgggaatccctaccagaagcaatgtctgggaatacgactacccggacgctagcacagggcggtctacgtcatttgacgctgcaggggcttccgcgccagtccgttcgcctcgtgaaatcgcagactttcttgctcggttcttcgtttctccgcagcctgatggagtggggcgaaccagcacattcgtgcgcgactccgccgcgggggccggtgtacccagtcgcaataacgtctttgagtatggatatccggagcccgcgtcggggtcgcctcccctgaacgaggcgccggcgcatggcggcgtgcatcctggtgcgagcggcggccttctggggcagattgctgcgttaggtgacaacgcccggaatcgagaatggtcggcacccgcgatcgagccgcggcgaccggccgaggtgttcagcgaaggtgcgcctcccgtccgttttctcgatcgagtttccggaccgttgcagcgtgaccttggtgacccgcggatttccgatccgtcatcgtacgatctgaacgatcttctgcaagattacgtgcgcagcagcttcgtgcgcagatagacgcgcggcgtttgctcctgcgcgtgtcgcgcgcctaagccgccgccaacctccatcagatgagctcaacaaaatggctgttcccttgcttccggggccggcggcgatgccgcttgcctcgatcgtgacgcacgacgtcaccatcgtcaccacgcgaaagctcgcgcaggcgagggtgatgggcgtgccgccggaagaattcggcatcgaacgcggcgcacgcagcatccgcgattgcaattactgcttccacgaagtggttaccaagacggaagcgcagctcattgccgaaggcttcgatgccgcgcagatcaagtcgctgaatgactatacaggctacgccaatatcgagacgctggcgcgcgacaccgccgacgagcatttcggcaccggcgccggcggtgccaattcggcggcgcggcaggtgcggatcaccgagcactacgtgcggatggactatgaagataacggccgtccgtgcctttaccaagtgatcaccggcggcgaacaaagcgagatcctgcgcaaagacggccgtgactgcatcacgccgttcgacaccattccgttcgcgtcgacgacgccggtgccgatgacgcaccgcttcttcggccgctcgatcgccgacctggtgatgccgctgcagcgcgagaagaccgcattgaagcgcggcgcgctggacaatctctatctgcacaacaatccgcgcgtcgaggtcgccgagagtaatgccgggcccaacacgctcgacgatctgctggtctcgcggcctggcggcgtcgtgcgcaccaagacggcaggcggcttgaactggcaggtggtgcccgacatcaccacgtcgatctatccgatgatgcagtatcttgacgccgagctcgagagccgcaccggcctcagccgacagtcgcagggcatcgacgccgacgcgctgcagaaccagtcggcgaccgcggtggcccaggtgttctcggcctcgcagatgcggatcaagctgatcgcacggatcatggcggaaggcgtgcgcgacatgtttgcgctgctgcacggcacgatccgcaagcacggccagcagcaacaaaccgtgcggctgcgcaacgcctgggtcacggtcgatccacgcaactggaagacccgcgacgacatgaccatcaatgtcggcctcggcaccggcggcaaggcacagcaattcgcacaggtgatggcgcttgccaatgtgcagaaggagctgatcggcggcggcaaggtcaacatggtcggcgaccgggagctgtacaacacggccgtcgagttgacccggatcatggggcacaagaacccgagccggttcttcaacgatccgaccgcggtcaatccgcagaccggnnnnnnnnnncgcttgccaatgtgcagaaggagctgatcggcggcggcaaggtcaacatggtcggcgaccgggagctttacaacaccgccgtcgagctgacccggatcatggggcacaagaacccgggccggttcttcaacgatccgaccgccgtcaatccgcagaccggccagttgttgtatccgccgccggcgccgccagcgccgccgccagatccgcgggtctttgcgctgcaggccaaggcgcaggcggatcagcttgccgtcgcgcatcgtgctcaggtcgagcagcagaaggcccaggccgatgcgatccaccaaaaactcaaggccgaggccgagatcgagctggccaagatcaaggccgaactcgacgcccagatcaaggtgttcgacgcgcatctgaaggccgcgacagaagcgcgaaaatcagagcgcgcctcggtgccgggcgcacggaaggcgagggacggccaccattatgtttcggacccgaagcggcccggcaaattcctgatggtcgttcatcatgtctgaattctctctggtgcccgtcgagcatcaaccggagttcggagatgtttcattcattccggttgatcacgacccgttcagcctggacgatttgagtcaggctgctggaacgcaagcccaaagccaacctcagccacgtccgaccggcgctgtcgccccgaatgtcagtgcatcaatcgcgccgccagcaaggccaagtgtaccctatgatcaagattccgtggacaatggtgtcgcgggtcaaatcgccgcacagaattcgacgtcagcggcgatatctcctcccagcggttcgaacggcgattggtcgacgtacaatcggccgaccggcgaattgaagacggcgaagtacacgcccacgcaacgcattggctatctcgcagccgacgcgctgatagcgcttggcatgcagccctacaccgccaacgatctggcctcgcgcattggcaatgtgcttgggttaacgccgtttggcgttgtcggctctgcgctcgaccttatcgatgcgaaacgtcgcgacgatctcccgagggccgcggcggcggcaaccggaatgataccgggcgcaaagcggctgggtgcgctaaaggccgcaaatattgcgaaggagataactctttcgcgctcgattcacggtgaggcagccgcgcatgcggccgatgccattaatgcaggtcacccaagcgtcctgacgattaatcgccctggcagccgcgcgaacagacgggcagcgactggcaagctggataaggttgctggcaaggacctagacgagtaccctggtgcgatgtttcgagaaggcggtgctgaggctgacgttcgggcgatcaatcgaaatcacaaccggtcgggcggtgcttctgtcggcaattcaggtcgtggatagcccaacggggcgcgaatcaagatcaacattggagattgacgatggcagtcacgatcggtttccagctctcctatgggcaactttcagtgttcgcgagcgcgctgaaggatccatataatgactggactgatcaacatatctcgcagggcttcacttggcggcctggcagcgtgtcgttcagctctatggtcgggtccggtcgacactcggtcgatatccatgtggtgaaccacgccgctcccgttcaccccaatgcggtacgcgcagtagaggtccccttcgaggttcccgctgacggggccatagaagtcggaagtatttcggagaccgttccgctggagctgccggccggatcgtttctgctacgctgcgagttcttccaaccgtctggcacccatgaagacgagcgagtgcgactaacctttgcgaagaaggacgctcctcgcttcgcggttgttcgcgcagatccggaactgtcgatcggtgatgaattgctaaagacggctcggccagccatttagtggagcggttgccggcaccaatgcgaaatcagcagggcatagcttcgacgtcgccgaaagccgtttgatgctgcaacgacaaggttcagcgccgcaatgccaatctagcggctcttgcgggtcggttaacgtgcacttcgctagcacagcagacggtgcggttgggtaacgcctggatcacggtcgatccgcgcaactggaagacccgcgatgacatgacgatcaatgtcggcctcggcaccggcggcaaggcgcaacaattcgcgcaggtgacagcgcttgccaatgtgcagaaggagctgattagttgcggcaaggccaacatggtcggagaccgcgaactgtacaacacggccgtcgagttgacccggatcatggggcacaagaacccgagccggttcttcaacgatccgaccgcggtcaatccgcagaccgggcagctattgtatccgccgccggcgccgccatcaccggcgcccgatccacgggtgctggcactgcagaccaaggcgtaggccgatgcgatccatcaaaagctcaaggccgaagccgagatcgagctggccaagatctaggccgagctcgacgcccagatcaaggtgttcgatgcacatctaaaggctgcgacggaggcgcggagatcggaacgtgcttccttgcccggtgcgcgaagggcgagggacggtcaccactatgttccggatccgaagcgaccgggcaaattcctgatggtcgttcatcgtgtctgatttttcgctggtgcccgtcgaccatcaaccggacttcacagatgtatccttaatccctgtggaccacgacccgttcagcgtcgatgaggcgccccaacaggccggacgacagctggacaatccgccccaaccgcttgcgacgggcacaggtctgcccgatgtcgggccgccggccattgatgacggggggcagttctcccccggaatcccattcgtcaacaaggcggccgaaattgccagcaaggttgcctatgccaagatggtccaagctgcgacgttaccgcaacgagcgatagacgcctccaaagaggatgtgcagcactacggcgaagtagcgtccacgtcaatccgggccgcgatcgcggtgcaggcaacgaacgcggatcgaagtcgcgatcgccgcccgccggcgcaacaacagcacgcgcagaacactaccatccatcgctacgccaagacgcgagagagcgaactggccacagctaaggccgggctgaaagccacgatcggcgctgctcgatgcggatccgaaagcggagaatgaagcaaagcgcagcatccgtcgaacacggtcccttctctggagaaccccagcaatgacgaatactgatgaatcgagacttgaccaggccgtaggccgcgcggtcagggccgaacgcctgctcgccgacgaattgctcgccgaagcattcgcgagcctcgagcatgcgtatacagctgcttggcggtcgacgacgatcgacgacgcgtccggccgtgaaaagctgttcctcgccatcaacgtggtcggcaaggtgcgcgatcaccttaccgctgcggtcacaaacggcagactggcgaaggctgaactgaaggagctggcgcagacggcggagcggaggaagcggttcggtatcctgtaggaccgcttgacaacgttcccgttatgttcaattctgggttgcttggtgtttctcgtgcgagcctcaggatgatcctctcgacatcgcaatggtgggcagccttcatcctggacgtcgtgattaagaccgcgctcatctattggtcggctgctctcattactctgggcatgatagcagccggtggcttcgagccggtgatcgcttgccttgtcttggcggcgtcgctttcgagtcttcattttctctgccttttcctcggtggcagatttgtggagtcgcttgaggaggcaaacattcggcgcagccgtctcctcaggttcgtccttgtgctgatctccgccaacgtctttttcatcgcgagtttagttgcgctcctttccgtctcaggcggtgtttacaatagcgtcctcgtgggcatgatcgtggctgccaccaatctggtgcccgttctgttcgtcgcggtgaccagcggccttttgagcctcatcaagctttcggcctgatcgactgctgtcgatctcccgtggcagtcatcattgcccgcgtacgcgcatctgcaattccgtcacagtgcgagcgtccaatggatctgagcatacaatcgatcttatcgacgccgccagccgcacccatccgccatctgggcagtacgcgtgtcagatattgaaaatcgatggaggtcgccgaggcggttgcttctcaagtcgatgaagaaaacccaacatacgagttgacacgtcgggcaactcactagcataatctcaccatcaagagttttgagcccgcgccggaaacgtcgcgggttttttcgtgacgccgaccctgtgcgacacgcaggcgccacggcggagacaagggcgggccgaaccggaagcaagcttccgcgccatcgcgcagcccgagcgctcaccacccaagaccatcacgtccgcacatcaggatgacgaacgcgtccgccaaccggcggcgcggtcgcatgcgttgtcggacagcacaaggaccaacacatggctctgcctaccaacacggtgacgacatatcaggcgatcggcaaccgtgaagacctcagtgatatgatctatcgcatcgatccgaccgacacgccgttcatgagcggcgtcgacaaggaaaaggcctccgccgtcaaccacgagtggcagacccaggcgctggcgccggcctcgaacgctaacgctcagctcgaaggtgacgatcccaccgccaacgcgctggtaccgaccgtgcggctcggcaacctctgccagatctcctacaaaatggcgcaggtgtcggggacccagcaggcggtggaccatgccggccgcgacaacgagctcgcttaccaggagatgctgcgtggcctcgagctgaaacgcgacatcgagacgatcctcgtcggtagcagccaggcgaaggctgccggctcgaccagcgcaccgcgcaagacggcgtcggtgctgtcgtggatcgtgagcaatacgtcgaagggaacggccggcggcggcgccgatccggctgcggccgacggcaccggtacgcgcaccgacggcacccagctggcgttcacggaagtgcggctgaagaccgtgctgtcgtcgatctggaccaatggcggcaagcccggcaccatcatgaccggcgccttcaataagcaggtcttctccaccttcaccggccgctccactgcgatcgaggaagccaagtcgaagaagatcgtggcgtcggtcgacgcctacgaatccgacttcggcaagctgaaggtcatcgccaatcgcttccagcgtccgcgcgacgttctggtgcttgaaatggacaagtgggccgtcgcctatctcaacggccgcaacatgatctcgatcccgctggcaaagaccggcgactccgaccggcgtcaggtgctcgccgagtacgcgttggtcgcgcgtaacgagaaggcctccggcggtgtgttcgacaacaccacgtcctagccgggtcatcgcgatccgcgggcaaccttggttgcccgctttcccttgtccgctttcctttgcatcaggaggcctttatgccacttcccggtaatcacactctcaataccgagcatctgacggcctatacgccgtcatgcggtgcgtctcccgctgccgcctacattcgtattccctttcgttgccgcgtgctgaaggcgacaggagtactcggcggcgcgatcaccacgaccgatggcagcgttacggtcaccgccaacggcaacacactggcgaccttcacggtacctcaagccggatcggccgcggggctgctgttctcggcggtgccgccttcgccgacctatctgaacgaagacgatgtcgtcgtgctgacgccgtcgggtgcgtccggggccgccgttcccatgtacttctctctctcggtgaggacggcctgatgtcattctttcccaagcagccggcgtcgcgcctcggcgtcacccagacgattgcttacgattcgagtgtcggcgcggcgaacgcgttcggtacagagacctatcagctgcgcctggtcgccaactccgcttgttgctatcggatcggcgacggcactcagaccgcgacgatcgcggatagttatctcccggcgaacgtcgtcgaatacgtcatcgtcagtcccggacagcagatcgcagcgatcaaggcggcaaccaatggcctggtcacagcaactgccggaactctctggatcgcggagatgtcgtgatggacggcgtcctgatcaggccacatttcgacggcaacgggcgcgaccttgcgatcgagcacctgcaggatgtcgagccgatcctgcaatggaatcatgaggcgcggcgcgaccagcagcgcaacgaatggggccgccacgtcgcgcggatcccgaacgtgatctacgtcaagtggctcaacgaagagcacgccaagggcaacacctcggtgcggatgttttcgcccgagttcgacggcatcgtacagcgcaagctcgacgatcccgaatgggcctacttgcggaccgatcgaccgaagctgcagtccggatggacaacgggggcgacgtgacacagatcgtggattatgcctcgctgcagtcggcggtcacggagtatctggcgcgcgatcaggatacggttctgatcgcgcggattccgaccttcatccagctctccgaggcgaagctcaatcgagagttgtttgttcgccagatggaacagcgcgcgatcgccgtgatcgatctcacctccaaccagcccgagttcattgcgttgccgtcggatttccagtcgatgcgccggattcggctgtcgggtgtgtcggggatgcccagtctcgagttcaagtcaggcaagcagcttgacgaatatcggttcggcatctccgacgttgcaggacagccgcgctacttcacaatcttcggcaacgagatcgaaatcgcaccgacgcccgacaaggcctacacgattgaaatggtctatcggcgggtagtcccgccgctcgccagcaatgatccgaactggctgctgtcggcggcgccggacttgtatctctacggcgcgctgctggaagccgcaccctacctgaaggatgacgggcgcatccagacctgggcgctcggcttctcggccgcactcagcagtctcaacaatctggggctgacctcgaccttcaacgccgggccgatgacggttcgcgcttccggtcagatcatctaggaaaatccatacaatggctgccttcaacaagttcaactgtttcgtgcaggacgtggccaacgcgctgcatgacatgaagaccggaaccgcgcaggtctacaaggtgtatctcaccaacgcgctgcctgccgcgaccaacaccgtctacaatgtgcctgccgatctttccgccggcaacggttacgtggtgggtggaacgtcaatcggcacgatcgcgggatcacaaacctccggcacgttcaggttcttcggcgcaacgaatccggcttggaccgcggccggtggatcgatcggcccgtttcaatatgctgtcctttacaactcgacgtctccaacgaggcctttgatcgggtggtgggactacggcacgggcctgatgctcaccaacggcaacacgttcacggtcgctctcgaccagattaacggcattctgacgattacgtaacatggcagcatttcttgacacgtgcagattttcgccgtcgaccggcggcaccaccgactggttggtcgcggggcccgtcggcggatatctggcgcccgcggcggccggagcagtcaatggccggacctacaagtaccgcgcggagagcgcggatctctcccaatgggagctcggcgaaggaacctggaacgcctctaccggtgtcctttctcgaaccacgatcctgttcaactcatcaggaacgacctcgaagatcaatttcactgtatcgccgcaagtagcgatcgtggccctgagagaagatctgatctcgatcgaggaagcgaacaatttcaccgcggcacaacgcgcccaggctcggaccaacatccgggccaacccttcagaaagcggtgttttcatcgtcgaccgaaacggcactgatcagaccggactaacggcagcggcatataacaagatcacgtggacgaacaagccggtcgataacgaaacctggttcgacacctcgaccgggagatacaccccgcagactgccggcacctatctctttgtcctggattgctcgactgcaacaggtacgtctctaaccgaaagctgtcagccgtcgctttacaagaacggcgcacgcatcaaaaacggcgcctatacggcagtttcgaacggaatgtcggccgatgccaacaagctgcttgtttgcgccgtcccgatgaacggaagcaccgactacgtcgaggcttatgtctatttgccgaacggggtcacgacattattcggcgctgcggcaagcacccattttcaaggcttcagaattggcgcctgatgcaccagctggatcctcggtgcgaagttttgggcaacatgacgaggttcatcgtcgaggtgcggggcaccgccgcgcaatttcgagcatcaggggggtctagcaatgtcgatactcgggttcgatgcgatcggacgcctcgctctgggacagatgcgcgtaagtggctcgaacgttgtggccggtggcgcgggatcatacgtcatcggaggaaatggggcgatcttcggccttcgtacgacgggggtggcgacaaactacgcacttgccggcaatgccgccgcgtttatcccgacgctgagtgggagcgcgggaagctatcatgagagtggcgacgccgctctcttctccataagtgcagtgtcaatcgggacgaactattccatcgttggaaatcccgtgaagacggcgatggcgctcagcgttgccgtaggaagctacatcattgtttataaccgggtggcgggaactgctgcactgaacgccgggatcgccgcttaccaggtgaccggcagcgctgcggcgctgagtcgagattacgtgaattggtggcccacccaacccatcgcaagcaactggaccggtgagattgctccgtcccctgagtggacgatcagcatatcggtctcgcctgcctggaccgcgggcgttccggcggtctcggcctagacgctctaggctgttccagcgtgcgcctggatcgttgattccgagcgggcaagccggaatccaaatgtgcacgagtgcggctttgcgcgaagcgcccccgccggacgccgccggtcatggccggcggggttgcggcgcggtgtcgcgccggagccggtgatgcggtccgccacgcctgcggccgaattctctggagatgattgaaatatgcccttacttgccactggcgagtatcgccccgatgtcagcgactatgaaggtcaggccacgcgaaacatcctgaacgtgatcccgcgtggtgacggctacggaccgttcccgagcctgtcggcttacgcggcaccgttaccagctgcttgccgtggcgctttctacgcgctgaagtcagacggcacggtggttacattcgcaggaaccagcgacaggctgttcaagctgaacaataccgattttacatggaccgacgtgtcgtcggggggcggaacgtacagcgtgctgagcgccaacgcgcagtggcagttcgcgcagaccggcaattttgtcttcgccacgcaagccaacgcaacgttgcagatgttcgacctgtcgtcagcgtcgacgttcggtaatgcactcggctcgccgccgcaggcagcctatatcggggtcgtcggcaggtttttggtgctatccgggctgctctcgaacccttatcgaattcagtggtcggggctgaataactttaatgcggccgacagctggatcagcggcatcaagtcgtcagactttcaggactttcccgatggcggcatcgttcgcggcgtcgccggcggcgaggcagggatcatctttcaggaccaggcgatccggcggatgtcctatgttccgggttcgccgatcgtattccagatcgatcgcatcacgcaggacaagggcctctacgcgccgtactcgatcatccgggccggagagcgcatctttttctacgcaggccagggattccacaagatcgagccgggcggcgtgccggagcagatcggccgcgaaaaggtcgaccgaacgttcctggcggatctcgacaagggcaatctgcaactcttcatgggtgccgccgatccgcgcagcacccgggtgtactgggcctacaaatcggtctccggcgccgtcggaaccacctatgacaagctgctcggctacgactttctgcttgatcgatttttcccggtctcgatggcgggtgagtatctgctgggcgtctcgcagaccggcctgacgctggagaacctcgacaccatctcgtcctcgatcgatgcgatgacattgagtctcgatgcctatgccacggccgttcagcccgaaatcgcacagttcaacaatgcgcatgtgctcggcttcttccgcggtcagaatctggaagcgacgctggaaagcgcggagcaggggaacgacgagaaccggatcacgattcgcggcttccggccgatcaccgatgcgtcgacgctctatggctccgtctcgacccgagatacgccatccgccgctgcggtcccgggtaccgaagtgctcgtgaatgccaggaccggacgctgcgacatgatgcaggatacacgctactcgcgcttcaaggtgcggattcccgcggcgacgcaatggagcttctgcgcaggcgtggtaccggatgtgatcgcgagcggtgcgctatgacggcgtatgttccgggcatcaccgaaacggatctgaagaagatcgtgctcgctatccagggtctcgccgccggccgatcgaacgcggtcgggacagtgacgctcgcgacgggcgtgtcgacgacgacggtgtcgacaccgaatgcggcatcaggttcgacgccgatcctgacgccggcatcgccaagcgccgcgacggagctcggcaacggcacgatttacgtcagcgcggtagccaacgggtcgttcacgatcacgcatgtgaattcgacgacgccggggcggacattcttttatgcggtgcttggttagtcatcacagagactagcgcatcgcgtttgagcgctggctgctctcagaaagcccgcattccggacggccgccgcccggccgcaccgcgttgcgtcttgtgaccatgctctctcttctagcaaggaagttttcaatggctcctcgatttccaggatttagatttgttccgtacggaatgcccaatccgtttccctcgccgcccgttcaatctgattctggtggggagcagccgcctcgcccgccaagtccgcttagtggactgcttggtctgattctgaagtacgagcaatggcggcaatcaatcctacgcgatgaaaacaaaaatctatcaacgccagccgatccacagggagggcagcctgaaaataagccgaaccacgggtttagttcgggaccgcatgatccagatgctaggctactgatgcgcattccgcctgacggtgatgctgcgagccctcccgtcttgggtgatcgagagcgtttgccgaacgttgcggcgccgtcgttggctccatatggtaaatcgcgcagacgaagcgccgctagccgcgcgaccagcactggagccggcggtagcggcggcagcaacagccgcggaaatgatggcggtgacttttgcactgagagacggggtgaggaaacaagtagatgctggcagacgtggcaggagcgtcgtgatagcggacaagttggatatccgtgggacgatttccttcagggttgcaaggatcgggcatgggaaaggtatttcgcgtgcaacaagaatgggagacgacctgcactagatgagcccaacgaatggaatgagcaggatgaagagaattggttcaatgaccagcgctaggaacaaggattgcgctcggtgaaccagcaatgatatccttcgcagaagtctagtagcgttccctgcggaaaccatgattcgactcggctgtaaggtgtagccatagcgtcgttcggtacagcaaaggaattgggggattggatcagggagctccgaagtcagagttcgctgcattcgacgatttgtattgtcaaagatcgcgcgtcgagtgcgtgcgatagtgatcgtcgctttattctcaatgagttggtctggctcctgcgcgaagccgagcgggatgacgaagcgctggaggtcctagatgaggttatgcggcgctattcggatgatgttcgctgtgcgatgagcaaagccaacatttgcctctactcgctcgatcgacctgaggaagccttaaagtggatcgatgttgcgctggagcgtgcctatcggactaagtgttggcgcagagaagcgcttggccagaaggctcggatactgttgatgctcgggcgaggtagcgagctatcagatgtcctcgaagatatcatgtcgctgcagattgtgcgtggtgttcccgacattgggcgcgagcgcgatttcgtggacggtgcgccaccgggattcattcggaagaacgtcctcgaacgatacaatgaattccgtccaaagcgagcatgcgatggcagtccggacgaactgcctccgttcaagccagctaacgatatgatgtgacttgctcgcgttcgcgagattagttgtgaatgcgtgaggtggtcgatgagtgctcgcttaacctccgcactaatctgcgttgcgcccacgaaggtgcatgagttctggccgcatatcgctaaactgctgagggaggcctgtcgacggactacattgaacgcgtttggcgatatcgccgccgatgttctatcggggcgcagtcttttgtggttcgcgtggaatggaaatgcgatcgaggcggctgctacgacagtcctcatcaattccgatatcggcaaggtctgcatcatcaccgcgtgcggcgggtccgggatgaagcgctggctgccgctgctcgacgggatcgaagcctacgcaagggatgaaggctgcacgcgcgtgcggatctacggtcgcaaaggttggctgcgtgtgctcgacggctatcgtgagaagcatgtaatcatggacaaggagatcacggtcttgaggccggattgtccaggcttgagcgatgctaacggggattgacattgttcactgtttgttcaatggtaggcgactactaagcttgtggttgcatgcgcaggttaggttggatgcggtttcttctggcgtgggttttcgtcatgttgtcctggccgtcgtatggcgccagtgaggagtttccgcctccgcttcgcggactgtggggggaagccaaggagacatgcgaatattggaaaacgcaaactgcagcagatgttcacggcgaccaccggtggctgaagatatctgccaagggtgtgttcggctccacggagggccgctttttgaaggaggtcgccggccaggctccggccgcttcgaccgccgaggtgtcagccgaaatgcagaccctggatgcaaaaggggcgatcgttctgctgacgctttccgcccacggtcagcttcgcgagatcttgctcggtgaaggccgacgcgaaatcggaacatatcagcgatgttcatgatcgcgctcgcgcagcttttgccgattgatcatctctgtccggtctgatccttctgacaggcgccgtcatgcgaaccatcttgttgtgtttcttgctcttgctgcccggtgcatctgtcgccgtcgcggctgatgagattccgaatgaaatgcggggcttctgggttgccaagaaatcgacctgcaatatcctgaagagcagagggcccggatcgcttcgcgcagacgagcgctggctgaagataactgcaaccgatgtcctcggttcgacgcagggacggtttttcggtgagttaccgatcgacagcctgagttttctttcgacgcggctgtcggttgctatccagacgttttcggacaatcaccttatgtcggaattggcattgacgcgtgacgatcggctcgtcgaacgaatcatccaggcgcgtggcgttgctacatatttgagatgctgaccggtggaatctgaaatgatctccagcagagcggtcgagacattggcaaagcggtcgagacgtcgcgaggtatgttgaatgcgaattgctttggtatccgcttttttcttgattttttgctcaccaatcttggccgccgctgaggccgaattcccgtcggaattccgtggattttgggtaggtgatcaagcgacctgcgatgcgttgaaaaaggcctctcctgcagaccttcatgacggtcagcgatggctgaagatcgcggcaacagacatcctcggtacgacgcaaggacgcttgttgcgggagcttccagcccctcgcgcaccggtgaagaggacattcgagtttcagattgccgatgacatggggctgattgctcaattgagttttgtcgacagggggctcagcgagacagttacaggcggtcatgcgcgccgatggtatttcaagtgtttctgacggtgccacaatgcacgctcgagcgcgctttcgactagttgcgatccgataaccgatagtctcgcagaggtcatcgagaggtgacttccatgccaattgttcagacacgcgaccgctgccggccggcgggcgacccgcgtcctattgtccgctacctgtcctgttattttcacggagccactcatgagcagccgcgaccgtatcgatgttgagatgtctccagactatgacgcccggaggttgctttgttcgtttcaggcaatgatggagcaggcgggagactagaacggtgctaaccgcgggcgcgtcatcgccgccaggacgcagagctggcgttccagcggtaccgaattctccggtagcagcaagtggtctcgcgagcgagcaggcgcccgccgagcggtcacttttggggctggtgagcagggagccggtgcaattcctgccggtacctatcttcgacacacgtcgatagatcaatccaaccgccggtcgtcgcaaagcgtgccggacgcctgcatccgatgcagtgcgactgcatttgcttgtcaatcaaaccatgaaaggaaggcatccgatgggtggccaatcttcatcgacccaaacgcagcagtcgcaaaccgctccatgggcagcggcacagccgatgttgcagaacattctgagccaacttggcacaggactgaacaacacgggggcgacggcagcggaaaccggcgcactcaacacgctacagagcaacgccgcgctgggcaatccgtacgcgggtcagatcggtggatatgcgcagtcgctgttgaacggcggcagtgcgaatgcgcaggccggaaacgtgcaggacaatcttgcgacgttgcaacgacagctcacgccttatgccaatggcagcatgatcggaaacaatccggcactgacggcgcaattggcgcagatccggagcgatgtcggcaacagcatcaactcgcagttcgccgcggcggggcgtgacctcagcggagccaaccagatggcctatgggcgcggggttgccgccgcggaggccccggtgatagccgcgcaatacaaccaggatgtcgccaaccagctcaatgcggcgaatgcgctctacggagccggcaacaccactgcgaatacgctcagcggtatgcaacagaactatctcaccaaccagggccaaggcgtgaccgcggcacaatctgcgctcgatgcgcagaactacggcgccaacgcaacgctcgcggcggaggcgcagcggcgcggcattccggtgcaagcgttgagcctgctcgcgcagatcggcgtaccgatcgcgcaactcggccagcagagcaacgggacgacgaataccactcagcaattgtccggagcgcagcagttcggggcgattgctaacggcatcggcagcctgttcaagttcatgccgtctgacatgcggctgaaggaagatatagctgccgtcggcgcgctgttcgatgggacgccggtctacggctatcgctacaagggagcgcccgcttaccacatcggcctgatggcgcaggatgtggagctgactgcgccgcatgctgtcctggagatcaacggctacaaggcggtcgactatcgcgccgcgaccgagagctcccgcaagctcggcgaggcacgctaatgggattgcttgacgactacctgaactttgatccagggcattttgaaccaggtggaggattgtatgggcggctgctctccctgcagccgcagctgagcttcgaccagcccgcgccaggatctccgtttccgcccgttcccgtcgcggcgagtcccggtctgccggcaaacaatcgcgaaacagccctggtcgatggagcgccagtacccgcttcacctcagacggcgccctcaagctggccgcgtgacgatggacagacgctcaacatgcgaattggggactattggatgccgcaattcggccgcgcggagcctcctgcgccggctaccgcgccgacattcggcgatcgattgaacgccggttttcagagctgggcacataccccgttaggcaatccattcgcagcgctcgccaacggcattacgggctttaacaccggtcagcgttcggttggctggactggccaacccacccctgagactcccgacgatcaaggcacgtcgacgccggggatcatgcctggtcgaggcccagccgcttacctgcgaaggagaggtctgaacaatgtccgatgaatcaagcaacgatctgactggtgcggcgcacgatctcgcaatcgccggttacaaggcgatgccggaccggaagtcggacgaacaaggggcgatcggcagcgacactgcgtcccttcgtgaagccgcggaaaagatctccgagcaatctggggacgtggttgtcaggcagtatcgtgacgcggagggcaaacccgccgcggcgaatgaagccgtaaccctaagccgtgcgagccgtgactacgcggccgcggttgcggccgagaagctgatcgccgacagcgaaggtgccgaccgattggccgaacgggtggacgcgttgcgtgcggaggcgctcgcaaagaacccggaagcggccgaattctacggtttcgagctgcccgacgcggacctggatggtgtcgagctaaacaaggaccacgcggggacggaaggcgccgaagccggtttcggcgggggtctcgatcccgccttggcgaaggcgctggagcatccccaggtacgtcaggcgatcgatgaggagattgcagagacgcacaaggtccggcagggctatctcgatgccctgaccggcgcgacgcagatcgcgcaagcaagcttcatcaaccagttccctgagctcgtcggcattccgtttgaaaacttgcctggcgtcctcgaacagttgtcgcggcaggatcccgcgaaattcgcacatgttcagagcgcgatcgcggcaacggaccagctccttgcgcaacatcggcaggagagccaacggcagactgaagccgcgcatcgcgcctttcgcgctcacgcgaaatcagaggacgcgcgcttcgacgccatgctcaagggagaacccgtcgagacccagcgcgccgtgatgcaggagatcatcgcgtcggccagggcgagtggaatcgaggcttccgagctgacgcatttgctcaacaccgaaccgctgatgcgcaacgccgccttccagcgaatgatgtatgatgcgggaaagtatcgtctcatgatgaaggcgaaggattccgtcacgaccaggccactgccgccggtgcagcgacctggctccgcggcgtcacgcggcgagcgtgagaacgcggatcttcggaccctcaacgcgaggctttcgagcaccggcgacatcaaggacgccgtagcgctttatcatgcgcggaaggccatcaggcgctgatgcgttagactcggaagctatttgtgctgcctggttagcggatgagtcatgcggcaaccgccggttggctccccggtcccttcctgctctcgacgacgttcggcggctagctaactcgatggatgttcaccaattcagttctcttcaattgggttttgaaatgacagacgaccgtaatcttctcgagtacgcagaatccatcacggaaaaggcctgtggccagcctgctaccattgacgatatcgccgacaactttgcgctctatggcctgaacaagcgcgtggtcgccctggatgggctcgaagccgagctcgacggagagatcggttcaggctcgcatagtcttaggcgtcatgtgcgcctccaggagctgcggcggagaatgacaagcctccaccacgcattgcgcagggcgaagcgctgaagcagacgatgggtaaccccgtgctggcagcgctcgcgcaggctcgtttgcaggctgcgccgacatttgtccgctggtgcgcgttgcgtggcgtgaccccatgtccggccgtgcccgacgccgttgcccggttcgtggccgactgcgcgtccctcggtatcgagcggctctggccggccgtgcaggagatctcgaagatgcacgtatcggcgggtctcgccgacccgacgctcggaggaccggtagcctccgccatcgcccagatttccggcatcgaaccgccgagatcctggccggacgatcgcaagaggcgctttcggttactgccttacgatctgcagatattcgtcgccgcccatgagacacgtcgcgacaaggcgttgcggcgcgctcagaacgcagcggcgttagcgctgcggcaacttgaagcgctgcagcgaacacctcgcacagagttagaagggatccaggatgagaccagcacgcacaccacccctcgaaagccgcatcaatgaacttcgtgtcgaaattgaagccatcatcgatgcacgggcacgggccgtagccgcggaaagccccggcgtgccagtgggcgtgatccgcaacctcctgatcgcgcgagctccggcttgtccgtgcacacaatatctccaactcggtcgcgcggaatagcggcgtgacgtccgcccatcgacgaattcatcaaggaaggtatcatgactctctttaagtggtcgcgcgtggcggcctcggatgcgaccgccgacagctcaatcaattggcaggaggggcaggctccgtcgagcgtcaatgactctgcccgtgcgatgatggcggcgaccgcgaagtatcgcgacgatatcgccggcgcgatcgttacgagtggatctagcacctcgtacgcgctgtccagctatcagcaattcgacagcttcacgagcctaaacggcgcgatgattgcgttcacgccacatatcaccaacggagggataaccgtcatcaacgtggatgggctcggcaaccgtccgctgagaaccgcgcctggcgtcgagttgcaagccggcgttattatccaaggtacgccctatgctgctacctacaataactccgatgcagcatggtacctgcatggcttctttggcaatccgtacaatgtaccgcttgcggccggaatggactattgggcacccaccgctccgaacagctcgtttgtctttccgatcggacaggcgatttcgcgtgtgacttatgcgacgctgttttccttcattggaacgctttacgggagcggtgacggctcgaccacattcaacctgcccgacaagcgtgggcgggcatccgtggcggccgatggaggaactggccgaatttccggcctagtatttaactcgttggttgctggtggagtaggcggttctcaaacgcagacgctcagtgttgtaaacctgccgccctatactccatctggatatgtaagcagtgtaatttctacaaacgtgaaccgtaccggaattggttactcaggaggcggaaaccaggcatggatgacggttccagacggattcacatacaatcttggcgctggcacaatgagcggaattgccgtgtcaagcgctttcgtcggtgttgcgcagggcggtattaaccaaccgttttcaacagttcaaccctcgattgtctgcaactacattatgcggatcgtctagctgtttagatctgtaactgccgcaatgattgccgtcctccaagcggcgtatccggaggcgctcaagtgaacgtcattcggaaatgttgatcccgccggcacgttaagctcgataaagcggatgcattcgcttgcggcggctgctttgatctcggcgttcttttcgttggctccgtcctgcggcgttaccccaaccgcaagcagaagtgcagacgttcccctcagcttttgtaacagcgagcgatagccagtgcgaatggtgcctagttgattgtttgtcccgagttcaatgacgatgacggatggcttgtgatcgtctaggagcgaaagcgctatcgaattgaagtcatcaacggttgctcccgctatcccggcgttgaccaccgggcggccggcgatcgcttcgggaaggcgcgccatttccgtgatgctgtcacccatgaatacgatcgggcggtccaagccgcttaaggcataccggatcgccgtttttcggacgtcctgatggtcatggaacgtgtggcgggttacttcgccgaagcgttttcgcatgcgctgcagttccgagaagctcgcgccgaacgcgacaaacagaactgcagataccaaccagggcagggcacgcttcatttcgtgcactgcttagcaccacaacccacgatagacaatcttgagaaactgaaaagtcctccagtaaaataataccataatcgaattgttagctcatgccgatctcctagcgcctgctccattggagatattatgaccgaactcgttgccctaaaggtcgcgaatgcgagccgctgggcgagggcccagttaacacgaagctctttgtcagttgcgaggcgacttgtcgcaccgcacgccaaggctcgctaccaaactgtatcagccaggaccggcgtcccctggttcttcattgcggttgtccatgagcgcgaagcctcccagaactggaacacgcagcttgggcagggtgatccgctcggaagcgtctctgttcacgtgccgaagggaaggggcccttttaggacctgggaagacggtgcctatgatgcgctagtcaactgcgcgcccttcgccgctcgcaaccaggattggtcgatcggcggcacgctgaccatgctcgagcgatacaacgggctcggctacgctgctcggggacggccgtcgccctacatctggtccggcacggatcagtacgtgtcgggcaaatacgttcgggacggggtctacgacgccaacgtcgtggatcagcagttgggctgcgccggattgttggcggcgatgatgcatctcgacccgaccatcaccttctcgggggcgaagatcatccctgcaccaaggtcgccttcgccgcctcggaaaccacctccggtcaccccatcgatctgcactcctgccaaaggctccctcggagccttttttgttgacctcttcaaatttctcttcggaaagaaatgaccatgctttggcttttcctcaccttgcccggactgctttgcgcctacctcatcgtcctgcggccgatcctgcacgcaattccagccctcaagtcgttttacgtcgaggccgatacgttctggggcaaggcctgggcgctgaccggacgatcggtgaccgtggtttggggcctgttgctgaccggtattggaaccgtcttccagtggcttgatccgatcgcgtcggctctcggcgatccagacctcaagtcccaagtcatggaagcgctgaagaacaatccccaatatctcgcctacaccatgatcgggatctcgacgatcacgatcgtcgcccggttgcggtcgatgggaaagagctgattgatgtggatggctattctttccttccttgggggccccgtcatcaaggggctcatcgatgcgtatcaggccaagctgaaggccggcaacattgacagcaagatcgctgccgatcttgctgcaagcgagatcgccgcacagacggccgaaatgcagatacacaatcaactgaagatcgccgagatcggtcacgccttggagccggagaaattggccttctatgtcactttggtattctttgccaaatgcgtcatctgggacaaggttctcgggcttgggacgacgccgcagctcaccggagatgtcagcacctgggccggcatgatcatgggtttctactttggaaagcgtacgtttgagaatgtcgcgcgcatcatacgacggtgatccaatgcacgaggcggatatcaaagcgatcgtgatggagacactgattgaacaagatcgagtgcgccgaagcgatatcgacgccgtggtggtcaagaccatcgcgactgtcttgacttcgttcggctttgaagagggagatcgacgcgagctgcgcgccgatttccaacacctgcggcgatggcgacgaagcgtcgagcaggcgcagagttatacgtttaaggcggtgatcaccgtcattgccacgggttttctcggagcggtttggctgggcatcaaagccactctcggaaagtaaccttcctcgccccgcgcgagttgacacgttcaggtcgtagatctgggcaccttggccggtcatgaaactcttgaggtgcggcaatgtatcggattcgcgaagtcgattcgcatgatgacgaggtctcggactcactcaccgagcttcatcagctgatattctgtgacgggacccgtgtgccggattttgagcatgggcattggtggatggctttccgtgaaacgaagccaatcgcgtttgctggcgttattccctcgactcatgttgccaacgctggatatctttgccgagtcggcgttgcgatgccgcattgcggccacggccttcaagtgcgccttactcgggcactggaggcacgagcgcggcgtgccggctgtacaacgattgtttcggatacgaccgataatgttttctcggctaacaattttatccggcagggctaccggttgttcgagcctgtctcgccctgggcatggcaccacacgctgtattggcgaaaggagctcgtccaattccgcgcggcgagttgagccccgtcgacagttcgacgacttggggcgcctggtggtcgaatggccaccgggcttctctgcgttgctggttcacaggtagcccttcggcaaaccggcgattgttaaccgaagccgtctgtcgcgcactgaccagtcacggccgtaagcgccgcctcaacgggggcagcggcggcagttccgtgtcttgaatgcgctgcaggcggggttacgcgtcttgatctccggtaatcgctcgataaactgtgccgacctttccgatcgtgcgaatgctttggagatcgaacgaaggaagagaccatggttgaggttggccgcgggctcgacgcgaagctggcgccggatcgggatgattattcgctgatggtcgcacgagcgaaagcgcttgttccgaccttgcgtgaacgggccgcgcgaaccgaagagctgcgccgcttgccacctgagaccgagcgggatctgcacgacagcgggctctttcgaatcctgcagcacaagcgcgtcgggggaaagcgaactcgactatgttgcgctcgtcgattgcgccgatgccctcgggcagggcgacgcctcggtctcttggaattttgcctatcttgcgagccaccactggatgctgggtatgtttgcgccggcggcacagagcacggtgtggggagaggacccggatacgctaatcgcctcctcctttgtcttcccggccggtcgagccaggaagacgcgtgccggatacgtgctgagtggtcatcggcccgtctcgtcgggggtcgtagcatgtggttggaacatgctggcgagcgtggttgcctcggatgatgaggccgacggtgtcgattatcggctattcctgttgaacagacgggactacgccgttgacgatacctggaatgcggctggtttgcgtggaacgtgatcgaacgatgtgcgagtggtcgatgcattcgttcctcagcatatgacggttgccgtcagcgatcttgcgggtggtgcaacgcttggcagcatcgccaatccgaacgggctctacatgcttcgggtcttctcgtcgtttccttacgccttgtccggagtcggcctgggaaatgcgcaggcgtgccttgacgactatgtcgagatcgcgcgataccgcgcctcgacatatgaccgtgccaagatcggagacctgcagagcacacagatcaagatcgctgaagcgtcggcgaagatagatgccgcgcggctgatcatgcgtacgaactgtttgaacgtgcttgcgggggttcggcttggggatgttccgggcattgctgcgaaaacgaagctgcggcgcgatggtgcgtttgcggtcaatctctgcaccgaagcggtgtccctcttgtttgctgcgagcggtgcgcgcagcctgttcacctcgggcgcgttgcaacgtcaattccgcgatgcgcatggggtgaactcgcatcttgcttttaatttcgacgcggcgggcaccaattatgggcgcgtggcacttgggctgccatccgaaaacctgacgctttgaggctggccggatgtctgactcacccaaacatcgaccggaaccggccagtgagctcgcaagcgacagttcgacgatcgatcctcgtgacttccgcaatgcgctcggtacattcgcgaccggcgtgacgatcgtcaccgcgatgtcggccgacggacggccgtacgggattacgtgcaattccttcgcgtcggtatcgctcaatccgccgctggtgctgtggagcctcgggatgttttcgcaggggctgccgatcttccagaatgccagccatttcacggtcaacgttcttgacgcctcgcagcaggggctggcgatgcagtttgccagatcgtcgggtgacaagtttgcgggtgtgaagtggagtcccggcctcgggaatgccccggtacttgccgacgtcgccgcaagtttacagtgccgggccacgaaccgctactacggcggcgatcacgtcattttcctgggagcggtcgaggcctacgcctatggccccagcaatccgctgctgttcgcgcggggaagctttggccggtccttggctgacgatggcagcgagccatcatgaatcggaagatgcccgtcaaacgagttcgtgctaagcgaaagcggctgtcagctgctgaccgtcgcagtgaattcgtcaccaaagcgaccgagctttttgcagaggagggatttggcggcggcacgcgtgcgctggcccgcaaactcggcgtgacccagccgttgctttatcggtatttcccgagcaaggacgatctcattcgagaagtctaccgcaaggtctatctcgagcccctcgagatcggctgggagaaattgctgtcggatcggtcgcgtccgctccgcgtgcgattgcaggaattctacgaagcttatacggacgccatcttcaatcgaagatggctgaggatctatctttactcggggctgaagggtctcgatatcaaccgctggtatgttggcatggtcaaggacaagatcctgacccgcattctcagggaatgccgccacgacgccggcctcgcgacgcagaacaagccgagcgctgccgagttggagctcgcttgggtgtttcacggcggcatcttctactacggtgtacgcaagtacatctacgaagcgccggtccttgatgacaagtcgcggatgatcagtgacgcgctggacatcttccttgcgggatttgagcggatggcggagagcgcgaccgatcgccggcgggcgccgatcgaggtcgtcggctgagccggattacttcgctgccatctggtcccgataccaatcgccgatttcgctcgccgtcatcagtgccacgccgtcgtggccgacgacgtaatcgagcagggcttcgaggtacttgattcgatgtgggacacctgtgatgtagggatgcaccgagatagccatgacgcgggcattctctgcgccttcaagatacagccgatcaaactggtcggtgcagcgcgtcaggaactgttccgacggcaggtgctgcagcgcgtgaatgacaatatcattggtctcgaccgaatatggaatcgtcgtcacgattccgtgcggcgtagcgatctcctgcggaagatcgtcaatcacccaatcggccacgtattcaattccgttcagacggaggagatcgagcgtttcttcggtttcggtcaggcccgggctctcccatgatcgcggtggcttgccggcaaaaccggctatggtgtcgaccgcacgcttgatcgcgtccgcctggttctcgaccttgtgcatcgggccctggacgaaaccgtgtcccatgaattcgaaacccgcctcgagcgctgcggacgccacacgcggatagctgttgcagacgttggcgttcgcagccagcgtcaccggtatgtttcggtcggtgagggccttgaattgccgccagaagccggcacgcatgccgtattcatgccacgaccagttcggaacgtctggtagcaagggctggcccatcggcgggctcagcacggtacgtggcatcggattcccgatgcgccattcctcgacattgaggatgacccagacggcaagttttttgccacccggcagtgtcaatttcggccggtcgacctgtgcttggtacggaacgcgatcggtgaatgccatgtcgagactcccttacgtcgacgagctggcgccgccggcattgatgcgcggcaagaccttctccgccatcaggatcatcgattggcggccgagctcgcggtccttccagtccttgccggcatagagcaaggttccgaaagggccggtctcctgctggaacgataacaactggtcggccacactttcgggtgtgccgtagatgatcagcttgttgcagatcgactcaagtgtaacctccgcgtcaggttgttcccgccgcgtcttgaacagctcaagccggccactgcgcttcagcttcgtgaacagctggtgatagtaatacacgtagggaccatcgggcgccgtggcgtaggccttcgccgtagctgcgtcctttgccacgaacacgctcttggctacgcgccaattggcaggggcggctgcccggttcacacgctcgcaaccttcgacgtatttgggccagtgactccgtacccaggccggcatcaggaagtttgccgagatcggatcccagccgcgtgccgcggcctccgtaacgccctttgagaacggcgcgaccgccgtcaccacgatcggcgggtgaggggcttgcaacgggcgggcaactacgccctggccaatgtcttcgatcagagtccttttgaccgagacattccaatatttgccttgcagatcatagggcggcttgccgccccagatatcgaggacctgattgatcgcctcgatgaacatggcattgcggtcggcgtcgagattgccgaagatctccgcgtcggacagcaatccgccagggcttattccaaatatgaagcggccatcgagcatatgatcgagcatggccacggatgccgcgaccgccgccggatggctgttcggcaggttgatcgtgccggtcccaagcttgatctgcttggtcgccgctgcgagccaggcaatgaacgcgatgctggaggtgatgttttcggccttgtcggtggcatgctccccgacatacgcttcggtaaagccgagctcatccgccagcaggaaggcttcccgatcctcgcggagcgattgccgccagtccttgtcgagaggatggatcggcatcgtaaagaaaccgagcttcatgatcctcctcctcgtgcgttgaactttagttggtaaggaacctgcggccttcacaggacgaagacaagccccgctgcacaaataatcactcgataaccaagcttgacctttgcacaaggcggttctctaatcggccgaaccaaaattgggccgggaggccacgcccatatgaaagctgcggctttcgcctatgcccgtgcgaccagcgtcgtaaatgcgctggaactgcttgccgcacatggcgacagggcgaaggttctatcgggcggccagagcctgatgccagcgatgaatctccggctgctgtccccggagctactggtcgatatcggcggcctcgccgagttgcgcggcattgcgttgaagggagacgtcctggtcgttggcgcgctgacccggtatgtcgacttgctcagatcgccggagattgcgctgcatgctccactgttgctgaatgccgtcagccacgttgcccatcccgccattcgcaaccgcggaacgattggcggtagcctcgctcacgccgatcccgcgtcggagctgccggcctgtgttgttgcgcttgatgccgcgatagttgctcgcggtccaacgggcgagcggcggattgctgcgaccgaatttttcaagggaatctacgaaacggcgctgtcgccggacgaattgcttgtcgcggtcgaggtgccgatcgcgggccagggctcgacgtacttctttcaagaatatgcccggcgccatggcgactacgccgtcgttggtctcgctgcgcgtgctgtcgtcgcagctggccggttttcggatcttcggctcggcttctttgcggttggcgaacggcctctgctggcaactgctgccgcaaagctcatcaatgcatccgtgacgccggcgctgcttgcagaagctgcgacggcgctggccgacgaacttgagccgcaagaggatcaacaggcgagtccggcgatgcgccgacacctcgccacagtcttgctccggcgctgcgtggccgcattgctggcgcggtccgagctggacgcgggaggagccaggtgagcactccggtgtcggtttcgcttatcgtcaacggcgaacccatcgatgccttcgtcttgccgcggctcaatcttgcggatttccttcgggagaatttgaaactgactgggacccacgttggttgcgagcacggcgtctgcggcgcctgcaccgtccggatcgatggtgagatcattcgctcctgtctgatgttgacggtccaggcgcagggcgcgtcggttgagacgatcgaggggctgtccgacagcggcgagatcgccgatcttcaggcggcatttcgcgaacgcaacgcattgcagtgcggctactgtacccccgggatgctgatgacggcacaggacttgctgaaccatgtgtccgtacctgatcgtcaggcgatccgcgagcacctgtccggcaactattgccgctgcaccggctatcaggccattgtggacgctgtcgaggcgacagccaagacccgtgcggcgcggcgaacatgaccgtaaccggtgcgccaacgcagacactttcggtgctcgatcgtccgaattcctatatcggcaagacggtgccgcggccgaacctggacaggttgctgcaaggacgcgggcagtacgtcagtgacctggaattgccgcggatggcgcatgtggtgtttctgcgatcgccgcatgcccacgccaggatcgtggcgatcgacgccgacgcggcacggcgtatgtccggcgtcatttccatcgtcacgggccctgagcttgaagctgtcgtcacgccttgggtcggtgtcctctcgcatctgaagggattgaagtcggccccgcagcacgcgatcgcggtcgaccgggtctgctggcagggtgaggcggtcgcggcgattgtcgctaccagtcgggcggcggctgaagatgccatggagcatgttgccgtcgactacgaggaactcgaggccgtcaccgacatgcgtactgcgctcgatccagcaacgccagtcattcacgcgtctcttggtgacaatcttgcctttgaacggaccttcaatgcaggcgatgtcgaccatgcgttggcggaatcggaggtggtcgaggccgacttcatctttgggcgccacaccggagtgacgcttgaaccgcgggctgttgttgccgactggaatgcggccgaggcacggctcacaatctatcagggcacgcaagctccccacatggtgcagaacatcgcggccttgcatctcgggctaagtgaggcgcaggtccgggtggtttgcaaggatgtcggcggttcgttcggcatcaaggttcatatctacgccgacgaaatggcgacatacgcgttgtccaggctgctgcggcggccggttaagtttgttgcggaccgtatcgaaagcttcaatacggacattcacgcccgcgaccaccaatgcaggggacggatcggcgtccggccggacggtaacatcaccgccttcgagatcgacgacctgacggggatcggcccctattcgatgtatccgcgcaccagcgctatcgaggccaaccaggtggtcaatctggttggcgggccgtatgtcaccccgaactatcgggcgcgagcgcgcgttgtcttccagaacaagaacgtgatgtgtcagtaccgagcagtcggacacccgattgcctgttccgtcaccgagggtctgatcgaccttgccgcggcgaggatcggcatggaccctgtcgagatccgccggcgcaacttgatccccgacgatgcctatccttgcgcatccccatccggcatgaagttcgagcaactttcgcatcacgcctcgttggccaagctgctgcagatgatggactacgacgccctgcgtgctgagcaagcggccctgcgaaccagaaacgtccaccggggcatcggagtcgcgaccttcattgaggtaaccaatcccagtgccgccttttacggcgtcggcggcgcgaagatttcgtcccaggatggcgttgcggtacgacttgacgcgcagggctcggtgatctgccagaccagcatcacggaacagggacaagggtcggaatcgctgactgcccagatcgtgggcagtgtgcttggcgtttcgatggaccgggtgcgagtgattctgggcgacaccgacaatacgccctacggcgggggcacctgggcttcgcgcggcgcaggcatcggcggcgaggccgcgttgcaagccgccaaggctctgcgccagaacattctggatgttgccgcggtcatcctgcaatcgaccccggccgcgctcgatatctccgacaaccgcatcgtcaacgccgacgacggagcgccacggatcgagttgagtgagttggcgcggactgtctattttcgaccagacactctcccgcaggggatccagccggagttgatggcgacccggcatttcgtgccgcggcaatatccctttgcgttcactaacggcgttcaggcgtcgtggctcgaggtcgataccgagacaggattcgtgacgctgctgaagcattgggtcgtcgaagactgcggcaccatcgtcaacccgcaactggtcgacgagcagatccggggcggggtcgtgcaggggttcggcgcggcgttgttcgagaaatgcatctatgacgaacgcggtcagctgaccaacgccagcatggcggactatttggtcccgatgtctggcgagatgcccgacatcgaggtgggccacgtggtgtccccgacgcaggagtcggagctgggagcaaaaggggcgggcgaggctggtacggccggcgctgcggccgcggttgccaacgcggtcaatgatgcgctgcggccgttcggcgcaacaattaccgagattccgctcacgcctcaggttatcctgacggccttgggacgaatctgaggtggaggcgttccaggcaaagacaagacgataagcaaaacacagacagttcttggggaggaatagtcatgacgaagaaggtcgccaaagccggatcgatatcgcggcgtcgtctgctgacgactgcaagtgctggcgccgctctcgccgtctcgccgtttcgcatcaatctgctgcaggcggaggaagcaccgatcaagatcggcttccccgttcctttgaccggcccctatggcgccgaggcccaagatcaggtacgggccggtcaattggctgtcgcccaattcaatgatgccggcggcctcaatggccgcaaggccgagctcgtcgtgcgcgatgacaagctcaatcccggtgaggcggcgacgcggacattggagctggtcgagaaggagaaagtgaacttcgtcgtcggaagcctatcggcggcggttcagctcgcgatcaacaacgtcaccaaggaacgtggcgtcatcttcaattcgatcagccagtccgacgccatcaacgaggccgcggacttcagcaaatacacattccacgaagcgttgaacccgcacatgacgtcgggtgcggtcggtcgctatgccttcgcgaaattcggcaagaaggttgcgttcctcacggcggactacgcctacggccacgagatggtgcgcggcttcctcgaggtcggcaaggaattcaacatcgagagcctcggcgacatccgccatcccttgggaacgaccgatttctccaccttgcttccgcgtctccaggcgctcaagcccgacattctctgcatcagcaatttcggtcgcgaccagcagatcgcgctgaagcaggcaaccgacttcgggctcaagaaatccatccagatcattgcaccgctgctctcgcatgccagccgcgtcgccgccgggccgcaggcgtttgacggcgtcgtcggcggctgctcgttctattgggggatcgaggacaagttcgcctcgaccaaggcgttcaatgacgcattccgccagatgtacgacggcaagctgccaaccgactacggtgcgctcggctacggcggcgtgcggaccgtgctcgaggcggtcaagggtgccggcagtgtcgagaccgacaaggtcgtcactgcactggaagcgctcaagtatgactactacaagggaacgcaatattatcgcaaatgcgatcaccagtcggtgcagtcggtgctcgtgatcaagtcgaagtccaaggacatgaagaacgagtccgatgtgttcgaggttctggccaccgaggaacctaatgagaagaacctgcgcacctgcgaagcgctcggccacaagggctgagccatgcgccggcgcgcgccgcgtggcggtgcgcgtcgtgccgaggggaacaaatggcgggcctgagctttgacctgattgcgctgcaattgtttgccgggctggcgctcggcgcgatctacgttctgtttgcaatcggcctttcgctgatcttcggaatgctgacggtcgtcaacttcgcccatggcgccttttacatggtcggcgcctatgtcgggctttatctgatctcgatcgggggcaatttctggatctgcctctcggctgttccgatcgtgatcggcttgttcggccttgctgttgagcgcgtgctgatccggccgctttatggccgcggcatcgactatccgctgttgctgaccttcgggctgagctacgtgatggtcgaatgcgtgcgcattgcctttggcaagaccggctatcccttcgacacacccgagcttctgcaaggcgctgtcgatatcggcgttggctattttccgctctaccgcctgttcgtgattggcgcgacggccgtggtcctgctggcactctggctgttcctcgagaagaccagcttcgggctgattatccgcgccggcgcgcgagacccgcagatcgtccgtgtccttggcgtcgatgtttccagggtctggttgatcgtgttcgggattggtaccgcgatcgctggatttgccggcctgctggctgccccgcttcagggcgtcattccggagatgggcggcacgattctcgccgaagctttcgtggtgacggtcgtgggcggaatggggtcgatcggcggtgccgtattggcggggctcctggtcggggtggtggtcagcatgacctcgctgtttgcacccgagatggccaaggtctcgatctttgccctgatggcgatcgttctcattgttcgtccccaaggctttttcggccgcgccggattgatgagctgagcgcggcatgaccgaaaccgttcaatcaatcaaacagcctcgtgccacgacgggaggttggtacgaattcgcaacgcgacatcgtgccagcattgctgcggcggtcgtcctggtcttcccgttgctgatgccgttcacggcgcttgccgtgaacatcttgatctatgggttgtacgccctcggattcaacctcgtgtttggctacctgggacttctgtcgtttggtcatgcggcgttgttcgggaccggtgcctatctctgcggcatcgccatcgtgcacctcggctggccatggtatgcggcgattgcggctggggtcgctggtggcctgttgatggcgctggtggtcggcgtgctcgcgatcaggacccgcggcatctacttcgccatggtcacaatggcgctctcgcagtgtgtctattacctcttctatcaggcgatcgacttgactggcggtgagaatggacttcgcggcatcaatgtccgcaccatcgatctgttaggtctgcggatcgatttcatcaatccgatgatccgatactacgtcgttgcggcgttcgtgatcgcggcattctttgtgatgtcgcgtattctcgcgtcgccattcggtgccgtcattgaagcggtgcgggagaacgagatgagggcccgcgcgtcgggctatgatgtcaccctgacgcgattgctgaccttcgtcctgtcgggcggtttatgcggtctcgcgggtgccttgcaggcgctgcacttgtcgatcgttccgatcgagatcctgcactacgagacgtcaggcctcgtggtgatgatcgctcttcttggcggcatggggacgttcttcgggccgatgatcggcgctgcggtcttcctggtcctggagaacatcgtctccgtctggaccgttcactggcaactgatcgtcggcgccatcttcattgcatgcgtgctgttcttccccgcaggcatctggggcacgctgatcgcgcggggcaggcgatgacggctgcagcaggccaagcgagcgagaccatcctgcgcaccaggggtgtcggcaagacgttcgggaagtttgtcgccctcaacaatatctcagccgagttctcgaggggagcgatcacctcgatcatcggtccgaacggggctggaaagagcacgtatttcaacttgctgtgcggcgcctttccgcccactaagggcagggtcgaattcgagggcaaggatgtcacgggccagccccagcaccgctttgcccacatggggatcgcaaaatcgtttcagatcaccagcgtgtttccacagctcacgacgcgtgagaacatccgtgtcggactgcaggcattggtgtcgcgatacgacatctggcgtccccgtgcgcgtttgaccgaactggtcgagcgggccgacgagttattggctctggtcgggttgtgggagtcccgggagcgcgcggccaagacgctggcacatggtgagcagcgggcgctggagatcggcatggcgcttgcgagccaaccccgtttgctgctgctcgacgagcccacggccgggatgagcccggaagaaacccggaccatgatggatctgatcgtgaagctcgcgagggagcgcacggtgatcctcgtcgagcacaagatgaagctggtgctcgggatcagcgatcgcatcctcgtgctgcaccacggcgaactgcttgccgagggaacgccacaggaggttcggcagaacgaggcggtaaagcgtgtctatctcggtcagcgggagcactgagggatgctgcggatcagcaagctcaatgcctggtatggtgcaagccacgcgctgcaggacatcagtctcgatgtgaccaaaggcgagatcgtctgcctgatcggccgcaatggcgccggcaagaccacgacgctgaaatcgatcatgggcctgatggggcggacgcgcggttcggtgaccttcaagggcgaggagctgctgaaccggccggcgcacgtgcgcttcgcgttggggctcgcctacgttcccgaagagcggcggatcgtgcagggactgtcagtgcgagagaatttgcggcttggcctggtggcatcgaggcaaaagaagcgcgaggcggaactgatcgacgagatcgcaatgatattcccgcggctggcggaacgcatggatcaggatgcggtgacgatgtccggcggagagcagcagatgctggcgatcgcgcgggcaatgatcgcaaagcccgacctgatcatgctggatgagccttcggagggcatcatgcccgtgctggtcgacgagatgttcgagctgttccgcagcatgaaggcgcagggaacgacagttctgttggtcgagcagaatgtcgagcttgcactcggtatcgccgatcgagcctatgtgctggatcaaggggccgtggtgcaccaggcctcggcgcgggcgttgctcgccgacgacgagatcaaggagcgctactgctcggtgtgagcaggcgtttcagtcagcgctccagcgcgcagccccgaacggacctcactcggcagcgctcgcgatcgcatcggccttgcgattggtgacgacgaccttgatcgcgtcatcgacacgatcccgcgcatatctcagcgccgtcggcaggtcggcgagcggaaacgtatgcgtgtggatcttggtcgcgtcaaaccgcttcgcggccatcagttccatcgcacggtgagtggcactcttgccttcgccgcggatgccgtaggcgtagatgttgttacgcaccaagtgcgcgatgtccagcgtcgcggcctcgtgcgggaaggcggccagacagatcttgccgccgcgattcgtcatgtgaatcgcctggttgagtgttgcttcggtgccggcacattcgacgacataatcagcaccgatcccccctgttagttgcttcacgacctcaacggcatcttcgtcgttgatgttgatgacgcggtcggcccccaattccccgccgatcgccagccgcttattgcgcgttcccgtcagcatgacaggacttgcgccgagcgccttggccacggcaactgcgagaagtccgatcggcccggggccgatcaccacgacgctctcgccggccaccaatccccccaattccgtcaagccgtacatcgacgtcccggcagtcaccacgagcgttgcctccgcatcgctcatggtgtcggggacgcgcgccagcgtgttgatgtggttcatcgcaaattcggcgaatccgccatcggttgtgaagccgttggcgcggtgtcccttttccggctttccatagttgaggcacgacgtgtacatgccctggcggcagcgtttgcactggccgcagccggcatggatctccacgctgacccgctcgccgatcctgaattcgtccacctcagggccgagcgcggcaaccgtgcccatgtattcgtgacccggcgtgaagttcttgttgaagggcagtccgccctgaatgctcgccggcgaacctagatggatgatctcgagatcggtcgcacagatcgcgaccgcatcgatgcgcaccagcacctcggcgcgcgacggcgccggcgttggcttgtcgcgaaggtggagttgatccgggtcaccaaggacccaggctttcatcaggtcggggacgggaagatcgggagatgtcttgacgccgggcggctgatacatgggcgcttcctgttttgcctgatagcctagcgcgaaacgaccggtcgccgcgagcatccgatggctggctcgggagcagctggatcgctttgctgcgcggcagcaagccgtcgcaaaacattcatgcgcggcctatacttggtcgccgggttgatgttgaaatccttcattgcatcctcgcccagaccggagcctcccatgaagaccgtccgccttgtcctcgcgttgctggcgctgacactgatcgcgccgtggcaatccgccagggcggccgacgtgatctgctacaattgtccgccggaatgggccgattgggcctcgatgctgaaggcgatcaaggcggacctcaactacgatatcccgcatgacaacaagaattccggtcaggcactcgcccagatcctggccgagaagagcaacccggtgggcgatatcggctatttcggcgtgaccttcggcatgaaagcgaaggcgcaggacgcgctcgagccctacaagccggcgcactgggatcaggtccccgccggtctcaaggatccggatggctactggaccacgatccactccggcacgctcggcctgttcgtcaacaaggatgcgctcggcggcaagccggtgccggcctgttggaaggacctgctgaagcccgactacaagggcatggtcggctatctcgatccgtcgtcggcggcggtcggctatgtcggcgcggttgcggtcaatctggcgctgggcggctcgccggccaatttcgatccggcgatcaatttcttcaaggagctgcgcaagaacgatccgatcgtgcccaagcagacgtcgtacgcccgcgtcgtctccggtgagatgccgatcctgttcgactacgacttcaacgcctaccgcgcgaagtattcggagaagggcaatttcgaatttgtcattccctgcgaaggctccgtggtgtttccctatgtcgtcggtctcgtgaagaatgcgcccgacaaggagaaggccaagaaggtgatggactatctcctgtccgacaaggggcaggcgatctggaccaatgcctatctgcgtccggcccgcccgatcgagttgccggcctccgtaaagggcaagttcctccccgacagcgactacgcccgcgccaagagcgtcgactggggcgagatggaaaacgtgcaaaaagccttcgtcgaccgctatctcgccgaggtccgctgaggcaatatggtgcccttcgcggggcgccattcttccgatgtcgcaaaagtctttcatttggctctgcctgctgccgcttgcggtcgtgaccacggcattcttcctgttgccgatggcacggctggtggtcgcgggcgcggaaggtccgcacgggctcgccggctatcttgccatcctgaccgaaggccgctatcgcgcgacgctgatcaacaccgtgctgctggcggccgcaaccacggtcgtcacgctgatcgtggcgaccattgccgggatgtttctgcagcggcaccgcttccccgggcgggccgtgctgatcgcgatgttgacctttccgctggccttccccggcgtggtggtcggtttcatgatcatcctgctggccgggcggcagggattgatcggcgatctgtcgaaccggatcttcggcgagaagttcgtgttcgcctattcgatctacgggctcttcctgggctatctctatttttcgatcccgcgcgtgatcctcaccatcatggcggcagtgcagaagctcgacgttgggctggaggaagccgcgcgttcgcttggcgcgagcccctgggcggtgcagcgcgacgtcgtgctgccggcgctggcgccggcgttcgttgcatccggcgcgatcgcatttgcgaccgcgatgggggcgttcgggactgccttcacgctggcgacgaacatcgacgtgttgccgatgctgatctacaccgagttcacgttggccgccaacttcgcgacctcggcggcgctgtcggtagggctcggcctgatcacgtggctcatccttgcgcttgcccgcaccttcagcggcagcacggtcgcggcggccgggtgagatcatgcgcgatcgcctgatcttcaccggccagttcatcttcacgctgctcgttgcggccttcctggtggtgcccgccgggctttcgatctccgccggcgtgaccgtcaattatttcagaggcatccagtccggcgtgacgttgcaatgggtcgcgcaggtctgggagctctatgccggcacgatcctgctctccttcgtgatcgcgttcgcgacgctcgcagtcacgctgctcgtcggcgttccggcagcttacgcgctgcatgcgcggggaggccggcttgcccgcatcgtcgaggagataatcacgctgccgctggcgattccggggctcgcgatcgcgctggcgctgttgctcgcctacgggagcctcggtgactttcgccgctcctggctcttcattctggtcggccatgtgatcttcaccatgccgttcatggtgcggtcggtcatggcggtgtttgcgaccgtggacatcaagacgctcgatgagggggctgcctcgctgggtgcgtcgccgtggcggcgattttgcgacgtcatcgtgccgaacgcgctgccgggaattctggctggtgcgctcatggtggtcacattgtcgctcggtgaattcaatctgacctggatgctgcatacgccgttgacgaagacgctgccgatcgggctcgccgacagctatgcctcgatgcggctcgaagtggcttcggcctacaccctgatcttcttcgtgatgatcataccgctcctggtcgcaatgcagctcttggccgacagggatcacaagcgatgagtacggcgggacacggtgcagcggtgcggatcgaggcgtgcggcaagacctttgccgacggcacgcgcgcgctcgatcccgcaacgctcgacattgcccgcggcgagacgctggtgctgcttggcccatccggctgcggcaagaccaccatgctgcgcatcattgccgggctcgagctgcccgatgccggcggcaaggtcctgttcgacggcaaggacatgacctcggtcccgattgagcggcgcaatgtcgggatggtgtttcaatcctacgcgttgttccccaacatgactgtggcggacaatatcgcctacgggctgaagatccggggcgttgcgaggagcgagcgtgccgcgcgggttgccgagctggtggctctgaccaacatcacgggcttggagaaccgccgcatcgaccagctgtcgggtggtcaacgtcagcgcgtcgcgctggcgcgtgcggtcgcgatccggcccggcatcttgctgcttgatgagccgttgaccgcgcttgatgccgccttgcgggaccggctgcggagcgaactcaaccggttgttgcgcgcactcggcattacgacgatctacgtcacgcatgaccaggcggaagcgatggaattgggcgaccgtattgtggtgatgcggaaaggcgcgatcgcccagatcggcacgccgcgcgaggtctatttcgcgccgaaggatcgctttgtggcggaattcatcggagcggcgaacatcgtggaagctccggtcgagaacggtttattgatcctgcccggcgggcgattgccgatcgagggtggtgcgacgagcgcgaacgcgacggtcatgatccgccccgaaaccattcgagtgacgagcgccggggcggaggcgctttcgggcgttgtcgattccgtcagcttcatcggcgaccggcagcggcttgtcgtgagtggtgcttcgagcaagccgctcaatgtcgacgcgcccaacacgattcaagccaaggtcggcgatcgggttggcctgtctatcgcacccgacgcgcttcgtattctgccgtccgaaccctgagatccatcgatgccgtcgaagcccaccctcatcgcccagatatccgaccttcacatcaagccgccgggagcgttggcctatggccgggtcgataccgccaaggcgcttgaacgctgcgtggcagcgctcggcgcattcgagccggcgcccgatttcgtcgtcatctcgggcgatctggtcgatacgccgtcggtcgaggaatacgactatctcaaacaattgctcgcgccgctgcgcctgccgtttgccggcattcccggcaatcacgactcgcgcgaatggatgcgcgaggcgtttccttcggcgccttatgttcacgcgacgggcccgctcgaccagaagatcgaggtcaacggtctcgatctcctgctgctcgattcaagcgttgccggtaagcctcatggcatgctcgaagcgtccacgctgcaatggctggacgcggcgctggcggcggcagtcgaccggccggcgctgctctttctgcaccatccgccattcaagggcggcatctggcacatggaccggcaggacctcttcaatgccgacgagttggctgccatcgtcaagcggcacccgcgtgcgcggctgatcgcgtgcgggcacgtccaccgtgccatgctgaccaccttcgcggggattgccgtgacaatatgccccgcgccgaaccatgcggtcgacctcgacctcggacagctccgcgaaccatcgttcaaggtggaaccgccggcatttcacttgcatagctggtttcccgggcaggatttcgggcaggtggtgacgcaccaggttcccatcggccagtttgacgggccgcacccgttctttgggccggacggcaagctgttgtgagttggcggcgtcgaccccgacacagcgggttctgcgcggtgagactgtcgttgctggaccggatattccggatcacgggcggccctgcctacaattgagcgttgcataggcacgcatttattccaaattgtagcttggatgccttctatcccgatgccgccggctcggaccttatgttgctgtaggccggcggtggggttatagtcctttccgatttcattgatcgatggctatgtcggagtcgcgctgttggcgcgccgattgaacgcaacaatcagtctggatcacgatgaccagtgcgccgcccattgaacgaactgccggcgcgccgttgttttcgaacaacaagctatcggtgctgcgcaagcatccctatttcgccgacctcgagcccgaagcattcgatcagctctgtcgttatgccaagcacatcacgctgaagcgcggcacggcgatcttctccaagggcgatccgggcaccagcctgatcgcggtgatctcgggtacggtgaagatcagcatctcgtcgccggatggccgcaacgccattctgaacttgatcgaggcgggagagatattcggggagatcgcgctgctcgacggtctgtcgcggacggcagatgccaccgccaacaccaattgcgagctcttcgtcatcgatcggcgcgagttcattccgttcgtgcgcagccagccgtcgcttgcgatgaaattcatcgagctgctgtgcgcccgactgcgctggaccagcgaccaggtcgagcaggtgatcctgcaggacctgccgggccgactggcgagcgcgctgctgcgtctcagcgacaagcacaagccgcaaggtcgtaccatctcgatcacccagcaagagatcagcgagatggtcggcatgacccgcgagagcatcaacaagcagctccgcgcatgggcgacacgcggttgggtcaggctcgagcatggcgcgatcgtcgtgctgaagcccgagtcgcttcaggcgctggtcgacgccggggctgatgacggcgagtagccacgccggctgccggggtcagctccgcacttcacgaaatggtgagccggacaaggcctgtgaaaccattcacatcggccttgcgtgccctgcggtaagtgaccctcggtggagcacgtccgcattgtggaggaatccatgcagggctctttcgacaaccgacagcaggaccccgagagcaattacgggagcttcagcatcaagctgattgcattgccggtgctgctggtcgtggcgttgatcgggatgctggtcagtcaccccgccgcggtcaaatggatttcggatgtggcgcaagcggagttcgtcggaactgatgccttcgacaccaatccaccgcccaggattgcgcagccggcgcccgcggccttgccgcgcacggtgaaggccaactgatcattgctgtcgtcgccgcggatcagggcgacgacgatagtcggccaacgaccggcggccgtcgtcacgcggcaacgccgagtagcttcgccgcggtccggccgagaatgttggccttgtcatcatcgctcagcgacgagcaagcgaagatgtggtcgactggcgcgagttgccatggatagggatagtcgcttccgagcacgatctggccggcgccgacctgcgcggcgaggtgccggatcgcctccggcgtgaagatcagggaatcgaaatagatctgcttgaggtattcggtcggcgctttcttgagcttgatctcgggattgcatcccttcgggccgaccaggcaggcatggtccgagcgatccgcgtaggaggggaggtagccgccgccatgcgcggcgacgatcttcaatcccgggaagcgatcgagcgtcccctcgaagatcaggtgggagagcgcgatcgtggtctcgagcggattggcgatcgtgttgccgagccagccattgcccgagagccgcttgttgagctcgggcacgccttgcggatgaatgaacagggggacacccagttcctcggccttggcccatatggggtgaaacttcggatcggagaactcgacgccgtcgacgacaccgccgatcgccgcgcccttcaggccctgcttcttcacggcgatctccagctcctgcaccgcaagatccggcgcctgcagcgtcagcgaggcgaaagccgcaaaccggtcgggcttcgaggcgcagagttcggcgagcttttcgttctggattttcacgatcttgccggcaagctcgcgatcgcggtcgtaccagaacggattgatcgagagcacctccatgtcgacggcctgcgcgtccatcgctgccaggcgcttgtcgatctcgatgaaggcttcggccgcgccgttgaccggcggcacttgcagtctttcggcgtcggcgccgagcagggcgcccgcctcgcggaagtggcaatgcgagtgaatgtcgatcgtcctgacgcgcttgccatcgacgctgaccggcagcttctgccgcgacggctgtgcattcgcgttgtggacgagcccgcagccgcagaacacgatgcctgccgccgcatttgctcccgctttcaggaaatcacgccttgttgtcatgacgatcgcctccctgtcttttttgttatggagcggcgagcgtaggcatggcggcgagcggtcgcaaggtcacacgctgtgcgtgtcgcgcaatgttgatctgctcagatcggtctttgtgccagggcgacagttccgctcgcattcagtgcaggacctgaagctgccgcggcagccaaagcgagatttcggggagataggtcacgcacatcaggacgaagaacatcaccgcgtagaacggccagatcttgcgcatgacctgctcgatcgtgactttgcctactgcgcagccgacgaacaggatcgcgccgaccggcggatggcatagcccgatgccgagattgagcagcatgatcatgccgaaatggaccggatcgacgccgaagttcttcatgaccggcagcaggatcggcgttgcgatcaggatcgacggcgccatgtcgacgagcgtgccgagcaccagcagcaggacgttgatcaggagcaggatgacgtacttgttgtcggagatcgacaggaagaaggcggtcatcttggccggcatctgggtcagggccatgatatagccgacgcttgaggcgcaggcgatcagcgtcatcaccattgcgacggtgcgcagcgtgcgatgcagcagcaccggcaggtcgcgccagcgatagtcgcgatagatgaacatggtgacgaagaaagcccagatgcaggcgatggcgccggcttcgatcgcggtgaagatgccgccgagaatgccgccaaggatgatgacgagggtgatgagaccccaggaggcatcgatggcgatccggattgcgtccttggccggcacggtctggccgtgcgggtgcttctcgcgataggcgacggcgaggcacagaatgatcagcgagaagccgagcagcagcccggggaacacgccggccatgaacagggcgctgatcgaaatcgttccgccggtcgccagcgagtagagcaccgcgttgtggctcggcggtaccagaagggcctgaaccgacgaggtgatcgtcaggttggtcgcgaacacgcgcggatagccgttctgctccatctgcgggatcatcaccgagccgatggcggatgtatcggcgacggccgatccggaaattccgctcaggaaggtcgtcgcaagcacgttgacgatcgagaggccgccacgcagacgggtcagtccgaccagcacgtcggcaaacgcgaccaggcgccgggccatgccgccctccgccatgatcgcgccggccagcacgaagaacgggatcgtcagcatggcgaccttgctgaccccgtcggagatcttcagcatcaccgcttcgagcggaatgccgatccacagcgcgccgacgatggccgccatcgccagcgagtaggcgatcggcatgccgatcaggaagcaaagcagcatggtcgcgagcaggatggagatgtccatggtggcgtctcgcggtcagtcgatcgatgcttcgcgatgcgcgccgatcggatcgagcggtgcaccgaggaagattcgttcgatgatgaacagcagcaggcagcaaccgccgatcggaatcgggagataggtgacgccgaccgagaggaacgggaagtcggcaatcgtgttgtgccaggtcacctcgaccagccgataaccccagatcatcatgaacagcgcgatcagccccatcaggatttgcacgacaaggtcggcgagcgaccggagcggagccggcagcttgccggcgaaatagccgacgttcatatgcagattgaggcgatatcctgcggccgcgccgatgaaggtcacgacgatggtgagcagcaccgccagcggttcgggccaggaggcggcgctgttcaggacatagcgcgtgaacaccgcccatgggatgaccgctgatatcaggagcagcgccgcggagcccgtgacgacgcaggcaagatacagatagtccatcgcgcgacgatatgatccagccatgtcgtgtcccgtaagatgtcgatgtcctgtgcggtgccgtgtcaggcagcctggatgcgcccgatcatgtcctggtatttcgggccatatttgtcccagaccggcttgaccgcgttctggaatggcgccttgtcggcgatctcgacgatctcgcagccggcggctttcgctttctccatcgcctgctgctcgtagatattccagagcccgcgctcttccatctgcgcctcgcgggcgagcttcctgatcagcgtctggtcgtccgccgacagcgccgaccaggctcgtttcgagaataccagcagctcgggaacgatcaggtgctcggtgagcgaaaagtgcttcgctgcggtatagtgattgctgaagacgtagctcggcggattgttctcggcgccgtcgatgacgccggtctgcaacgcgctgaacacctggtcgtagcccatcgcgacgccgttgccgccgagcgcattcatcatgtcgatgaagatcggattgccgatgacgcggaatttgaggcccttgacgtcggcgatcgtcttgatcgaatgcttggtgttgtagaggctgcgcgcgccggaattcatccagcacagtgcgaccagcccggcattcgggctcgccgtgatcttgtccagcaactcctggccgagcgggccatcgatcatccgctcggcatgcgccatgttcttgaacaggaagggcatgttgacgacgttgatgtcgtcgacgatcgggccaatcgagcccgcgctgacgcgcagcatctggatcgcgccgatctgagtctgctcgatggtttccttctcgccgccaagctgcatcgaggggaacatctgcagcgacaggcggccgttggtcgccgccgcaagcttcttgccgagattttccgtcgcgaccacggtcggatagcccggcggttgcacgtctgacgccttgaagaccgctttggactgggcaagggcggtctgtgccgacgtcgcaacgatcgcgcccaggccggcgccgatcttgatgatgtcgcggcggttgagtccggcaccgccgtgctgcggtcgttctgtacggttcatttcatctcctcccaaaaatgcttggccggagtccggccgcggtcatgccggctggctttgcgcgtcgaagaactccggattgttgtgctgggtggccgagatgtcggccagcagccgttcgaggtgcctcgccatcgcagctccggcggatgcggggtcgcgtgcctcgatcgcggccatgaccgcttcgtgctcggcaatgacctcggtcatccgcccacgctgcggcagcgtcagccagcggaagcggtcgacgtgaaccttgacctgcaggatcagtttccagatgccggggtgcccggcaatttcggcgatggcggcgtggaaggcctcgtcggcctgatggaatgcctcgcgctcgccggccttgtcggcctcgcgctgacgttcgaggatcgcgtgcaggccgaggatctggctggtgctggcgcgctcggtcgccatacgggtcgtggtttcctccagcgacctgcggacgatgatcgcctccgggagcgcggcgagcgggatgtgcgacacgaagattccggattgcgggaaaatctcgaccagaccctcgtccgccaggcgcaggatggcctcccgtaccggcgtccggctgacgccataagagcgcgcgatctcggcctcgatgatcggatcgccaggcctgcgctgcagggagacgagctcggcgcgcagcgcggcatagatccgcgccgccgccgtcgcggtccgcgggcggccggtccgccggtggccggtgaggttgcggagctccgactttttcggcgaccggccggccattcatgctcccaatattgatatattagtatatgaagtgatcacggaaggcaaaccggcgtcgttcgcatcccgggaggtcacatgaccgacggccgcaagccgttcgatctcaccggcaagatgatccggaaaagtggaaaccggtttcgaaaggatcgtgctcagacaagaagtgagatcagaagtctggctgtaacctgacggctctgtcgatgactgacgctgtcttcacgcatcggaatatcggcgggaagacggtgtaccaacttcgccggacgagcatcgcgatgccgatggacagttcgcgagcttccgggtctggctgtcgatcattgcctacaacaccagtctggtgaaggccgaggaggcgccgaagagctctgccgatctgctcgatccgaaatggaagggcaagatcgtccaagcgcatcccggctacagcggcaccatcgcatcttccgggtttgacccatggttgaggtcggtagccgagcattgagcgttcgacgcatggcatatgctcggttttcgcccggactgggtcaataatgcctctcggcggggcgggtgtttgatgttacgaacttggcatgaaccagcatgccaaagtcgacatccgccattccacctgcccgcacgactgcccctcggcatgtgcgctcgacgtcgaagtgatcgacggacgttcgatcggcagggtgcgcggctccaaacagcagacctatacggccggcgtggtctgcgccaaggtcgcacgctatgccgaacgcattcatcacgccgagcggctgatgtatccgctgcgccggaccgggccgaagggctccggccagttcgcgcggatttcctgggacgcggcgctggacgagatcgcggcgcgcttcgatgcggccgaacgcgagttcggcgccgagtcggtctggccttattactacgccggcaccatggggctcgtgatgcgcgacggtctcaaccggctgtcgcatgtgaagaagtactcgcgcttctacggcacgatctgctcaaccatcgcgcgcatcggcttcacggccggcaccggcaagatcgccggcgtcgacccgcgcgagatgggcgtctccgatctcgtcgtgatctggggcaccaatccggtgaacacccaggtcaacgtgatgacgcatgcatcgcgcgcgcggaaagaacgcggcgcgaagattgcggcggtcgacgtctacaacaacgaaaccatgaagcaggccgacatcaagatcctgctgcggccggggaccgacggcgccttcgcctgcgccgtgatgcacgtgctgttccgcgagggatttgccgatcgcgattatctggcgcgctacaccgattgccccgacgagctggaggcgcatctcaagacccgcacgccggaatgggcgtcggcgatctcgggcgtgccggtcgcggagatcgaggccttcgcgcgactggtcgggaccaccaagcgctccttcttccgcctcggttacggtttcacccgcagccgcaacggcgccgcacagatgcacgccgcgctgtgcattcccgcggtgaccggcgcctggcaatatgaaggcggcggcgcgttcttcaacaatgccgggatctggcgcttcgacgaatccatcattgaaggccacgacgcgatcgatcccacgacgcgggtgctcgatcagtcgaagatcggccgcatcctgaccggcgatgccgaggcgctgaagggcggcgggccagtcaaggcgatgttgatccagaacaccaatccgatgacggtggcgcccgagcaagggctggtgcgccaggggttcgcccgcgaggatctgttcgtcgcggtgcacgagcagttcatgaccgagacagcgcagatggccgacatcgtgctccccgcgacgatgttcatggagcacgacgatctctactacggcggcggccatcagcacatctcggtcggcccgaagctgatcgatccgcccggcgagtgccgctccaaccacgaggtgctgcaagggctcagcggcaggctcaacgccgtacatcccggctttgccatgacgccgcgccagctgatcgatgcgacgctgaagaaaagcgggcatggtgatatcgacacgctcgaggccgagttgtggcgcgacctgcagcccgatttccgcgcctcgcattatctcgacggctttgcgcatgcggacaagaagttccacttcaaggtcgattggggcaaggtcccggtcgggtcaggcgggctgatgggcgcctgggacaagatgccctcgctgccggatcactggaccatcatcgaggaggcggacgcgcagcatccgttccggctcgcgacgtcgccgtcgcgcagcttcctcaacaccagcttcaacgaaacgccgtcgtcgcaggcccgcgagggcgcgccgacggtgatgattcatcccgacgatgcggccgcgctctcgatcgcggacggcgatgccgtaacgctcggcaatgcgcgcggtgagaccacgctgaccgcaagactgttcgatggcgtccgccgcggcgtgctgatcgccgagtcgatccatccgaacaaatcgcatatcggcggtcgcggcatcaacatgttgacaggggcggaagccgtcgctccggtcggcggcgccgcgttccacgacaacaaggtctggatcaggaaggcgcccgccgtcgcataatcctgcttgcagtcggcgccgatcctgccgcaaatgtcggcaggaaacggcgtacaaggcaggaaacatgaccgacaacagcgttcttctggaaaagcgcgggcaggcgtactggatcaccatcaaccgcccggacaagcgcaacgcgctcaatggcggtgtgatcgcgggcatcgccaggggctatcgcgaggcgcatgacgacaaggacgtgcgcgtcatcgtgctgaccggcacgggcgacaaggcgttctgcgccggcgccgatctgcagaacagcggcgcggcattctcgatggatttctcgcggccgaatgtcgactacgccgacctgctccgcctgtcgcagaacgcgaccaagcccgcgatcgcgcgggtcggcggcgtctgcatggccggcggcatgggcctgctgtgcatgaccgacatggcggtcgccgccgatggcgtgatcttcggtctgcccgaggtgaaggtcggtgtgtttccgatgcaggtgctgagcctgctgcaatcgatcgcgccgccgcgtctcgtcaatgaatggtcgctgaccggcgagccgttcgatgccaaagccgcgcaggccgcgggccttctcaactacgtcgtgccggcggccgagctcgatgccaaggtcgactggttgatcggccgcatcgtcgacaagtcgccgaccgcgatccgtcgcggcaagtacgcgatgcgcgcgatcgcttcgatgtcgttcgacgaaagcatcgcctacaccgaaagccagatcgcgctgctcgcgatgaccgaggacgccaaggaaggtctcaaggcgttcggtgagaagcgcaagccgacctggaccgggcggtgaggcatctattccagaggcggtcgtgcggcgtactgggtcgcccggtcgagccgggcgacgacaacgtggatgaggacaaagcttcacatcctcgcgggcgcagtatcaaaatcccgaaaacaaccccatgcaaaggagcgggcagcggccggcgttcggcaagtcacttgacatgccgggcaactcaggggtatatttctaatattccgaaattgcgcgcccggtcgcgtatcagcccgcgttggccttcaggccggcggcctcgatccccgcgacggcgcagatctcgtcattgtccgaggtgtcgccgctgacgccgacagcgccgagcagggtggtgccgtccatgatcagcacgccgccggggaccggcaccagccggccctgcgccagcgtgttcacggaatcgatgaaataggcctgctcctgcgcgcgctggaacagcgcccgcgatcccatgccgagcgccagcgcgccataggccttgccatgggcgatctcggcccgcatcaggctggtgccgtcctgcgccgccgtcaccttcaccgcgccgcgtgcgtcgaggatggtgaccaccagcggcttcagcttcttctcgacgcccttggcgagcgcggcatccagaatcttgcgggcagtgtcgagagtgagctcagccatgggcctgttcctttgtcggtaatgatctgctggaattcgacttcgcacgtttcaggctgatcgccaatacgctggcgacatgcagcggcgtgcggccgctgccgtccttgatctggtgccggcaggaggtgccgtcggccacgatcagcgtgtcctgatcggcgctgcgcaccgctgggagcagcgacagctcggccatctcgatcgaggcctgataggtgtccgcgccgtagccgaacgcgccggccatgccgcagcagctcgactcgatggtcttgacctcgaggccaggcacgaggcgcagcaccttctccaccggcttgaacgcgccaaaggacttttgatggcaatgcccgtgcacgaccgcctttgcagcaacggcgccgagcggcagcacgaggcgtccagcctcggcctcgcgcaccaggaattcctcgaacagcaaagcgtgcgcgctgacgctcttggcggtgtcatcggaacgcagcgacagcagctcgtcgcgcagggtcagcaggcagctcggctcgaggccgatgatcggcacgccgcgcgctgcgaacggcgcgtaggtcgcaaccagccggtcgagctcggtgcgggcctgatcgaccagtccagccgacaggaacgtccgtccgcagcagggcggccggccgccgtccgatggcttcggcagatgcacgcgatagccgccggcgaccagcacctcgatcgccgcgtcgagattctcccgctcgtaaccgcggttgaacgtatcagcgaacagcaccacttcgcggccatcaggcgcgccgagcacctcggcgtcagagcggaacgtatcgctgcgaaacgccggcagcgcccgtttggcgctgatgccggcgagcgtctcaaacaacgtgcgcagcaacgggcttctgttgcgccagttcgcgatcggggcgaagcgcgaggcgagatcgaggtagcgcggcagatacccgaccagccggtcgcgtaccgacaggccgtgggtcgcggcgcgtgccgccagcacctcgatcttcatcttggccatgtcgacgccggtcgggcactcgtggcggcaggccttgcaggagacgcagagtttcagcgtgtccatcatctcgtcggaggaaagcgcgtccgcacccaactggccggagatcgccagccgcagcgtattggcgcggccgcgggtgacgtccttctcgttgcgggtcgcgcgataggacgggcacatcacgccgccttcgagcttgcggcaggcgccgttgttgttgcacatctcgaccgcgccctggaaaccgccgccggcgccgggataggccgaccagtcgagcaccgtcttcaattcgccgacgcgatagtccggcgagtagcgaaacagcgatcggtcgtccattttgggcggatcgacgatcttgccggggttgagcgtgttggtcggatcgaagcgctgcttgacctcgcggaaatcggcgacgatgcgcgcgccgaacatggtctcgtggaattccgagcgcaccaggccgtcgccatgctcgccggaatgcgagcccttgtattcgcgcaccatcgcgaaggcttcctcggcaatggcgcgcattgccttgacgtccttctcgagcttgagattgagcaccgggcgcacatgcaggcagccctcggaggcgtgcgcatacatcgtgccgcgggtgccgtgcttcgcgaagacggcattgagccgttcggtgtagtcggcgaggtgcggcagcggcaccgcgcaatcctcgacgaacgagaccggcttgccttcctgcttcatcgacatcatgacgttgaggccggcggcgcggaaatcggcgatgccggtctgcagcgcgggctctgttatctcgaccacgccgccccatttgcgctgcggcttgtcccagccgaagccgagatcgcccatcaactcgccgagctgcctgaggcgggcgagattgtcggcctgatcttcctcggcgaactcgaccaccaggatcgcgtcgggatcgccgcgcaccgccgccgagatgatcggctggaacatcgcgatctcgcgccccagcgcgatcatggtgcggtcgaccagctccactgcgatcggccgcagcttgaccagatgctgggccgcgtccatcgcctcgtagaagctgccgaaatggcagacgccgagcaccttgttgcggatcacgggccacagcttcaactcgacctgcgtcgtgaaggcgagggtgccttccgacccgaccaacagatgcgccagattgttcggcgtgttgcgcggcaccagcgcatcgaggttatagccgccgacgcggcgctgcaccttggggaatttatccgagatctcgagcgcctcgcgctcgccgagatcgagcatgtcgcggaacagcctcaagccgctgtcggacgcattgacccgggtcaggtcgcgcggcacttcgccgaaatgcagcagcgtgccgtcggcaagcgccgcatccatggacagcgtgttgtcgcgcatggtgccgtagcgcaacgagcggccgccgcaggaattgttgccggccatgccgccgatggtggcgcgcgacgcggtcgagacgtcgaccggaaaccacagcccgtgcttcctgagctgacggttgagatcgtcgagcacgatgccgggctcgaccacgcaggtccggttctcgacgtcgagcgagatgatcttgttcagatgcttcgacaggtcgaccacgatgccgtcattgacggtctggccgcattgcgaggtgccgccgccgcgcggggtcacgatccgcccggcgtcgcggacgatcgcaagcgtgcgcagcgcctcgtcgacggttcgcggcaccaccacgccggccggcatgatctggtagaacgaggcgtcggtcgcatagcggccgcggttgaaggcatcgaaaaagacgtccccggtcaggtcggaccgcaggcgctgttcgagcgatgaggcgttcttcatcccggatccaatgtgatccatggcgcaaccaaatgttgcccatggattattcattcagttgagatcagagttacattatgaatgcaaaatgagcaaggctagctgccttgaggcgcttccccaggggcgctgtcgtgcccctccgcgaggtgctcgatggcggcgccccgcttgttgcgcaggtgctggaacaggatgtcgctgagctcgctgccggcgcggcggcgcagcgcgtcaaggatcgcctcgtgctcgcgcatcgcctcggcccagcgttgccgcttgcgggcgaaattggccgaatagcgcacgcggcggatccggccggcgaagttggcgtaggtcgtcttcagcgtcgcgttgcgcgcagccgcaacgatgctctcgtggatctgctggttggtctggaaatagccgtgcatatcgcggtgcagatagtggccgtacatctcgtagtgcagccgctcgatcgcagcgatttcctcgtccgtgatggcctcgcaggccagtcgtccggcgaggctctccagcccggccatcacgtcgaacaattcctcgaggtcgcgctggctgagttggcgcacccgcgcgccgcgattgggcaacagctcgatcaggccttcggcggccagcaccttgagtgcctcgcgcagcggcgtcctggagatcccgagcatttcgcagagctggcgttccggaacgcgggcgccgtcgggaatgttgccttccaccacgtagtcgcgcagccgcagcaggatctcgccgtgcagcgaggcctcctggcggtcgctgccgttgccggcggcgggtggggtgatcggaaccccggtttcgggaatcgcagatttcatattctgaacaatagtttgccgtcgtggtcgcgtcgatgcgctcaatagaataccaaaatgggattgaaaatacaaaaaatgaatgcaaaatggttgcagaacggccgacatccggcgattgggaggttctgatgcatcaagggcgccattttctgcagattccagggccgagcccggttccggatcgcattcttcgcgcgatggacatgcccgtcatcgaccaccgcagcgccgagttcggcgagctcggccgcaccgtgctcgagggcagcgccaggatcttccagaccgcagggccggtggtgatcttcccgtcgtcggggaccggcgcatgggaagctgcgatcgtcaacaccttgtcgcccggcgacaaggtcctgatggtcgagaccggccacttcgccaccctgtggcggcaactcgccggccgcttcggcatcgaggtcgacttcgttcccggtgactggcgccgcggcgccgatcccgcccagatcgaaacaaaacttgccgcggacaccgcgcacagcatcaaggcggtgatggtcgtccacaacgaaacctcgaccggcgcgaccagccggatcgccgatatccgtgccgccatcgaccgcaccgcgcatccggcgctcttgatggtcgacaccatctcgtcgctgggctcggtcgactaccggcacgacgagtggaaggtcgatgtcagcgtcagctgctcgcagaagggctttatgttgccgcccggcctcggcttcaatgcgatctcggaaaaggcccgcgccgcgtcgcgtagcaacaagatgccgcgctcctatttcgattgggaggagatgctgaagccgaatgccaacggcttcttcccctatacgccggcgacgaacctgctctacgggctgcgcgaggcgatcgcgatgctgctggaggaggggctcgacaatgtgttcgcgcgccatcagcggctggccgcggcgacgcgtgccgccgtcaatcattggggactcgaggtgttgtgccaggagccggccgagttctcgccggtgctgaccgcggtgttgatgccgcccggccatgacgcggaccagttccgcaaggtcgtgctggacaatttcaacatgtcgctcggctccggcctgtcgaaggtcgccggcaaggtctttcgcatcggtcatctcggcgaatgcaacgagctgacgctgcttggcgcgctcaccggcgtcgagatgggattgtcggtcgccggtgtgccgcatcgcgcgggcggcgtcgcggtggcgatgaagctgctcgagcagcgcgaccagcgcaatgcgtcgtcacacctgaaagtcgtcggcacctagcgacaccaacaaccaaaatcgcagaccagggaggggatatgaggcttcggttcaaggccacccatgtcgtgttggccatgctctgcgtgatgtatttcatcacctatgtcgaccgcgtgaacatcggcaccgcggccggcgagatccagaaggagctcggcctgtccaacaccgagctcggcctggtgttctcggcattcgcctatccgtacctgctgttccaggtgatcggcggctgggtcggcgatcgcttcgggccgcgccagaccctgttctggtgcggcatgatctgggctgcggcgaccatcatgaccggcttcgtccatggtctcgtggcgctgttcgtcgcgcggttcgcgctcgggttcggcgaaggcgcgacgtttcccaccgcgacgcgcgccatgcagtactggacgccggcgaaccgccgcggcttcgcgcaaggcttgacacattcgtttgcgcggctcggcaatgcggtgaccccgccggccgtcgcgcttctcatcctctggctgacctggcgcggcgcattcgtggtgcttggtatcgtcagcctgctgtgggggattgtgtgggtttggtacttccgcaacgagccgaaggaccatcgctccatcaccgaggccgagcttgcgaccttgccgccgcggccgaaaggcgagcggccgaaagtgccgtggggaccgctgctgcagcggatgtggccggtgacgctgacctatttctgctacggctggtgcctgtggctctacctcaactggctgccgctgttcttcaagaacaactacagcctcgatctgaagaactcggcgctgttcgcctccggcgtgttcttcgccggcgtgatcggcgacagcatcggcggcgtcatctccgaccgcatcctcgagcgcacgggcaatctgcggctggcgcggctcagcgtgacggtcgtcggcttcgccggagcgctgctgtcgctgatgccgatcctgttcgtccacgacatcacgctggtcgcgctctgcctgtcggccggcttcttctgcgccgagctggtgatcggcccgatgtggtcgatcccgatggacatcgcgccgaaatattccggcaccgccgcggggatcatgaacaccggctcggccttcgccgccatcgtctcgccgctggtcgccggcttcgtcatcgacgccaccgggaactggtacctgccgttcctgatgtcgatgggcctgttgctgctcggcggcttctcggcgttcctgatgcacccggagcggccgttcgaggagacgggcggaggggtgacggcgggcaaggtggtggccgccgggtgagcggctgccggtgcgggtggagcgccgtcagatatgcatgacggccccccgcccggccgaggacaaacccggcgaatagtgatatgcgagcggctcatcacgaccaagacaagaccgggaaggacgcttatgaccgtgcatactggaaggcattttctgcagattccgggaccgaccaacgtgccggaccgggtgctgcgggcgatggacatgccgaccatggatcaccgcggtgccgaattcgccgagatcggctttgccgtgatgtcggcgatgcagcgtgtgttccgcaccaagcagcccgtgatcatctacccctcgtcggggaccggcgcctgggaagccgcgatcgtcaacaccctgcagcccggcgacaaggtactgatgtgcgagaccggtcagttcgcggtgctgtggcacggcatcgccgacaagttcaaactcgacgtcgacttcgttccgggcgactggcgccacggcgccgacctcgagcagattgaggcgcggctcgccgccgacaaggcgcacaagatcaaggccgtctgcgtggtccataacgagacctcgaccgcctgcgtcacctatccgctcaacgtgcgcaagatcctcgacaccctgaagcacccggcgctcttgatggtcgacaccatctccggtctcggctcgctggaatatgagcatgatgcctggggtatcgacgtctcgatcgccggctcgcagaaggggctgatgctgccgcccggcctcggtttcaacgccgtgtcggagaaggcgctcgcggtggccaaggccaacccgggcatgcgctcctactgggattggcaggaggtcatcaacatcaacaaggccggcacctggccgtatacgcccgcgaccaacctgctgttcggcctgcgcgaggccgtgaagatgctggaggaggaggggcttgagaacgtgttcgcccgccacaagcgccacagcgaagcgacccgcgccgcgatcaaggtctggggcctggagacgcagtgccaggagcagggcgcgcattcgccggcgttgacggcagtgcgggtgcctgacggccacgacgccgaccatttccgcaaggtcgtgctggataatttcgacatgtcgctcggcaccggcctcaacaaggtcaagggcaaggtgttccggatcggccatatcggtcacttcaacgacctgatgctgatgggcacgctgtcgggcgtcgagatgggtcttgatctcgccaaggtgccgcatcgcagcggcggtgtgctggcggcgatggacgtcctcaagggacgcgacgccgcgcaggcgtcgaaagtcgcttgagagggccttggtctcaaaatcaaatcgtaacgaacagaaagagcgagacatgaacgcgcccgtcacttcgaccgaagacctgatctattccgtcgaggacgggattgcgcgcatcaccttcaaccggccgcaggcgcgcaatgcgctgacctttgcgatgtatgagcagatggcctcgatctgcgagaacatcaatcaggatcactccatcaaggcgctgatcctgaccggcgccggcgacaaggcgttcgcctcgggcaccgacatctcccagttccgcgcgttcaagaccgcgcaggacgcgctggattacgaggcacggatcgaccgcgtgctgggtacactcgaacagtgccgcgtgcctgtgatcgccgcgatcgccggtgcctgcaccggcggcggcgccgggatcgccgcctgctgcgacatccgcatcggcaccgaggcgacccggatcggcttcccgatcgcgcgcacgctcggcaactgcctctcgatgtccaacatctcgcggctggtgtcgctgatcggtccggcgcggaccaaggacctgatcttcaaggcgcgcctcgtcgaggcgccggaagcgctggcactcgggctgttgaatgaggtcgtccccgatgtcgagaccttgcagcgccgcgccgatgagaccgcgaagctggtcgccggccatgcgccgatcacgctcgaggtgaccaaggaagcggtccgccgcatccgccgcacgctgtcgcgcgacgagggcgaggacctgatcctgcgcgcctatatgagcgaggatttccgcgagggcatggacgccttcctcaacaagcgtgcgcccaacttcaagggcaagtagcggcggcgtctccgctccgctcttcatcccagccacaactgtcatcgccccgggcgatgacaccgcgtgttggcatcgtgaaccgtcctcatcgtcgtcccggcgaaggccgggccccataaccacagatggtgattgttgtctgatggtggaacgacgagtcccatctacaacatccgccgcggcgtatgggtcccggccttcgccgggacgacgatggtgtatgcggccggctgtgagactcggtccgctcacgttcctcattccaaagtcatacgccatgcgacggttcggcggcttgaactcacttcttttctcggcacaatgaccgcacccgccgcttcgtagcttttgccaagccgaacaaatagatagggaagaaacacgtgggacagattgtgaaagccacggctgccatcgcggccttgctcttgagcacgccggcatttgccggctgggagccgagcaagccggtcgagatcgtggttgcggccggcgccggcggcgcctccgaccagatggcgcgtatgatgcaggcggcgatccagaagaacaatctgatgaagcagccgatggtggtgtcgctgaagggtggcgcgtcgggtgcggaagcgctgatgtacatgaagtccagcgagggcgatcccaacaaggtgctgatcgcctattcgctgatctacatgctgccgctgtcggccaagatccccttcaactggcgcgacctcacgccggtgtcggtgatcgcgctcgaccagttcgtgctgtgggacaacgtctccggtccgaagaccgtgaaggagttcatcgatgccgcgaaggcggcgagcgcaccgttcaagatgggcggcaccggctccaagcgcgaggaccacgtgctgaccgtcttcatggagcagaagaccggcgcgaagttctcctacctgccgtacaagtctggcggcgaggccgcgacccagctggtcggcggccacaccgagtccaacgtcaacaatcccagcgagaacctcgaagtctggcgtgccggtcaggtgcgtgcgctctgtgtgttcgacaaggagcgcatctcctacaagaccaaggtcaccgagacgcaatcctggaacgatatcccgacctgcaaggaggaagggctcgacgtgcagtatctgatgctgcgcgcgatgttcctgccgggcaaggtgagccaggagcagcaggcattctatgtcgacctgttccagaaggtgacgcagacggcggaatacaaggactacatggagaagcaggcgttgaagccgatcttcctcaccggcaaggacatggtcgagttcctcgaggacgacgacaagcagaacgccacgctgatgaatgcagcgggctttgtcgcaaaatagcgcacgcggtccggaattggcttgcatgcggcggcggcgcggtgattactgcgccgcagtatggccggacgttcggctagccgtggagcgatcatgaccaaagccgtgttggggatcatcggcggatccggcatctacgatctgccgggcctggaaaacgtccgcgaggaagcggtcgcaagtccctggggcgagccgtcggcgccgctgcgccgcggcgagatggcggggttgccgatcgtgttcctgccgcggcacggtccgggtcacgcgctgtcgccgtccgacatcaactatcgcgccaatatcgacgtgctgaagcgggcaggggtcaccgacctcgtcgcgctgtccgcctgtggctcgttcaaggaggagctgccgccgggcaccttcgtattggtcgatcagttcgtcgatcgcacccacaagcgcgagagctcgttcttcggcaagggctgcgtcgcccatgtctcgatggcgcatccggtgtcgccgctgctggtgaagcatctcgcggccgccgccgaagctgaagccatcgcgttcgcacgcggcggcacctacctctgcatggaggggccgcaattctcctcactcgcggaaagcctgacctacaaggcgcagggctattcggtgatcggcatgaccaacatgcccgaagccaagctcgcccgcgaagccgagatctgctacgccagcgtggcgatggtcaccgatttcgactgctggcatccggcgcatgatgccgtgaccgtgcaggatatcatccgggtgctgaattcgaacgccgagaaggccaaggcgctggtcgcgcggctggcgcgggatttcccgcgcgagcacgagccgtgtccgatcgggtcggatcgcgcgctcgataccgcgctgatcacggcgcccgcggcgcgcgatctgcatctgctcgccaagctcgatgcagtcgccggacgggtgttaggcgcatgaaggtcgacggacgacattttcgcagcatctggctcgagcctgacggctggtcggtcggcgcgatcgatcaacgccggctgccgcacgaattcatcgtggccagactcacgaccgctgatgaggccggcgaggcgatcagctcgatgctggtccgcggcgcaccgttgatcggcgccaccgcagcctacggcatggcgctcgcgatgcgatcagatgcttccgacgcggcgctcgaccatgccggcaagatgctggccgcgacgcggccgaccgcgatcaatctgagatgggctgttgacgagatgcagcgggcgctcgcgccgctcgcggcgtcggcccgggtggacgcggcctacgcccgcgcccgcgcaatcgccgacgaggatgtcgagatcaaccgcgagatcggccgccacgggctcggcctgatcgaggcaatcgccgcgtccaagaagccgggcgagccggtcaacgtcctgacccattgcaacgcaggctggcttgcaaccgtcgattggggaacggcgacatcaccaatctaccaggcgcatgatcgcggcattccggtccatgtctgggtcgacgagacgcgcccgcgcaatcagggcgcctcgctcaccgcctgggagctcggtcatcacggcgtgccgcacaccgtgatccccgacaacaccggcggccatctgatgcagcaccgcatggtcgatctggcgatcgtcggcaccgatcgcgtcgccgccaatggcgacgtctgcaacaagatcgggacctatctgaaggcgctggcggcacacgacaacggcgtgccgttctatgtcgcgctgccgtcgccgaccatcgactttcgtatcgacgatggcatcaaacagatcccgatcgagcagcgcgcggccagcgaggtaacacacctaaccgggcgcacggcggatggacggatcgaaaccgtgcgcgtggttccggatggctcctcggtcgctaatttcggtttcgacgtcacgccggcgcggctggtgacgggtctgatcaccgagcgcggcgtcctcgatgcgaatcgtgctgcgcttgcgagcgcgtttcccgaacggtccagttagctgaaggctgcattgacggtgattgcatctgcgcgctatcccaatcgttgccgtcgcaacccagaccgtcgagcccatgtccaacaccgatcttgagatcgtcgtcgacgatccgaccgcgcctgaagaaaattcgccgaccgtcgtctcgaccggcttcgtcgacatcgtcgtctcgctgctgttgcttgcgctcgcattggtgctcggctgggacaattggcgcaccggcgcctcgtgggactcgaccggaccgcagccgggctattttccgttctacctctcggtgatcctcggcgccgccagcctctatggcctgggcgccgccttcgtgtcgcgccgggaggctgtcgagaccttcgtcacccgggcgcagcttcgccgggtgatggcggtgttcgcgccgacattcctgttctgcctcgccacgcaatatctcggcctctatgtcgcgagcttcctcctgatcgcgggcttcatgcgcgtcgtcggcaagatcgccctgtggaagtcgttgctcaccgccttcatcttcaccgccgcgatgttcgtgaccttcgacatcgcattcgatgtcatcatgccgaaggggccgctcgaagcggccttcggttactgagcgatcgacaggatttcgaaacatggaagctttcggtctcctgctgcacggcttcgccgtccttttgacgtggaagacgctgctgttgatgatggtcgggctcgtgctcggcatcttcgtcggcgtgctacccgggctcggcggcccgaacggcgtcgcgatcctgctgccgttgaccttcacgatggacccgacgtcggcgatcgtgatgctgtcctgcatctactggggtgcgctgttcggcggcgccatcacctcgatcctgttcaacatccccggcgaagcctggtcggttgcgaccacgttcgacggctatccgatggcgcagcagggcagggcggccgaagcgctcaccgcggcgttcacctcctccttcatcggttcgctggtcgcggtgctcttgatcaccttcctggcgccgatgatctcgtcgttcgcactgaagttcgggccgccggaattcttcgcggtctatctcctgaccttctgctcgttcgtcggcctcggccgcgaagccaagcacaagacggtcatctcgatgtcgctcgggctgctgctcgccggtgtcggcatggatacggtgtccgggcaattgcgcatgaccttcggctcggcggagctcttgcgcggcatcaacttcctcgtcgccgtgatcggcctgttcggcatcagcgagatcctgctcacgatggaggagcgcctggcgctgcgtggacacgccgccggcatttccctgcgcgtggtgctgtcggtgtggaaggacctgccgaaatactgggtgaccctgctgcgctcatcggtgatcggctgctggctcggcatcacgccgggcggtgcgatcgcggcttccttcatgggctataatctcgccaagcgcttctccaaggatcaggaaagcttcggcaagggccgcatcgaaggcgtgttcgcgccggagaccgctgcgcacgcgtccggcacctccgcgctgctgccgatgcttgcgctcggcattcccggctcgggcacggccgcgatcctgctcggcggcctgatggtgtggggcctcaatcccggcccgctgctgttcgtcgagcacaaggatttcgtctggggcctgatcgcctcgatgtatctcggcaacgtcgtcggcctcgtgctggtgctgaccacggtgccgatcttcgcatcgatcctccgcgtgccgttcgcggcggtcgccccgatgatcgtggtgtcctgcgcgatcggcgcctacgcgatccagaatgcgatgttcgacatctggctgatgctgggcttcggcgtcgtcggctacgtcttcaagaagatcggcatcccgctggcgccgttcacgcttgccttggtgctcggcagccgcgccgaggacgcgttccggctgtcgatgatcggttccggtggcgacatgaaggtgttctggtcgaacggcttggtcggcacgatcaccacactggcgatcttgctgctgttctggccggtgatcgatcgggccttcgccggcgtcgcgcgtctgctgcggccggcaaaggcctaaggcgtcaaacgaccttgcgctgacgtagctcggcgatctcgtcactgccgaaaccgaactcggccagcacttcctcggtctgctcgccgaactccggtggacgcgccaccatcttgctcggcgtccgcgacagcgtcaccggctggctgaccagctggatgtcccggttctcgtcgttcggcacgcgctgggccatgccgagatgcttgacctgggcatcctcgaacatctggtcgatcgagtagatcggcccgcacggcacgccggcggcattcagctcctgcacccaggtctcggtcgatttcttctcggtcagcgcgttgatccgcgcattcagcgcgtcgcggttcttcgagcgcgccggcgcagtcgcatagttggggtcggtgatcaggtcgggcgcgccgatcgcctgggcgcaccgttcccagatccgtccgcctgtcgtggcgatgttgatgtagccgtcggaggtcttgaacacgccggtcgggatcgaggtcggatggttgttgccggcctgcttggcgacttccttctccatcagccagcgcgccgcctggaaatccagcatgaatatctgcgcctgcagcagcgaggtctgcacccactggccttcgccggagacgtcacgttccagcagcgcggtgaggatgccgagcgcgcaaaacagccccgcggtcaggtcggcgacgggaatgccgacgcgcatcggaccttcgccgggcgcgccggtcaccgacatcaggccgcccatgccctgtgcgatctgatcgaagcccgggcgcttgtgatagggaccgtcctggccgaatccggagatgctgccatagacgatcttcggattgatctggcggatgctctcatagtcgatgccgagcttggccttgacgtccggccggaagttctcgacgacgacgtcagcctgctcggccagccgcttgaacacttcgagccctttggggtccttcaggttcagcgtcatggcccgcttgtttcggtgcaggttctggaagtccgatcccccgcgcgggccgcccggctgctcgccgccgccgtcctccagcagcgcatcgatcttgatcacgttggcaccccagtcggcgagctggcgcacgcaggtcggcccagaccggacccgggtcaaatccagcacggtgaagcgggacagggcttgggatgcgcggggaaagggcattgagacacctcttgtttggcgggccgctctggggcttcggtcactctgacttagacaatttggcaggcctttccaaccgttacccggacaacaaaccggaactggaagcaaaccggcatggttccgccgagatcggccctgcctcggcggcccgtttcggccggtccgacgtgtgctcgcggccccgccgtccgccaaccctcgacaatcactccgccggctgctagcccgtcgccaagccgagtgggttttgcccttttggaagaggcacttgaggcgtatcgaagcgatggaccgaaagcgggcatagcggtgaagaggggtccatcccatctgctcggtaactcggcatggaatgcgaccgcgtttgcggtcgcggttctgctcaatctggcgattctcccgttcgtgattctccggctcggccttgccgcgttcggcgtcgcgggtttggtgaccgcctgtgtcgcgccggcgctgatgttcagcaatgcgcttggcctctcgaccgcgcgcgaactcgcgcaacggctggagccgtccgatcgcgacgcggcacggcggtttttcgcgaccgcccttgcgctcgccgtagccgggggcagtgtgatcgcggcattgcttgcctttgccggagcgccgctcgcacgattgggatttcacctcggaggtccggccggtgacgaccttgggcttgccttcgcgctggccggcgccggttggctatgccagtgcctgttcgcggtcttccagtcgctattcacggcacgtcaggactatcggcggatcgcggcgatcagcatcaccggcacagtggtgacgacgatgtcgatgctgctgctgatcccccacgcgccgcgcgcctcgacctttctcggctgtcaggccctgggctttgcgacaaatctgctgatggctctcgcttggtcgcggctcgccatcaacgattggctagcacggccgacgctcgatcaaggcgcgctgcgggcattggtcaagcttggcggctggcaggtcgcggcacaaagcggcgcgctgttctcaggtcaggcggaccgctatctgctcggcgtgctgctgcagccgcaattcgtcggcttttacagcgtcgcgcagcggctggaggaggcggtctatatcggcgtgctgaagatcggcgagatcctgttcccgttcttcagcacgctgcagaaggaggatgacgaccgcaaggtcgacctcttgctgcgctcgtcgtggattctcaacgtcctggccgcgagcgcgctgggtggtctgatcccggtcgccggtgcgttgctgtatcgatggaccggcgccgaagtcgccgccgaggcgcagctggtgctggtggtgcttgcgatcagcggaatcttgggctcgagcgccaacgtgttcgcgtactatctgctgtcgcagggccgctccagctacaacgcgctgatctcgctcgtcacgggctttttcacgctggcgaccagcgccatcgcattgccgattttcggttggcaggcggccggctggagctcctgtgtcggcatggtcgcccaggtggtgatcaccgtgctgctgttgcggcgtaccttcaggctttcagggatgtggtcgcggatgctgcatttcgtcctgatcccgctcgggaccggcgtcgcgattgcgttggcgctgcgctcgcagcttggccatgtatcattcgaccacgcgccgtcatggtggtatgtggtgtcgctctacggcgtatcggcggcggtgatctttgtcgccgccgttgccgtgtcgcagctgggtccctatcgctccgtctgctggcgggatctccgcatcatcatcacccgcttcttgccgttcaaggccgcctagacatgtgtggtatcgcaggcatcgtcaatcttcggggcaatcccgtcgagccggccgagatctcacgactcaccagcctgatcgcgcatcgcggaccgttcggcgaaggcacctggttcaatgcgaaacgaaacgtcgccttcggccaccgccggcttgccatcatcgatcccggcgagggcggctatcagccgatggtgtcaggcgatggccgccatgtgatcgtctacaacggcgagatctacaacttcctcgaattgcgccgcgagctcgaggcgaagggcgcggtgttccgcagccagtccgataccgaggtgatccttgccgcctggcaggcctggggagaggacatgctgctgcgcttcaacggcatgtgggcgctggcgatctacgatacggcgactgacgagctgttccttgcccgcgatcgcttcggcatcaagccgatgctgtacgcgttgtcatccgagcggttcgtgttcgcgtccgagcagcgggcgctggcgcggagcgggctgctcgagacgtcgctcgatatcgacgtggcgcgtcggctgctgcttgacccgttcggaatcgaaggcagcgagcggacgctgtattcgcaggttcgccgcctgcaaggcggccactgcatgtggctgcgccagggccgcgtacaggtgcgccgctggtggcggaccgtggaccatctgcccgcgatcccgcaaaccgagaccgaacgcgtcgcgcgctttcgcgacctgtttcaggattccgttgccttgcgtatgcgcagcgacgtgccgatcgggacctgcctgtcgggcggcttcgactcgtccgcggtgatctgcgccatggcgagccatgagaaggccggcatggggccacgagactccaccgcctggcggcatgccttcgtcgcgacctttccgggggccagcaatgacgagcggccgatggcggaggaggcggcggcgtgggccgacgtggcaccgagcttcctcgagatcgggcgcgccgatgcgctcaccgatcttgaccgcatcctcgacgataatgacgacgtctatatcgggctgcccagcgcgccgtggctgatctatcgcgagctgcggcgccagaacgtcaccgtgtcgctcgatggccacggcgcagacgagttgatgggcgcttacttccaggaaggacagtcggccgcgttccggatccgcaacgcagcggctgcgctgatgtcgcgatcgcggctggcgcagcgcggcatcgacttcctgcgcgcgcagatgatcagccgccaggggcgctatttcctgcggggaggcttgaccgcgatccccgcagcgctgccgctggtcgccgaaaacgacgaactccctgatacgtggggggcgctgaaccggcgtctctaccgcatgttccactcgaccacgctgcccaccattctgcgcaatttcgaccggctctcgatggcccatgggatcgaggtccgcatgccgttcatggactggcgtctggtgacctatacgatggcactgccggaaaccagcaaatcggccgacggcatgaccaaggtggtggcgcggcaggcgatggcgaacctgatgcccgaaagcatccgcaccgcgcgccgcaaggtcggcttcaactcgccgatgccggaatggctgaatggaccgttggccggttggaccgcggagctggtcgagcggaaggtcccggcatttgccgagttcgtcgacgaggcgccgctccgacaggcggttggccacttgacggcaacgcagcgctgggattgggaatccgttggccggatctggccatacctgaacatgaaatggctgttggcgaggtccgcataaccaatgcgtctgttccagaatagcggtctctatccgtcctatctgccgcgattgaaccagcttgcggcaaatgcctcgactttcgcggcacgtcgcgacgtgttcttgcacgatcgttttggtgcggcgcattttctcaagccggtgctcgatggcgcgcccgaagccttcttcaccaatgctgacgacgaagtgctgcagcgccggtgggcgcgtgagcaaggcatgcagggcgcgccgacgctcgaggccattctgctcgcgcagatcgagcatcacggaaccgaggtgttctacaatctcgatccggtgcgctttccgagcgcgttcgtcgccaagcttcccggctgtgtgaggaagacgctgtgctggcgcgcggcgccctcgggaaatgctgacctcagggcctatggcgccgtgctcggaaatttcccctcgatcctccaggcctggcgcgacaaaggatgccgggcggagctgttcttccctgcgatcgatcctgtcatggagcaatatggccacggcgagcggccgatcgacgtggcattcgtcggtggatattcgcggcatcacagcgcgcgcggcaggacgctcgaacaggtcgcggcgctggcggccgatcgcaacatcgtgttctgcctcgatgcatcgcggctgacccggcttgccgaaagcgcggtcgggcgattgctgccgctggggaaacaccggcgccccgacgtcatcgcgcgcatcgcaaggacgccgctgttcggccgggatctctacgaactgttcgggtcagcgaagatcgtgctcaacggcgccatcgacatggccggcaatgatcgcggcaatatgcgctgcttcgaggcgatgggctgcggatcgctgctggtgtcggatgcgggcaattatccggaggcgatgcaggatggggtcacgatgcgtacctatgatgttcccgagcgggccgtggaggcgatttcgagcagcctgcaggattggccgcaatgggccgggatcgctgaaaccggcagggcgcgcgtgcaggggacctacagcaaggcctggcaatgggcgcagtttatcgacctcgtcgcgcggattgagccgtgctagaggggggcattgtgccggccagcgggcgggcgatcgggccgagatgatgtctgcaagtgacttgatccatcaactgaaatgggcggctgacgggcttgccgtgccgctcttcaagctgcggccgcgtccgttcggcccaggctatcagacggtcaagcgcgacaccatcacggcggccatcgatgcgggcctgcttcagacgggaaatgagcttccgcccggctacggcgtcgccatggacgagcgcgtggtggaatatccttgggtctatggccgactgaccaatgtaggcaagatgctggacgcgggatcgaccttcaatcacgacttcctgctgcagcgtgcgccattgcgtggcgcggatctcaccatcatgacgctggcgccggagcggcgatgctattggcgtgatggctactcctacatgttcggcgatctccgcaagacgatgttcggcgaccatgtgttcgacaccgtcgcgagcatttccacgatcgagcacatcggtctcgacaaccagatgctctacaccggcgatccgcgcgacgccgagaccgatcgggacggcttcgttccggcggtgaaggagttcaagcgcatcctcaagcccggcggcacctgcctgatctccgtgccgttcggcaagcgcgacaatctcggctggtaccaagtgttcgatcttgccatgatcgagcgcatcatcgaggcattcggtgcggcatcgcaccaggtggattatttcggctattcgcgacaaggctggtcgcgccagagcgccgaggcgctcgccgacgcgaccgtttttgacgtgcataccggaaaggggcagggcgatgaccttgcggcgtcgtcgcgcgccatcgcttgcctgcagctgacggcatgaatctcgattacctgatccagcgtctgatcggtcgcgcgacctgccgcttgcgggccgacgcggcgctcggccgctacgccaggattaggaacatccgcggcgattccgacaagatcgtcgtcggccgcaacagccgcgtcctgggcgagctcctgacgttcgcacatggcggggagatccagatcggcgaatggtgctatgtcggcgagggaacccggatctggtcggcggcctcgatcgagatcggcaaccgcgtgctgatctcgcattcggcgaacgtgttcgacaatctcacccatccgctgcgggcagaggagcgtcaccggcaggtgcaacagattttcacgcgcggccatccggacgacatctcgctggacgagagccccgtcaagatctgcgatgatgcatgggtcggcgcgggcgcgatggtcctgcgcggcgtgaccgtgggccaaggcgccattgtcgcggccggcgcggtcgtgaccaaggatgtcgcggcattttcgatcgtggccggcaatccggccgtgctggtgagggagcttggccccggtgagcggtgagcgcaagtttactacctgggaggaagcggtggtctggctgcgcaatcagccggaccagcgccagctcgtactcgacgcattctacgacgatccgctcgccggcgccgctgaacgctatttccacagctccgagtggcaggcggtcgcctcgctgttgcgcggccgctcgggtgccgcgctcgacgtcggcgccggccgcggcattgcgagctatgcgctcgcccgaaccggctttgccgtcaccgcactggagcccgatccgagctcgatcgtgggagcgacggcgatccgcgctctggcgcaacagacgcaattgccgatcaaggtggtcgaggagttttccgagcggctgccgttcgccgacgcgacgttcgatctggtcttcgcacgtgccgtcttgcatcatacgcgcgatctcgacggcgcctgccgggagatgtttcgcgtgttgcggccgggcggcatgctgatcgccgcgcgcgagcatgtcatcagcaaggaggcggatcttccgcagttcctcgcgcagcatccgctgcaccatctctacggcggcgaacatgcgttcctgctggatcgctacaccggcgcgctggcgagcgcgggattttccgcgatcgacacgctggcgccactgcaaagcccgatcaatcttgccccccatacagaggacacgttgaggtccgcacttgtcgagaagctagcacaaagggttcccttgcgcccgctctggcgcggcgcactcgcctccgagcgcgtatttgcctcgctactcgcaattgctacgcgctttgaccgcagaccgggtcgcctctactcatttgttggccgcaagccggcctgaatgcgcgcgtgccgaaagcgcggcgctgtcgtgaggaaaggcgccaagcttgagcgatctcagcttttggcctaccactaagctgctccgaaaattggccatgcagccatcctggatagaatgatggtcgacgaagagatgaaactgcaccggatcgacgagggttcgatctatgcaaacctagagtatcttgccaacaatccctcttggcatgtcgaggagtctccctggaaagcagacaagatctacgaaatcttgcgcaggaatggtctcgctccatcccgaatcgcggaagtaggctgtggcgctggggaaattctcgtgcagctcaaggcgcggctgccagcgacttcgttcgtcggttacgagatgtcagagcaagcgttcaagctggcggcgacgcgcgaacgcgacggtattcactacgtcaagggcaacctgcttgaattcgatgaatccttcggtgctttgctgtgcatcgacgtgttcgaacacgtggatgattacatcggattcatcaaggccttgaaatcccgcgcagagtacaaggtctttcatattccgctcgacctttccgttcagtcggttctgcgcggtgatgctctgaacggaatccgatcgagggtcggccatctccattacttcaccaagcagacggccttggagacgatcaggtattgcggatacgacgtgatcgactacaattttacggcgctggcgatcgagccgcctggccgaggtcttcgggccaatctcatgaaggtgccgcgcgtgctgttgtccaagctatcggtcgacctggcagcccgcattttgggcggatggtccttgatggtacttgcgaaatagcaccataaccggctcgggcaactatattccttgatcggcggccgcgctcgtccgtgggcaggcctgaggctcacgcgagaccgtcatcgaaccggccgtcccacgcgcgctgcatgctctctgcgagggatactgaggggacccagccggtcagctgtctcaacttgtccgtggatgctttcagcatggggcggtcgaccgatcgcatccgcgcgggatcctgctgaatgtcgatcctgatgccggacgccgccgcgatggcttcgaccacttcgccgaccgagtgcgtgcgccccgtgccgaggttcgagatgatcgggccacggtcgaatgcgtcagaggttccgagcgcgcggaagccgcgcgcaacgtcgctgacgtcaatgtagtcgcgatgcggaaacaggttgcccagcgcaagccgggtcgtgccggccgcgagttgctccacgatcgccggcaccagatgcggattggtctcgccggggccgaccacgttgaacagccggacgatcgtcccgcggaccttgttctgtgcgtggaaatagcgaacgaagtgctcggcatgaagcttggtgtagccgtagatatcgaccgggccgagcgtgtcgtcttgctcgagatgggctgcgtcggctggacgatagaccgcggcggtcgatgcaagaacgaatttggtgcctggtgccaccgcatgcaacaggttgatggtgcccgacacgttgatgctgttggccgatcccggctccgcttcgcaggccggaatgaagtggacggctgccaaatgaaaaacgatgtccggcttgatccgctgaacgatttcgccaaccgctccggaatcgcggatgtcgcagcgatgtaggacgaacttgccctggtccatcttctcgagccggtcctcgccgcaggccagattgtcgatgacatggatgtcgcgcgcggcgttttccgcgatcagctggcgaaccagctcacggcccacgtagccgacgccgcccgtgacgacgatggaactaccgttcattcacttctcctcttgaaatgggctcgaaaatagccgatttctcgccgcgatcttcgacgtccggttagcgaatttttgtccaaagggctaggttttgataggatcgcgcggctgtcgaaccgccggctccgcagcgttgggcggtatgggcgaatgcaggaagtacagttcgtgaacggtcgcagcagcgatgccaggcaggctgcggggccggtgacggcaggcgcaccgttgcgtgtcgcgttcacccatatctcgcgccggcgctgggccggcggctacaactatcaaggcaatttattcgcggcgctggcgcgattccggccgggcgagttcgcgccgatcctgtttgcgggaaagcaggacgatgcggacgagttggccgggccagcgggcatagaaggtgtcgaggtcgttcaatccgcggcattcgatggacaggccggcctcgttcaggcgctgacgctcggcgtcgaccgggccgcggctgcagcctttcgcgcccatcgcgtcgatgcggtatttgaatcagcgcgtttcttcggctggcgtctgcctcgtccggcggtggcctggattccggacctgcagcatcttgccctgccgcatatgttcacgacggccgggcgctggcgccgcgagatcggctttcgcgttcagatcgcgtcgggacgaacgatcatgctgagcagcgagagcgccttgcgcgatttcagggcgcactacccgcgtgcccaaaacccggtcagcgtcgtacgctttgcgacccagccgcccgccgcattcctgagcacggacccgtcagaggtgatcgccgcccataatctgccggcgcactacttctatctgcccaaccagttctatcgccacaagaaccaccagctcgtcgtcgacgccctgacgatcctgaagcgtcgtggggtcgacgtggtcgtctgcgcctccggcagcacggaagatcggcgcgagccgggctactatgacctggtcaattccgagatcaagaaacgtggtctcgagacctacttccggcacctcggcgtcatcccgttgccgcacgtctacgcgctgctgcgatcttgtatcgcgctgctcaacccgtcgcgcttcgagggctggagcacgacggtcgaggaggcgaagtcgttcggcgttccgatgatcctgtccgacatcgacgtgcaccgggagcagaccgccggtgctgcgcgctatttcggggtcgatgatccggccgcgctggcggatcatctgacgcagctctcggagcacaatcgcgggccggtgattcgaaatatcgtcccgcatcaggacgatgacgtcggcgcgttcgcggcgagtttcgctgccaccgtgcggcaggctgtttcagcagggtgagaagcaaggcttggtgaagtggacgctcagcgtctgcgcgaaacacgctgatatcgccgactgaagccgccggtcaaaccgcttgccctaaccggcatccggaagcagttcaaagttgctgtcggggctttcataggcgccgagcatcgccttggcgatcagcttcggattgtgccatcgttcgacataacggcgcgatgcctcgccgcgtgcgcgccactcggaccatcggtcaagaatgccggcaatgctttcgaccaggttccccgggctcaattcgtaaacgggcaactcgcgcttgagggcatccggaacgaacatcatatcttcatcccggacatagcacgcgaccggctttcccatcgccatcatctcgacggcaaagccgccgtaccagcctgccaatacctggtcgattgcgaggtctgccgaccgatagatttccaacgcgcgctcatggctcgtcttttcgacgaggatgagctcgaaatcgtaacgcgaccgcaattgttcgagggcattcaggatcatcggtgtacccttgatccgtccggcagtcggggcatgaacgatcttcggtcgcccctgcgtggagggcagtgcgacgtcgaacttttcgatctcgacgtttgaatacgggagaaattggccgttcgggacgatgtgtccgagctccggattgaggtagaagacccggtcgaacagcggcagcaccttgtcgatcaggaaatgccgccggtggtcgagagcgtccgtgcatctttgatacagctcgcaatgttgcggggcgcacatcgtccattcgtttcggctatttccctccctggccaaccggacatcacaaccctgcaatgtcatgaacagcttcttgtcgaagaggcgggcggcgtgcaggtctgcggccccgagcttgttgatcaggtccgtgatcagcgatggcctggagagcactgatccgggcgccgagagcgggaagcctggcgacaggaaggtctgtccaaaatagtaatgaagaacgtcgtagcgccactggttcttcaggccgaacgccgcgctgcgaatagccgtctcgaggaatccggcgttctttccagccagcatccggtctgccgcgtatccgagccacgtgtcgtttcgaacgaccacgtcgctcgatgctccgagctgccgttcagcacgggacagcacccaaggctgattcccgacattgactggtccgtgcaagattctcatgtgcgcgcattcaggtcgacggaccggggcgaaggtcgcgcagattgcgagacatgatcgtgtttcgtgagttcgtcgacttgccgcgtcaggctcgccagcagattctcgggaagatcggcggtctcgcaatagagcttcccgagtctcgctgcgaccgcttgcaaactgtagtgcgtctctacatagcggcgtccggcgttgccgatgccgttcaggtcgagctcgcctctgaggcatcgcttcaggacgttgtagatctcgtcaggacgggtgttgatgatcggacaggtggccggatcgatcatcatctggtcgctacgcagaaagcagagcaccggtttggccatcgccatcgcctcgagcgccgtatagccgtgaaagcccgcgacgaattgatccgcaaccacatgcgatgcgccgaatagctcgatgaccttcttgttgggaactccctgcacggagatcagctcgattttctcaccctctttcaccaatcggtcgatcgcttcgatcagaagccgggtacccttgaagtgcccgtggttcggcgcgtgtgctactttcagcgtgtcgccgacgctgtacgtcggcggcttcgcggcgaatttgcctgcgtcaatcggccagtagtggatgtcccggcaaccgggcacgtacgtcaccatgtcgcccattgcgatctgagccgtcgcacgacccttcaggcggttgatcgacgaggcatgcatctccgtcgtgcagacgcagaatttgcccggcgccgggcattcttcgcacaggttggggtgaccgagttcgagcgttgtttcccttgcacggacgtcagcaccataagcgtaggtatatagccgctttctcgagcggacgaggaggtcgagttcccatgggttgatgccgtagcgttcgtcgctcagcatcaggccgcggtcatagaagtagttgaagaaatcgaagcgcagcagggcccacgcaaaaacaaggcgacgaaacaggccgaggcctcttcggctgcgtatcagtcgaaggaatccctcgaacaggatgagattgatgtcaaatgacctcgtcacgtagtaggtgttgaacaccagcgaggacgagcggaagcccagcatgcgatcgcagcgcgcgagaagcggcaaggtcaggatcggagtggaggcccacaaggtgcgcacctttccctgcgcaagacgcttctcggtggcgcgccgcgccgcgctcacaagcatgcgagtggcgaaatctgcgatggcagattgggtcggccgcggagattcaacaccgccggagcgaagggtggcttccttcagcgacgttggtccgatgggttcaatcttgttcactcgggagtccgatggatgccaactcaatgtcaaccgggagcttttagcacatgttcagttcgaagtgccgctcggatggccgcgggcccacggagaggctgcacggaattggcggccggctagcgctatctcaggtttcagcaacgcacgaagacagcttcgtttggtccgggaacgttgacgttcaatacgcgaacaggctaagacagcggcggtttgttccaaatgcgcacatattctgacgcggcggttataccgagctccgccatcgaatcaatctggataggcatttcgtgtgcggcatttttggacttgtagataagaccgggcccgtcgatgcccgccgagtggaccagatgaccgatctcgttgcccaccgtggaccggatgggcgcggcgtgagggttagcgggaacgtcgggctgggccaccggagactggccgttatcgatctgaccgatgacggcgcgcagccgatgtgcgacaggcggcttcccgtctggatcacctacaatggtgagatctacaattacatcgagctgcgcgcggagcttgaggctctcggatataccttcgactcggcctcggacaccgaggtcctgctgacggcctatatttgctggggcccggagtgcctcgagcgcttcaacggcatgtggtcgtttgcgattcacgatgagcgcgacaatacgctgttctgcgcccgcgaccggttcggcgtgaagccgttctactatgtcgacacggccaagcagttcgcgtttggctccgagatccgccagcttcttccgttgatcgagcgcccgattgcggatgatggtctgatcaacgatttcctcgtttgcggcatgaccgaccataccaatcggactttcttcaagggcgtcgacaagctgcctccggggcattggatgcgtgtcgacgtgtcgacaggccgcgtcgaaatcaagcgctattattcgcttgctccgggttcggcggtgaccgatgaggccgacgcggcagggtcgctgcgcgagctgcttgacgacgcgacgcgcctgcggctgcgttcggatgtccgtgtcggaacctgcctctcgggaggattggatagttcgagcgtggcagcgctggccgcgcggcgttatgcgccaggttccggcgagcgcttctttgccatcacggccgtgagtgagcaggcctccaacaatgaggagacctacgcggcggaggttgcggagaaggcggaattgaactggctacgcaccaagccgacctatcaggatttcgcgtcgacggcggagaccttgctcgaggtccaggaggagccgttcgcaggcccctcgatcatgatgcagtacgaagttatgagggccgcgcgatcgaatggcgtcatcgtgctgctcgacggccagggcggcgacgaaacgttgttgggatatcatcgctactatgctgcctggctgctcgaccatctccgccgcggtggcgtcggtggatttctatcggccttcagcgctgcaacgcaggcaggtatttcgcgcggacggttgctgttctatctgttcggcgccagttcggccgggctgcgtgccgcctattaccgcttgcgctacgcctttctgaaaaagcctgaccttcccgaaccgctgcgccgctttgcgtcgaaggcgcgggacgcgcagggcatgcaagtgctggagatcaatgaaaccaatctaccgatgctgttgcgcttcgaagacaagaattcgatgaggttcggcatcgagacgcggcttccattccttgactatcgtttcgtcgagtttgctctggctcttccgacacgcatcaagctgaacaagggctgggtaaaatggccgctccgtgccgcgatgaacgaccttttgccggccagcatcagctggcgtcgggacaagatcggctttgccgcgcccgaccagatctggctcacccggcactcggccgcgatgtatgacaaggtgatcgcaagcgagctcctggctcgctatgtcgacatgccgaagctcaagcggaaatttcaccggctcgaccttggaatgcgctggaggctttattgcgttgcgctctggggggagcgctttcgggtcgaagcgccatgacgcctgatgattcctggatgtcatcgtcgctatcggcaactgccgatttgtcagcggattctttccgggccggctcatgaacatctggctattgcatccgttcgccgggggaccgggtctcggccgtcactatcgtccgttctggctagccgatgcctggacgaagatggggcatcgggtggtggttgtcagcgccgcctttcaccatctgcacaggcagccgcgcgtgccgggaccgcagcggatcaatgacgtcgacttctggtttctcgacgcgccgcgctatcgcgatggcagtttagggcggcttcggaacaatttgagctttgggccggctgtccgctcggcagcctcggcaattgctgcgcagttcggcaagccggatctgatcattgcgtcgagcccgcatctgttcttcatctcggcggcgcaacaggttgcacggcaattcggtgccgggttctggctggagatccgcgacctctggccggagagcatcgtggcgcttggaatgacgccgccatggcatcccctgatgaaggtgctgggctggaaggagcgcgctgcctatcgcgcggcagatcgcgtgatctgcctgctggccggagctgaagcccatatgcgtgcgcggggcttggcggccggcaagttcctgtggatcccgaacggggtgtccgacggcgaaatacagagcgcgctgacgatcgagtgtctcgatcatcccctcgtcgaccgcatcaaggcgctgaagcagcagggcaggcgcgtcgtcctgtacgccggcggcatgggcccgccgaatgcggtggaggccgttctcgacgcggcttcgatccttggcaaagcgaataccggggtccatttcgtgatgatcggctccggcacctcgcgggacgccctgaagcagcgggcagcagcgcttgccaatgtggagtttcacgaggaagtcgatcgctcggtcgtgcacggcatgctgcatgcttccgattgcgccgtcgtcgccttccacaagaatgcgctctatcaccacggcatcagtcccaacaaactgttcgactactgcctcttcgcgccgcgcaccgtcattgcttgcgaggaacgggcgctcgttgggctcgaagatctggtgaccgcgcgatgtgcgcctgatgatgccgatgcgcttgccgtctccctgcgtgccgcgctggacggtccgccgcgtccgctcagcgatcgcgtcgccgtcgcgcgtcggtacagctattcgacactggcggcgcgatatctcgccgagtcctcagatccggcctgaagtgtgactgccgcgacacaggctcaagagggaattcgtttataatcagatagttgtggtgttcatcgcgtgaacgaattcgcttgacgttcattgggtgaacgcgctatcagccctctccagttgggataggcgtgatggcaggcattctaccgaccgatgagaatgacagcgaccggctggtgctcggactactcacctcgctcgaggcggatggtgcgcagtcgcagcggcggatcgcagccgacctgggcgtcgcgctcggtctggtcaacgcctacctgaagcgggcgatcaagaaaggtttcgtcaaggtcgggcaggctcccgcgcggcgatatgcgtactatctcacaccgcagggcttctccgagaaatcgcggctgaccgttcaattcctgtccgactccttttcgctgtttcgcaaggcgaaggaggagtatggcaagctgtttgaacgtgcgcaggcgcggggcttcaagcgggtcgtgctcgccgggcaatcggacctttgcgaaattgcgatcctgtgtgcggtcgacggaccaatctcggtccttgcgatcgtcgatcccgatgcaaccgccgccaggttcattggcgtcaaggtggtttcctcctacgcgttggtcgaggagccgtttgatgctgtcgtcgtcacccatctgacggcggcgcgaagcgtattcgaccaggcggtcagcaatttcggcgcagagaaggtgctcgcgccggacctgttgggcttgcgtcccaagcagccgcagggagcgtgatggcaatggagcccggttcgcgctggtacgtcgtccagacacaggttaacgccgaagcaaaagcggtcgccaacctcgggcggcaagggttctccacgtattttccccgttacctgaagcgccgcagtcatgccagaaaggtggagactgtgccgcggccgttgtttccgcgctatgtctttgtcgggatcgatgttgcgtcccagcgctggcgcgccattcaatcgacgctcggcgtgtcgcatcttgtgtgtgtgggagatcggccggccgcggtggagcctcgcgtcatcgatgccttgaaggcgcgcgaggacgaggccggcttcatcacgcttgcgcgcaggccggctttctcgccgggtgacacggtgcgaattgtcgagggggcgttcgttgacagccttgcgctcgtcgaagacgtcagcgatcaccatcgtgttgcagttctgttgaatttgcttggccgcaaggttcgcgttctggtcggggcggatctgatcgccgcggcataagtgcgtctgctctcggcaggcgcgatcgagatgttgggcttgggtgtgacgttcgattcaccccgagtgcggtagcttgcctgaagcaggcggaaagttcgaaagaggggctcatgacgacttacgcattgatcggcgctgccggctacatcgctccgcggcacatgcgcgcgatggccgagaccggtggcaaattggcggtgtcgtatgatccgaacgactccgtgggcatcatggacagccactttcccgacgccgaattcttcacccagttcgaactgttcgatcgttacgtcgatcagctgcgcagaggcggcacgaagatcgactatatgtcgatctgctcgccgaactatctgcacgacgcccattgccggtttgcgctgcggtcgggcgtggacgccatctgcgaaaagccgctggtcctcaatcccggcgacatcgacgaactcgcggcgatcgagcgggataccggccgccgcatctcgaccattctgcaactgcgtctgcatccggcgatcatcgcgctgcgcgatcgcttcgcgaattcgaagaagcgccacaaggtcgagttgacctacatcacctctcgcgggcgctggtatcacacctcctggaagggcgcggacgcaaagtccggcggcgtggccaccaatataggggtgcacttcttcgacatgctgagcttcgtgttcggccccgccagccgcaacgaggcgcacctgcgcgaggcggagcgggcggccggctccctggagtgcgagcgggcggatgtgagctggttcctgtcgctggatcgcaacgatctgcccgacagcgtgaagggcaagaagacgacctaccgctcgatcaccgtcgacggcgaggaggtcgaattctcggaaggattcactgatctccatacgcgcagctatgaagagatcgtcgccggccgcggcttcaggctggacgaagtccgcccctcgatcgatatcgtctccacgttccgcaatgcgccgatcgtccgaagcaacggcgttcacgcctttgcccagaaggcgatgcacagatgagcgagatgcgcgaggatccgcgcttccctggtgtcctgattcatcaatccagctacgtcgacgacggggcagtggttggacgcggcaccaagatctggcacttctgccatattctgccgcgcacggtgatcggtgagaactgctcgatcggccagaatgtgatgatcggtccgaacgttcggatcggaaacggttgcaagatccagaacaacgtctcgatctatgacggcgtcgaactcgccgatgacgtgttctgcggtccgagttgcgttttcaccaacgtcaacaatccgcgcgccggcgtgtcgcggaaggacgagtttcgcaggacgccgatcggacgcggcgccagcatcggcgccaatgcgaccatcgtctgcggacattcgctgggcgagtactgcttcatcggagccggtaccgtcgttaccaaggacgttgctgcgttttcgttgatggcgggcaatccggcgcgacgaattggttggatgagcagggcaggcgagcggctgggcagcgacctggtgtgcccgcgtactcatcgtcgtcatgagcttcgcaatgaagcgctggtggaaatcgaggattgaagaaaatggacattcgcggaaagaaagttgtcgtgatcggcggcgccgggctgatcgggtcgcatgcggtcgatcaactgacgcagaccgatgtcggcgagatcgtgatctacgacaacttcgtgcgcggcacgcatgaaaacctggccggcgcgctgcgcgaccctcgtgtcaagattttcgaggccggcggcgacatcacgcaggtcgacattctcgatgcggccctgaagggggccgacggcgttttccagttcgccgcgctgtggttgctgcagtgtcacgaatatccgcgcacggctttcgacgtcaatgtcaacggcatgttcaacgtcctggatggctgcgtgcgcaacggcgtcaagcggctggtctggtcgtcctcggcgtcggtgtacggcgatgccgtcgaggagccgatgacggaggaccatccgttcaacaacaagaacttctatggcgcgaccaagatctgtggcgaggcgatggcccgtgcctaccacttccgctacggcctcgactatgtcgggcttcgctacatgaacgtgtacggtccgcgtcaggactatcgtggcgcctacatcgcggtcatcatgaagatgctcgatgccatcgacaagggagaaggaccgacgattctcggcgacggatcggaagccttcgatttcgtcgcggtggaagattgcgcgcgagccaatctctgcgccatgggcgcgagtgcgacggaccgcttctacaatgtcggcaccggacagcggacctcgctgaagcagatcgccgagaagctcctcaatctcaccggctccaaccagccgatcaactatgcgccgcggagccaggccacgcttgtgcgcaatcgcatcggatcgccgaagcgggcacaggaagaaatcggcttcaccgccgcgatcgacctcgatgacgggttgcggcggctgatcgagtggcgcaagagccatatcgatcaggtcgatcagcggcgcgccaaggcccagatctgagcgcgcgtacgagatcattgaatagatcggccaggacaacatgtgcggcatagccggaattctgcaccgcgacgggcgacccgcttcgatcaccgcgttgacggcaatgaccgatatcattgcccatcgcgggccggacggcgaaggccactactgcaacggtcccgttggcctcggtcatcgtcggctgtccatcatcgatctgaccgacgccgcgcggcagccgatggagacgcgcgacggccgatttgtgctgacctacaacggcgaaatctacaacttcaaggagttgaagatcgagctttccgccaaggggcacgtcttcaattcgtcaggtgacagcgaagtgctgctgcatgccttcgccgagtggggcattggtgcgctgctcaagttcaacggcatgttcgcttttgcgatctgggacaatcaagagcggaagctcacattggctcgcgaccgctttggcgtgaagccgctctactatgcggagctcggtcagacctttgtgttcgcgtccgagcataaggcctttcgggcatttcccgagtacaaggcacgcgtcgatatcaggggcctctcggaatatctcagctttcagaacttcttcgcggagcggacgctgtttgccggcgtgaagttgctgccggccggttgctatctgcaaatttcgcagggaggcaagattggcgagccggtgcagtactgggatttccatttcgaggaacccgagtacgcagtcgatgagaacgaggcgctcgacgagctcgatcgcctgttcaggcaggcggtcaaccggcaactcgtgagcgacgttgaggtcgggtgctatctctccggcggcatggattccggctccattaccgcgctggcatcgagtcagctgccgttcatgaggacgtttacggtcggctttgatctcaactcggcctcaggcgtcgagctcggctatgacgagcggacgaaggccgagtacatgtcctatctgttcaagaccgaacactacgaaatggtcctgaaggcgggagacatggagcgtgcactgccccggcttgcctggcatctggaagagccgcgcgtcgggcagtcctaccccaacttctacgcggcgaagctcgcatccaaattcggcaaggtggtgctgaccgggaccgggggagacgagctcttcgctggatatccctggcgctactatcgcgccgtcgtgaacgatgatttcgatcactacatcgaaaaatattttggtttctggcagcgcatggttccgagtggaacgatgccgagcctgctcggaccggtatgggatgaggctaagcagacctcgccgattgatatcttcaggggggtgttcaaggagcacgcttcggagctgcggcggcccgaggattacgtcaatcattcgctctacttcgaggccaagacgttcttgaacgggctgcttgtcgtcgaggacaagctggcgatggcgcatgggctcgagagcagggtgccgttcctcgacaatgatctggtcgatttcgcgatgaagctgcccgccaagatgaagctcggcaatctgaccgaggttgtcagcctcaacgaaaacgagcccggcggaaaggcgcagcgctattacgagcgcaccaaggacggcaagctgattctgcgcaagatgatgagccggcacattcccgacgaagtggcggagcgcgagaagcagggcttttccgcgccggatgccagctggttcaagggtgagagcatcgagtatgtcaaacgcaggctcttcagcaacactgcccgcatctacgatctggtggaccggaagaccgtccgttcactggtcgatgaacatctggaaggccgacaaaacaggcggctgctgatctggtccctgctcaacctcgagcagatcatggaaagctgcttttaggtgcggatgaatgggggcgcgttgaagatgaatggtctcttcccggcggcaagatgggtgcgggtcggcctgtcgccgtaccgtaactcacaggccctgtggaccacagtcaaacagatccggcgatatcccgatctcttgcgcgagatggtcgatcgtgacctgagcgccgcgcatgcgcggcacgggttcggcgccttgtgggttttcatccacccgctggtcgtcgtcggaacatacctgctcatcttcggcttcgtgctgggcagcaagctgtcgatcaccgcggatttccccggcgactactccgcctacatcctcgcaagcctggtgccgtggctgatcttgcaggcggcgctggtgcgcgggccgggcgcgttgatcgggagcgcaagtctcgtcaagcaggtcgtgtttcctatcgagctgctcccgatcgcggcgaccattgctgcgacgatcccgcatctgccggccctcgggctcgtcattgtctacaaggcttatgtggggggtctcagctggatgctgctgttgctgccggtcgtgtttaccatccatgcgattctggcgatcggattgagcttcgccctgtccgctatcactccgttcttccgcgatatgcgcgagatcgttacggtcttcacgtcgattgcgatgtatctgatgccgacggtgtacctgcccgattggatgccgcgtgcactccgtccgttgatctattcgaatcccttcagttacgtcgtctgggtctaccaggacgttctcttcttcggttcgttcaggcatccgtacgcctgggcggtgaccatcgtgttcgcgctgttcagtctggggctcggataccgcatctttgaaaagctgaaaccgtactatggcaatgctctctgacgatcgaaacgacggcggactggtcccgcttgccggttcattggagccgcagtgcgccattcgcgtcactgacctgggaaaagcctatcggctctatccgcagccgttggatttcgtgaaggagatcctcaccggaaagccccgacaccacgagcattgggcaatccagaatgtttcctttgaagtgctgcgcggacgcgtggtcggcatcatcgggccgaacggcgcgggaaagagtaccctcctgaagatcatcgccggactgctggatgccacaaccgggcgtgttgaagtggctggaaagctgtctgcgattctggaattgggcaccggctttcatccggacgtgtcggggcgcgacaacatcgtcctgggcggcatgtgcctcggcatgtcgcgagctgagatcgaagcgaaggttccctggatcatcgatttcagcgaacttgaagacgtgatcgaccagccattccggacctactccagcggcatgcaggcgcggctcacctttgccacggcgatcagcgtcgatcccgaactctttatcgttgatgaggctctcgcagccggtgacaccgcattcgtcaacaagtgcatgaagcgcgttcgtcatatttgcgaaagcggcgcaaccgtcctgttcgtttcgcattcgagcgggctgatcagcgaactgtgcgacgaggcgatctggatcgacaagggacgggtgctgatgcatggcaatgcccagcgcgtcagcaaggcgtatgagcagagtgtctgggatatcgaggaagcgcgcaatctcagggagaccaagaagctcagccagtcggttgagaacacggctgaaaccggtaaatatcagcttggcggcgatacgctgcagatcactgccgtcgaggtgcttgacgtcgacggcaagccgatcggcgtcgtcaaaaacgggcagccgcttcgaatccgggtgtcgtggtcgggcgtctctgagcacaagcagatttacgcaagcctgcggatcgataccgcgcggctccaggcggtcgccggaattgaggggtacgacggtggcctgtttctcgatggagagaatggtctgccggaacgcggaagcgtgatctacgaggtgcccgagctcgctcttggcgaagggcagtattacatttcagcctctctgtgccatcacatgctgccgaagggggcggaagccattttgcactatgtggagaaggcggctcagttctcggtggcgcggaactcgttgtggcacttcagctacctctatgatccgaagtttacctgccggatagaaggcgacctatgatcgaagacggatggcgggagagactggaagccttcttcgagctcagggccagttcgatcacggagcggccgaccctcgaagatctctgctatattgccggccgcaatccgcggctgtgggctgacgagcgccttctcgacgacctcagattcgacatgctcgccctaatgaaggtcggccaaagctcatcgattcttgaagtcggctgtgcagccggttttttagcgaaggtcgtcgctcccagtgtcagtgaatatacgggagttgatctcgccgacgctccgcttgcggttgcaaagcggcttggactgacaaatgcgaatttcgagagagcccgcggcgaaagcctccagttccctgatcggcggttcgatgctgcgttttgttatgacgtgttctcgaatttcccgtcgtttgcggtaggggagcccatcattgcggaaatgttacgtgtggtgaagccgcaaggccgcgtgctggtcggatccattccagatcgcgagaaggcggaagaactacaggccgtggcgaacaatctcacgacgaaattcgagcaggagtttggacctgaagcggagcgggcgccactgggaacaattcggaaatccgagcaaagaccgggccctggagcgaagatcgctagattgctgggattgaggaagttgtcggcgccgatttcgctcgagatcaagcccgagatcatctcctactatttcgatcgtaaggattttgtggagcttggacgtcgcctcggcgtcgaaactagaattgtcgatatccatccgctgaatccctattacggcacgcgcttcaatgcagtgtttgaatcgcgatgaaagtcgtccgatttcgcaaaatcgatcgtagcgcttgggaccgtctggcgctgcaatcgccgcaggcctggctcacacatcggtcttcctgggtcgagatcgaggaacggttcttcgtgtctgcgaacctgtcgttcgctttagaagagaattcgcaactcgtcggcatccagccgttgtttatcagtgaaggcgccggaacggcgcttggcgagcgattgctacactcgggaattcatcgccatactggccttgcgctcgacgccgatatcgacgctggcgtagcgaaggccgcgcgtcaggccgcgatgcacgagatactcgctatcgccgatctatatgacgtcgatcgcattcagttgaactgccacaatcttgcgccggcaaatcggccttccggaagggaggcagtgccgttctgggtcagcgatttcggttttcagcttggcattgcgttcggaccgtcgggaatgttgccttgccccggttcctcgaccctgaatgctgatcaattggtcgatcttgctccggccgttgaacagttgttcgcgagattggataacacttgccgcaccgcggtgcggaaagcggagaaatcaggtctgcaattcgagatatcgagcgatgtctcacatctcgaagcctacatcaatatcgcgcgcgcatcggccacaagaaccggcgaaagcctgccaccactcgaatattatagaagtatcttcaggtcatttgctgccacggccggcgttcacgtcgcatttgtcaggcacgatatgaacgcaattgcaggcctcatcttgttggctgacaagaatgcggtcagttttctcgccggcgtttccctgcccgacgcgatgaagctgaggcccaacgacttcctgcactggaacgcgataaagtgggccaagcattcgggattcgaagtataccggtttggaccctggtttcctgaggtgccgcgcgactggccgatctccaaggtctctctgttcaagaccaaattcggatcgagaagcctgccaatcatccagggtagcttgttccgccggccagaactctacacgtcgaaccttccgaatccgctgaacgaggttgggaggatgccggcgcgaccgactgtttccggaccagcgggttcttcgttgatagctcaccatctccagatgttcggattcgagagggtctcgtcgatgcaggatggcgagcccgtggtgcttcaccggccgagccttgccgatgtgcctttggcgaacggcgttcttgagcggggcggctgcgtgatcgctgttcttcccagcgtgccatttggaaaagcgttcggtgtcgaaacggaagcaagaacagttgtctcacctgaggtgttccacgcgagatttgcgggtcaaaaaccgtggtcgcggctgcgaacgttgcattctcatatgctcctcagggctgaaggtgatgtgacgactatcgtcacgaaccaccggcaggaagcggtctggcttcagaggcaggcagggaatggcggttcgatcattttcatcggaacggatatcgcttccgatctcgttcgctatcggcaaggcgatcccgcggccgcgaacaatcggcccacgaagaccatgtggggtattgccggcgagcggccgaactatcttttcgaaggccagcttgcaggggaaagcttgcgtgagcgacccgccgactggtggtgcgaggcgctagccgacgcattagcgcgcctgtgcggggtgaacagattgccgatgctgccgaacggggcggcgggtgccatcatcgtgaccggagatgatgaccaggcggcgctgagccgttatgcgcagcagcgggaggcgctcggatcgacgccgatcacctactatcttcaccccctcacaaagcacaccgcgagcacgctcaagcaacttggatcaggcaggaggctcgagctgggtcttcatcccgatgcgcttgagcagcccaaccggtacgccgatcttttcaccgaacaggcgaaatggtttgagcagttggccggagagagcgcgcggaccgtacgaaatcatggctttctgaatgatggctattgggggcatgcgacggcctggaatgctcgcggcgtgaagggcagttcgaatttgccggggctcgacggctgcatcatcaatggttcgctgttgcccgccaagctcctgctggacaacaagctgactgaacattggagcatcctgactgcgatcggtgacgggatcgtatttgtgcatggttgggatgatcgtcaatcggccaactgtatccttgatctggctgatcggattcgcaacgatggcgttcccggagtgatcgttgtcaatctgcatcccgagaatatcgataagactcgggggatgcaccgggcagtccgcaaagttgtcgaggacggctttgttccgtggacgatgagcgaatgttttgagtggttcgaacgccgacagcaaccggcacttgagctgcgaaaacgaccatcctttcaatggtggagaaaaatttgagtacagctcgtcggcgtttggttgtgcttggggggcccggagatgggcttgtcgttgcagaagccattcaccaggctgctgcggcagggcaggcgattgagctcgtcggcttccttaatgatgcgctgccatcaggctcggttttgcagaatgtcccggtccttggacgtttcgaagactggcggctactcgattccgatatgctgttctgcccggcggttcaaaaggtgaaagacatgccggcgcgggtcgataggatcgaaagccttggaattccggatgagcgctggggaaccatcattcatccgcgagctgtggtggcatctgacgttgaagtcggtgtgggcgccttcgtggcctcctgcgtcacggttcaacccggatcccggataggtcgatttgccagcgtccgcgccggagcagttctcgggcaccacagcgttgtcgacgatcacggctatgttggaccgaatgcaacgatgtgcggccgaactgtcgtgtcgtatggcgctcatctcggccccggggccgttctgctcgacagccgcactctcggaccattctccgtcgcgggaatttcggcggcggttaccaaggacgtgcccgagtattgggttgtgttcggaaatcctgccgtccgggttggtacggttccaaaacgtcagagataaagagttacccgaccagcggcatgttggaatcaaggaaacatggccgctctcgctgatcatctcgtatcgagggaggatgtatgacggacgttcgcgccaagatagttgaaatcatcaacggaataacgcggcctgcaaagatcggaaattccgatcccgagaagtcgttgcttgccgaggggctcctggactctctcgattttgcgagcgtgctgatggccattgaggacgagttcgacctcgttctgcaggatgccgacgtggaggacttgaattcaatcaacaagctggtccaattcgtttcggtccatgcgacggcgtaggtaggttggttgtgtcgcgaccgccacaacttattctcgtcaccgatgacactgcaggcagagccctgacgatcgatgatatcgtcgtcggcgacgcggtcgagcagcagtttgcattcgatcgtccagcgcgcgacgcctttgcgatcgttgcaaacgatcgtgcgcctgttcacgacgacgaacggtttgcccacagcaagggattcggcggtccaatcattcaggggttctgcgttgcgtcgcgcttctctcggctgattggaatgtacttgccgggagagcacgcaattctgcaaggcgtcaatcttactttccggcaacctacgtatgaagggcaagccgttcgtttccgagtgtgcgtaacgcgagtccttcgacccatgcgggtcatcaagttgagtcttctgacgacatcagatagcggcgaccatctggagggcgaggcgcaatgtctgatacggtagcggggaacgcatcgtctgtcgcatgtctcctggagcgcctggagggtcgacgagacgctccggcattggcgattggcaaggcggaaatatcgaccggtcagttgctcacggcaatggccgcttgggaagcggatctcttggcggctggtatcgcgcccggcgatatctgcgctttcgagggggaatatggcgtcgaatcgataagcctgatcctggcgttgctgaagctcaagaccgttctcgttcccttcagcctcggtgtccgcgaggagcgtggacgattgtcctcgcttgccagagtgaagtggttcatcgatccgctcgcaagaggaatcgcgcgagagggcgagttggagggccgcgatcacccgctgatcgaggaactcaggacacgggagcatccaggtcttatcgtatttacctctggatcgtccggcacccccaaggcgatccttcacgacgtcgaacgtgtcgcctcgaagtttctaaagcctcgcaagtcgtggcgcatgctgttgatgctgctgatcgatcatttcggcggaataaacacgcttcttgcctgtctgtttgacggtggcgtggggatatgcgttgacaacagatctccagaagcagtgtgccgggcagtatcggatgggcgggccgaattgctgccgacgacgccaacgttcctcggcgtgctgatcggctcgggtctttggagaaagtatgatctctcgtcaattcgtttgatcacattcggcgccgagcccatgccacccgcaacgcttcggcgagtgagagaggtctttccaaatgcggctctcaaacagacttatggcttgtccgagctcggggtcctccggtcctcgtcacctgatcctgaatctctatggataaggattggaggggacgggtttgagacgcgcgtgatcgatggtgaactccacgttcgatcggcgtcatccatgctcgggtacttgaacgcgccgagtccggtgaactccgatggctggatgagcactggcgatcttgtcgaggaaaacgaccgcggattggtgcgctttgtcgggcgcaaaaccgaagttatcaatgttggtgggcaaaaggtcttcccactcgaagtcgaggatgtgatcctcgagctggacgacgttgtagaggtagccgttcatggagtgcctcacactctgctcggcaatgcagtcgttgcgcgcgttgcacttcagcgaccggaaggtacgggcgaggcaattcagagaattcgcgatcactgccgaagccgtctgcaaaaatacaaggtcccgatccggtttgagattgtagaccacgcttcgctgacgacgatgcggtcgaaaaaggcccggaaccgcccgatgccggagaactgattttgtgtggcgcacgagagtttccagatgaatgacaagcacagcattttggtaagtggcggaagtcgcggcctcggcttggcgctcgtgaaggccttcctggcagatgggcatcgggttgcatctttcagccgccggcaatcaggcgaggttgctgggctcctcaacgactatccggatcagtttgtcttctctgagtgcgatattacggagaccgatcggttcaaggagcttattcggaactttgaaaagcgcatcggacggctttcaggcctggtcaacaacgcagggatcgtggcggaggaaattctggcgcggcaggatgtcggcgacatcgaaaaattgctggcggtcaatctcgcgggaccgttgcaccttactcgcgccgcgattcgcggcatgatgatcaatggcgccggtgtagtcgtgaacataagttcgatcgtcagtgttagtggatacaagggaacggtcgcatattctgctactaaaggtggaatcaatgcgatgacgcgcgccctggccagagagcttggcggccggggaatacgggtaaataccgtggcgcccggctatatggaaacggatctcgttgccgacatggatccctcgaaattgaagcagatcgtgaggcgaactccgctgggcagagcagggacagttgacgatgttgtcgggatcgttcgcttcttgatgagcgaagaggcccggttcatcactgggcagacaatcgtcgtcgacggcggcttgacggcttgagcgagatgcagacgcttctctttgaaccagccgccgcatttcggggaccgcgcgactatgtgcactccaccgatatctatgaagaaatcatggccggagcccgatatcacggtgtcgcgctcgattgtggcctcgacctgaagattcttaataggatttgctatcgtcccgtctattccttcgtaagggacggagacgttgatacggctgacgctgcggccattgccttactcccagggtctccctggcaggtgaagatcattgaaacgacggagccggttgtcgcgcggaagagctatgacgagcagaagatcttcaacgcgtccaggattgctggaaaccggatatcactcgtggaaccggttgggatgaggcctgtcgagattgctacggctctctcggtgaagtttcacaaatttggcttcccgccggatcccggcacgcgctggctcctggcgcggctcgagttgtctcgactgtttcgagacgaggattctgttggtcttgcgatcgagcttgaacgcagagtcggcaagaagatgacccgatcccgtatcgtctcggcagacggcgtaatcggagccctaacgtttatcctggcatagtggatgaaattgcgtatcgacgcaattctccgcatgccgcatccagctgaggcgctcaattgaacatcaccgagccaagttttgacgagagtgagatcgccatcctgcgggaatgtctcaattcgaaatgggttacccaggggccattaaccgaacgcttcgagaagctgatcgcagcgaagcatgaagtaaagcatgccctcgcgtgcacgtcgtgcaccgcggcgctgcatttggcgaccttggccctgaaccttgggtcgggcgacgaggtgattgtcccggccttcacctgggtgacaagcgcgcactccgcggaatatgtcggcgcaaaacccgtcttcgtcgacatcgatctgtcgaccttcaatatcgctccggaacggctggaggccgcgatcacgccgcgcacgaaggcgatcgttgcggtccacctgttcggtctcgccgctccgatggatgagatcaaggcgattgcagagcctcgcggtatcgcggtgatcgaggatgcggcgtgcgcgatcggcacgacctacaagggcaagccgattggcgcgatcggcgacatcggttgcttttcgttccacccgcgcaaggcggtgacgacgggagagggcggcgccgtgaccaccaaccgcgatgacctcgcggaacgcgtgcgatcgcaacgcaaccacggcgccaccggcgctccggatgcgtcgatcgagcctcacggcccctggacgatggcgacgttcgacaatcttggctttaacttgcgcttgtcggacatccaggctgccgtcggcgtggcgcagatgggcaagctcgaccggctgctgtcggaacgcaggcgtctcgggcatcgctattccgagttgctggcaggaaacaattcgatcgtgcggccgctgggcggggacgtcgacgggcatgcgtttcaatcctacgttattcgtgtcgttgacggagatcgtgcgcgccgcaacgcaataatggcgacgctggctgccgcgggaatccaaacccgcccgggcacgcatgcggtgcatcggctcggctactacaagaacaagtatggcctgcggcccgagcagtttccgaacgcggcacttgccgaggacacgacgatcacactgcctattttcccgaacatgacggaagaggatcaggcccgggtggttgattgcattaatcgggcaagcgcctgaggcaagcgcggaacggcatcggtgtcttcgagactctttcggtcggcgcgctacctgcttgaggggacgcgctttcccaaccttacgcggttcgcccgaaagaaccagacgtttgaagcagctctctcggcacttgctccaacgcgagggagaggacgcgtagaccaggcgatcgttggaaacgcgaaccggtttgctgccgagggcgattacgcgctgctcaccactctgctggatgcgttgcggccgttcctcaatcccgatcaatcgcctgacgcgcgcgacttctgggatgctctcgtcgccgattgtcgcgcgatcactgaggatcgcttgcggagcggagagatgaattcgctctggggggtcacgccgatcgtcaatctgacttcgggcgtcgccgcagaccgtgccttgggcgtcaatgcgcgctcgctcgtgtttacgacgtaccatacgtcttcgaatttcgattttgtatgctctgaaattcaagcgcgcctcgtggccgagcggggcgaggactggttcctgtttcgatggctcatgctgatctgggcgatcgccaacttcgatttttttcatctctacaacgatcgcggcatcatcgagccggcaggtggctacggcagtccccgcttcggaattgcggtgcgcgagatggaaatctatcggcaggccgggaaacggctctatacctacgcatatggcgcagaccacagaacgcgcgaaaaaaacatggcgctgggaaaatggaatttctgctcggaatgtcctgatccgggcgtctattgtgtctgcgacgatgccggtggcgctgccatgctgcaagtcatcagggagtactcaacggccgtggtcgcgcatgggctcgccatgaagctcattcctggtgctcgaaatgtgccgtacttgacggtcgatgttgacagggtatctcccgggccaccccggagtcgagggaacggcaagctggtcgtgggccactttccaaaccacggttatttcaaggggacgaagtatctgcaaggcgcaatcgactccctgcaggctgaaggtcatcaagtcgagttcctgcaactgagcggaaggccgcacgatgagattctggcagcgatgcagacgatcgacgttcttgtcgaccagctcatcagcgggtcgttcggcttgacggccgttgaggcaatggcatcgggctgtcccgtcatctgctacctgcacgatggggtcgcggtggccgagcgggaggcctgtccggtcatcgaggcaaatccggacacgataaagcaggtcctgcatcagctgatcctggaccgcgcgcggctttccgacgccggcgctgccggccctcactatgtccgcagaaactactcggtggaggcgctgggcaagcatttggcagatctttatctggcaactgcggacttgccgataccgctgaaggcaagagttgccgaaagcgccaggttgctgaattcgtgatgccgtcaaagcgatgcatgcccgaaaatccgaactggctttgccgtcgcgtcgctcatgcacggagcgcctgaaccagtgtcagtttcctatgtcgaagcgcgcctcgagagccccttgagcccaaccgacgcaacacgcgcgatcgaggctgaaaacgcacgcgcattgcgtctggtcgacgacttccagcgaagaatggggcgaccgctccgggttcttcacatcggcaacatcgccaacaatgcctacaacaatgcccggattcagcgacagctcggcatccaggcggatgtgctctgctataattattaccacatcatgggctgtcccgagtgggaggacggcgcgctgcaggagggatcctcggcgctggggcaggatcatttcaaaccggattggtgggcgaccagcttgaaaggatggaagcggcctcgctggtttgttcaggggccatccgcgctttgcattgaataccttcgcgccaagaacgcaggttggcgaacgacggcatatctgaaatggctggagctggagctgaaggcgcttcaggacgcccgttccggcgacaatgcgggcttccgtgccaagtatgttccccagcatctgagattcctgctctggctcagcggacccggtcggtcgtcgcaagggagcaggcagccgctcagcctgtacagaatatggctgggcactctcgtggcaaacggcgtgctcggtcgtgagggcaagacggacgaattcgaagcgagctggctggacaaaatctcggccgccgcatggttgaggattgcgcgccggggtccgcaggccgatgcggaggcccgggccgcactcggggccctgcgggaagatgttcgctggttgtgcaccggcggattgcgggagagatcgtcttcggtcgcccgttcactgacccacagcttcctggcgctgctcgagcgggtcatgctcaagttcgttccggtttcggaatccggctgcgtggcgcgatcgatgtccgatccggtgacgcgggcgaaggaaatcgaggcgctgctcgatgaaatcaggagggatcccgccgagcttgacggtcagtcacttcgttaccgcgaagagtatgtaacgatccatccgaagcccttcgaagatgtcctgctgcactatgacatcatccagggatatgcgatcgacggactgataccgatgatgaacggcgtcaagaatttcagctgctacgagcacggaacgctgcgcgaaatcccgttcgagaacaatctgaccggattgatctgccggatctcgtttcagcgcgcgcccgcagtctttgtaaccaattcggacgtcctgccgtcggtcgaacgcctgggactggcgaaggacaaggtcgtctaccttccgcacgcgttcgacaatcacaagttgcgcgcattccgtgaagcatacccggagctaaagcccccgacgggcgggccggtgatcttcttcagtccgtcccgccatcattggaaactgggaaattcgtcctggcagaagggcaatgatgtgatcatccgggccgcggccgaagtcgcgcgggagacgagaaacttcaggcttgtgttcgtcgaatggggccaggaagtcgcagacagcaaggcgttgatcgacgaactgggcctgtccgagctggtcgaatggattccggccatgtcgaagcgggagctgtggcagcgctactgcgtatcgcacgcggtggtcgatcaattcgttgttccagcgctcggcggcgtcgggttcgagacgatggcgctgggtgtccggctgatctcggcgatcgacaggcagcagaccgcgttgttcttcggtcaggagccgccgctgctcgcggccggcaatgtcgccgattgcgccggccgaatgcgggaagtcatccaggatcctctcgatacccagggccggggtgccgccgcttcgcaatggatgtcgacctaccattccgcggaaagaatcgttgctctccagtgcaaggcgtacagcaatttgctggtggggcagtggtgatggcgtttcccgcgaggccgatgctgatttcctagagttgccatagaatgatgctcaagcagatatcatctttcatcaagcagtatcctccgcttttccgcgcgctgcgtcccgtattctatttcggttttggccggtggaatgtgctggtctcacagctcgtggtccgccgcgcacagttcgtgcaggcgcgaatcccgaagatgtccgatgcggccgacgcgacgtcgcgaaacaggcagattggccgatctgcctctggtcgcgaggtggtgatgctcgtcgtctccgatctgcgtgtggacccccgggttgaaagagaagcccgcgcgctcggcgccgccggatatgacgtgacggtgatctgccccgagcctgcgaagggggcaggggcaaccttcaatcttgattggggaccgcgcgtccatattcagcacgccgattggacggccgcgacgttcatgagcgagcagccgggttacattgcggaacagctctacctggaagcggtgaagaggaagccatttgcgttccatgcgcatgatctctccacggcctatgccgcgatggcggccgcaaaataccgtggcgcacacctcgtggtcgacttccacgaatggttctcggagaacgttcattggagcacgaagcagtccgcctgggcgccgtatccgccggagtggaagcgggcgctgcaggagctggaggttcgttgtctcaacgaggcgtcggccaccatcacggtgtgcgactcgatcgcggatgcgatgaaggccgagctcggcggcagccgccccgtcgtggtccgtaacattccggatatcgcggttacgccgacgcgcgcgtatccgccgctgaagcagcaactggggctgccggaatcgaccttcgtgctgctgtggcagggaggaaccggcccgacgcgcctgatcgagccgatcatcgaagcccttgcttatgtacccgactgtgttttcgtcatccgggggccttcgctggatctgttcgggcccgactatctggcattggcacagcgcgtcgacgtggagggcagggtggtgcttgctccgccggtgccgtcgaaggacgttgtcgcggccgcccgcggcgcagatgccggcatttggacattgccggcgctgtgccgcaacttcacctttgcgctccccaacaagatcttcgaatacctggccgccgatctccccgtcctcgttgcgcactacgcggaagcgaagcgtcttgtcgaggagaacgcggtcgggttgacgttcgatccctacgatccgcgttccatcgcggaatcgatcaaccgcatggtccaggacaagcagctccgggcagacttcaaggcgagcacgcggacgaccctcgcaaagctcgatgcaaagtcggaatggcagaaggtcgtttcgctctacgagagcctgtctccaaaaaagccgctgcagcgcggatccacgcaatgaaggatcgactgagatcgctcgcgcggcaggttttgccgcggagcgttcgggtctggatgctcacgacctggtcgatcgcgagatcgccggggcggggagccgtcgtgcgccgcaaattccacgcgctgccgctgaagcttctcaggctggtcgcaacgggagtttcgatcgccattctaaagcttgcgacctacgtcgctcccatagccggagccatgcggttgcggcgcggacgacccaggaccttgtggggcgtaacgccgatcctgaccttggagcttaaggccagggctgaccggatgctcggcttccggtcgacgtctcttgtctacgtaacctacgtcatcatgtcgcgcttcgacctgaatctccagcgtccctacgttcgggcgctcagcttcgccctggggctcgcattccagcgcgtggtgctcgcgtgggccttgatgcgatatgacgtgtttcacttcttcgccgaccgcgggctgcttgattcaacgcagcgcttgcagatcaacttcgaggagcttgccgcgctgcgacgggcgcgcaagcgggtctatatctatgcgtatggtgccgatgtccgcacccggcaggcgaccctagcgctcggccgatggaatttctgcgtcgattgcacggaagcgccgaaatactgcacctgtcacgacgcagaggctcagcgctatatttcggaagtggccaggaacgtgacggccctggtctcgctcggtgacatgctgacctacatgccgacggcaaaacatatcaactactggccgctcgatctggatcggttgagtgcggttctccctgacgcgctgtccggtccgctgcgcgtcgcgcacgcgccaaaccacacgcacttcaagggctcgaaatacctggagcggaccatcgaccggctgaagctgcaggggtacgatatcgaatattgcaaggtccagggcgtgccgaacagccaggtgatcgagcttttcgcgcaatccgacatcgtggcggatcagttcatcggcggcgcgtacggctacaccgcgctcgaagcgatggcgctcggcaagccggtcctgagcttcgttagaagtccggatctggtcgaggcgccggaggaatgcccgatcatcaacgcaactccggacgagctcgagcaggcattgctgtggatcctccgcaatcgggagcgccttcgcaggatcggcgagcagggacggcgctatgtcgagcggtggcacggcatctccgccatcgctgcacgactgggtcaactctatcgagagaccgcaaatttccccccgaacgtcgttgaccgcattcggatcgcccaggatcaggaggaagctcgccgcaacgctattgctgtcgccgcgaattgggagcatccgttccaggtcacgcggcagtctgctccggacgatgtcggtgcgctcgcgaggacgataccctgatgaccgacccgcaaaggcgcttctggtgacgtcagtcgacgctttcgccgcaatgatgtcgtcgctacggccgcagccgcaaggcgtcgattggcatcggcgttttcagcaagagcatgggcgggcgctgcgtgtgctgcacctcggcaacatcgcgaacaatgcgttcaacaatgccaggattcagcgccaacacggcatagatgcctatgtcatcgcctatgaaaactatcacatcatggcttgccctgaatgggaggaggcggtgttcgagggggacctcggagatccgttctttcccgagtggaccaaggtcaatctcgggggctaccggcggccgcgatggtttgcttccgggcctctgaaactgtgttgctcgatgattgccgccgaggttggcgggcagtcggaccaagccgatgaagttcgacgcgcgctggatcgcgcccggcaatccgtgagcgggcagacgctgtccgtccgcgcgactcgtcttggccagaagatagcacggcggattcgcagatcgcctgcgatggcccgcgatctcttcctgaggcgcgtgctggcaaaggatgatccggagcagatgcggcttgcggcggtatggcggcaaggcagcgcgccggcttcaccgccgagcgctgccgatttcgccagctaccgggcgcggctcgcgccgctcgtcggtctgctggatcagttcgacgtcatccaggcttacgcaaccgatggtgcttggccgctgctcgcccagcgcccttacttcggatatgagcatggaacgttgcgggcgcttccatttcaggacgatagcctcgggcggctgaccgccaccgtgttccttggagctgaccacgttttcgtcaccaatatcgattgcgtacctgccgcgcggcggctcggcgtgccgccggatcggattacgccgcttccgcacgccttcgacgacacgaaactcatagaattcgggaagcagaatagcgcgatccggcctcccggcgacggtgtcgttgtatttcacccgacccgtcatgattggcgcgacgcggaccccagcctcgtgaagggcaatgatcggttgatccacgcctttgcgagcgtggtgcagcaggcgccggcgctgcgacttgtgatgatcgcctggggacgcgacctcgacgcctcgcgggagctgatacggagcctgggtctcgataacagggtggagtggcttgcgccgatgcgcaaaccggagctttggagaacatatcttcgcagccacgccgtgctggatcagttcgttctcccgtcattcggtggcatcaccttcgaagcgctggcgctcggaaggcgcgtcatcacgaacgtggattcgggcatggcgagggatttcttctccgaagctcctcccatcctgtcggcatcgacggagagtgagattgccgacgcgcttctccggatcgtggccgatcaggacgaccggcatcggatcggcgcggccggtgcagactggatccggcagtatcactccgcggcgagaatcgtcgagttgcaattgactgcgtatcaacggcagatcgaagccgcgcgtgggcatcatggcgatcaccaaggctaacggcacggccagtcttatttgcttaacaagatgaaaatccttcacggccccttcaatatcggcaatcagccctggtcgctctcgcgtgccgagcgcaggcgcggcaacagcagcgacctggtcgttcgcagcggaacctggtttcgctatccggcggacaaggtgctgtatgacgaaacggcaaccgagtttcagaaagcagcgcgtagcgcgtggttcggattgtccgcgctgcttcgctacgacgtgctccactactatttcggcacgacattcctgtacacgggctatgcattcgagggcgtgggccggatgggaccgctgctgaagcggctggtgacgatcgatctccagctggccaaggggctgggcaggaagcggttcatgaccctgcagggatgcgacgcaaggctggcgggggagggcaatcggcgaaatcagtggactatgtgtgccagcgggcgttgctcagcctttgaaacctgcgtcgcgtcactggatgcgcgccggtcccgcttgatcgatcgtgtgctgccgctgttcgaccgcgtgttctatctcaatccggaactggggcacgtcgttccgggcgggcagtttctcccctacgccaacgtggagatcagtcatttctcgcccgagtatccccgcgccgaaggcaggccgaggatcgtccacgcgccgagcgatccgagtatcaagggcacccagatgatcctcgatgcgcttgagcgcctgaaatcccggttcgacttcgagctgatcctggtcgaaaagaagacccacgaagaggcgatggccatctacaggtcggccgatcttgccattgaccaggtgcttgcgggttggtacggcggctttgctgtcgagatgatggcgatgggaaagccagtggtttgctacgtcagggaaaacgacctgcaattcatcccgccggccatgcgggatgatcttgcgatcctgaacgtcgatcccgcacggctcacggaagatcttgcgtccattctcgagcgccgggccgaatggaccgagctgggaaagcgatctcgtcgttatgtcgagcgatggcacgatcccgaccacattgccggggcgatgatcgaggcctatcgcagccccgacagtacgttcgtgctggcgcccgctggcgtcgaggtcgggtagattcagatgtgcggcatttcaggcattttgcattttggctcttgtccggacgcggacgagcgcatccgccgcatggcggccagcatcgagcaccgcggtccggatgacgacggctactatgcctcgcccgacgtagcattgggcttccgccgacttgcgatcgtcgatcttgtctcgggccaccagccgatgagcaacgaggacggcaccgtatgggtcgtcttcaacggcgagatctacaatcaccgcgagctcagaaagcagctcgaggccgccggccatgtctttgcgacggaccactcggacaccgaggttctggtgcatggctgggagcagtggaaggacgggctgttcagcaggctgaacggcatgttcgcctgcgcgatctgggacgagcggcagcgtgagctggcgatcgcccgcgaccggtacgggatcaagccgctctacgtcgcggaactgcccggcaagggtctcgtcttcggctcggaggtgcgtgcgctctacgccagtgggttgatcgacaagcagttcgatgcgtcggcaaccctggagtacttcacgctgatgaacaattggggagggcgcacgccgttccgcggcgttcgtctcctcaagccgggtaccttcgagcgatttgcggcgagtggaagttcgagcggcacctattggtcgccgtcctatcatcgcaaatactcgcccggtttggcacgggcctcgggcgagtttggcgagatattgcagtccgcgttgcggagacagttggccgcggacgttccggtgatggcgtatctatcgggcggcatcgacagttcggcaatcacggctggtgcgcaccagatcgatccggtggtccgcgcctattcgtgcatcttcgatctcgagaatgtcggcgtcgacaaatttgtcgatgagcgcgagttctcgagggcggtcgcaaagcagctcaatatcgaacgcgtcgaactcatggtgccgcaggacgcgctggtccgtcacctggatgcgacggtcggcgcgatcgaatatcctcgcatgggaatggcctatgtgaattatctgatcgcgcaacgcgtcgctcaggacgccaaggtcgttctgtcgggtacgggcggtgacgaagtcaccggaggatatgtcggcagatatgccattgtgccgagggcggctccggcttccctgatgcgacgtgcccttcagcgtcttcgcgccggagcggcgggtcgggcggcctcaagcgatgcctttgccctctaccgggcaagcctcaatgtcccgatctcggcggagcgcatcaaggatgcctttacgccggagttcttgcgagccgcgggaggtttcgatccgctcgccgcgatcggagatgcgatcggctcggttccgtcgcaagacccttgggacgtcatcatgcacgtcgatatgaccacctaccttccaggccttctggctctggaagacaagctgtcgatggcgcattcccttgaggcgagggtgccgctgcttgataacgagctggtcgactatctgctcaacgtggactggagcctgctgtccgacggctccacggggaagatcctgtttcgcgaagccgtccggccgctggtgcccgatacgatctaccggaaaccgaagatgggatttggtcctccggacgcatcttggtacaggggcattctgcgctcatggatcgaggagcaactttctgaatcccgcatcaggcagcgcggcgtgctccagtatgacttcgtacgtcggattctgaacgaacatttcgaagacagggcaagccatgtcgcgctgatctggtgtttgctcagcttcgagtcctggtgcaagcaacacggcgcctatggcggtgccctccattagttgcagttgtaggagctagatttatgcgaaccgttgcgtcttcacgtctccgtccgaacggaatggagcttcagctcgaggctttcacgcaacaggacggccagattatcgaaggcatccttcggacgcccgatgcatcgctgtggtatccgatcctgcaaggggttccctgcttcctgagcggcccgatgcagcccgacctgagcgagttctgctcgcgctacggcttgccgaagccggcgaccgcgcagagccggccggaggcccatgagcaggccaagacgaaccagaccttctcggacaagtggcgccgcttcaagcaatacggactgcaacccgagcacaaggaattcctgtttggttggtattgcaagaagctcgggctgcccgatctggacgccttgaaggcgttctaccggtccaagcagcgcgtgctcgaggttggtccggggtcgggcttcaacacccggttcatcgccgagaactgcccgggcgaggtgtttgcgctcgacgtgtccgacgcggcattgacgacattcgagaacacccgtgatctcgagaactgttcggtcgttcaggccgacttgatggaagcgcccttccccgatgatacgtttgacttcatcatcgcggacggggtgctgcatcacacgccgaacacccgggcggcggtagaagccctgtatcgaaaggtcaggcccggcggccaattcttcttctacgtctatcggaagatgggagccgcgcgggtattcgccgacgatcatatccgccagaatttcatgctgctctccgcggaggagtgctatgcggcctgcgaaggcatcacggagctgggccgtgaattgtcacggctgaatgccacgatcacgctggagaagccgattccggtgcttggaattcccgcaggaacgcacaacgtccagcgattgctgtactacaacttcctgaagtgtttctggaacgaggcgttcgactacgaaacgaacaacatggtcaacttcgattggtatcatccgcacaacgcctggcagcatagcgatgaggaggttgcaggctggatgaaggaactcggggtcaagagctacaccttcaacgactccaatccgaacgggatctccgttttgctgacgaagccaacggtctgacacggcatgcggatattattgacaggctgtaccgggtttgtcggttctgccctcgggccccggttggtggccgagggacacgagcttttctgcgtttgccggccaggaacgtcggtcgcgttcggaacggccgtggtttgggatggagcgacggcgatcgaggattccagtttcccaaagatgatagatgttgtcgtccatgccgctcaatcgaggcgctaccgcaattttccagctgactcgcgcgagatgttcgacgtcaacgtcaacatgacgatgcggctgctggattgggcggctcgggccgcggccaagcacttctgcctgctttcgtcgggggcggtgtacgagccgtttacgggagctctgcgcgaggatgtcgccttagcgccttccggattcctcggcgcaagcaagctagcttctgaaatcgtcgcgaagccgttctccagtatcttttccgtgaatactctgaggttgttctttccgtacggcccgggtcaacacgacaggctgattccgcagctgataagcaggatccgggacggcgcggcgatccagctctcgggcagcaaggatggaattcgcctcgcgcccaccttcatcgacgacattgtcgaggtcattctcgcaagcattgcttcgtcatggacggacacgctgaacgtggcaaactcagaggtgctctcgatccgccagatcgcgaatgcgattggtcgggagctcggcgtcgagccgaagttcgagatcgtgaatccgaacacgccttccgtcgatatcgttcctgaactggatcgtctcgcatcccgcgtggatttgcggcgatttgtgcagttcggggcagggctgcataggatgatatccgcgaattctcttgatgtgccggatcatcgtctggccgagacgcaacaccgctcgtgaagccatgacgctgaagatattgaccatcgttggtgctcggccccagttcatcaaggcggcggccgtcagtcgcgcgatccgcgcgaccgatgggctctcggaagtgatggtgcacactggccagcatttcgatccgaacatgtcggacgtcttcttcgaagagctggacattccgcggccgcgccatcatctcgatatccacggcggcggccatggcgatatgacgggccgcatgctgatggcgatcgagccgatcatgctcgccgagaagccggactgggtcgtcgtctacggcgacaccaattcgacgctggccggctctctcgcggcgtcgaagttgcatattccggtcgcgcatgtcgaggcgggacttcgatcgttcaaccgccgcatgccggaggagatcaatcggctggtaacggaccatctctccgctctgcatctctgtccgacggcgactgccgtcgccaacctagccgccgaaggcgtaaccgccggcgtccatcatgtcggtgacgtcatgtacgatgcgaccttgttcgtgaccggcaaagcagagaagagctcgacgatattgaccggtctcgggctcgccccgaaggcctatgcgctcgcgacgatccatcgtgccgagaacactggtgatcggcagcagcttctggcggtcgtgcaattcctccaggagcggtcacgaaagtttcccgtcgtgctcccgctccacccacgcacgcgacaggcggccctggctttaggggtcgacctagacggcttgaaggttatcgacccggtcggttacctcgacatggctaagcttctgcacaacgcggttgaagtttatacggactcgggaggggtgcagaaggaggcttatttccatcgcgtcccgtgcatcaccttgcgtgacgagacggagtggacggagacggtcacgcacggttggaaccggctatggaagcagccgggccatgcagttcaacgcgatattgacgagtatgggactggtcgtgcggcctatgaagtcacgcgcctgttgagcgttggcggccctcgatagccttgccggccgacgctgcggtcggagcgccgcaatcgcaagcgacactcccgcctggtgcgtaccgcagcgcctgaagaggccccgagggcggcttccggggttgtggctttgccactatggcgctatcagaggccgaattggatgctcctcaggccggttatccgtatcaaccccgtacgagtgctaaaatgaattccgaactgatcgcaaagctcaacgatagaacggccaagatcggcatcgtcggtttgggctatgtcggcttgcccttgatgctccgctattgcgaggtgggctacaaggtgatcggctttgatatcgaccagaccaaggtcgacgcgctccacgcaggccgctcctacatcgagcatatttcgagcgccagcattcgcaatgcgacggagcttgggttcgagccgacgaccgatttctcacgcgcgcgggaggtcgatgcgctgatcctgtgcgttccgaccccgctcaataaatatcgcgagcccgatctcagcttcgtgctggatacgacggagtcgctgctgccatacctgcatcagggaatggtgctgtcgctcgagagcacgacttatcccggcacgaccgaggaggagttgaaaccgcgtatcgagaagcgcggcttcaccgtggggaatgatgtgtttctggtgttttcaccggaacgcgaagatcccggtaaccagaatttctcgacccggtcgatcccgaaggtgtgtggcggctgcacgccggcatgtctggaggctggcattgccctgtatggccaggtgatcgacaaagtcgttcccgtgagctcgacgcaggccgccgaactgacgaagctgctggagaacattcaccgctcggtgaatatcggtctcgtcaacgagatgaagatggtcgccgacaagatggggatcgacattcacgaggtgatccgcgcggcggcaaccaagccgttcggatttgttccgtactatcccggccctggcatcggcggccactgcattccgatcgacccgttctacctgacctggaaggcgcgggaatatggtatgcatacgcgcttcatcgagctcgctggcgagatcaattcctcaatgccggaatatgtcgtgtcgaagatctcgctggcgctcaatcagcgacacaagtcgatcagcggcagctcggtcctggtgctcggtatcgcttacaagaagaatgtcgacgacgttcgtgaatcgccttcggtgctattgatggagaagcttcgcgacctcggcgccaaggtcgcctacagcgatccgcacgtccctgcgttcccgaagatgcgcgcgcattcgttcgacctgtcgagcgtcgcgctcaccgaggacaatttacggggcttcgactgcgtcctcctggcgaccgaccacgacaagttcgactatgagctgctccgcgcacatgctccgctgctggtcgattgccgcggaaagtttcctcggcgtgcggacaatatcattcgcgcgtgaggatctcgcaggcgctccggcgatccctcgcgccggacgacttgtctgggaacggcggactggcgaactttggagcgccgcgctagccagtgcttgtcgcttgtagattttcgctcacagcggccttcggcgcctggtcgaaggccgaccgtggcgcgatgtaccagagcaggaacagcagcccggtgccgttcgtcagcaaagccgtcgaaagcggcacgttgaggagcacctggggaagcagtccggcggagagcagcacaaattgcgacggcaagccggccgacaggcggttgccgagagcgatgatcagtccgcagcccagcgcggacagcggcgccagcacgaggccgaccgaagcgatcccttcggtggcgaacagcgaagcattgaaggcgcctagatcgtaggacctggccatgacggcccatatcggctcgttgtaggcgcatggaaccacgagcttcagcacgttgatctggcagaaatgggtcagcgggtgcgctgagaagtagttgttgtagatttcaagggcgagcgacgggatcgcaaccatcctggtgttgacggtgccgaaataaaccaatccgggtgtgagcggaaacacctcggccttgaccaggacgaacaagatgacgccgatcaggacaggcaggaagaacgacagaatcgttgcgagcctggcctcggccaccagcttgcagacgacggcgaggaacagcagccagaccggagcaaacaacgccatcttggtcagcatgatcgggtagaacagaagcatcagcagcagggcgatccctgcctgccagatccgcttgctggtgacgaagcaggcaaaggcgagcggcaacagggcgttcgagacgatccagacggcgtattgcaggacacctggcaacgccacctccgcgcggtatttgtacatctcggagaggttgactagcttgaggctatagagagagccgataccgatgatggcggctgagccgatcaggatggcggatggcatcatgtgaaacgcgcgggccggcatcacgacagcctgtcgcaccgggctggtgatgaacagcgctggggcgaggaatgcaaaggccgagagtacgatcgaggcaagcgccaggcggtgatcgtaatcgagtaacgagaattcgatgagccagagatagcccaggaccatcacgtagaagtagaagccgacgagatagccaaagctgaagcgtccgattacgaacaggatcacgaccgggctgaatgccacgacgttcagaattgctgccgccaggtgcgacttctcaaagccgatgacagccgggaaggaattggtgatcgtgatgcaatacagcgaaacggcgcaaaccacgatgtgggcataggcgagcagggcaagtctggcctggcgccaaccgaaaccgggctccagctgaatagcgcgatcgttcattctcatctaccgccgtgtcggactgtgcgttgagaccgtttcattggtggttgtcgtattcggcagactaagcccacgcgattgccaaccgatgttatgtcttggaccaagggacatggcacggctcgaacaggacggcaagaatgatgcccacacggcattctattgctcccgcccaatagcacaaatttcgtgtgctgcagcgacgcgtccgagcgcggttgaatttgtgtgatgtggtcttgatgccgggatgcggtgttttcggattatcctgttgcggctccggcgggccggtgggggattccgcacccgtagtgttcagttcgtcgtgacattccgaggcgcgagtgtcgggcgcgggcgacccgaatcgggtccctgatcgcgtggccttgcgttaacccgggttttctgggtaatggaacgctatcgtgcggctcgcagggccgcttgttccctcggcttttcggctggctgcaacggtcggccgcgagacaagacagggcctgttgcatgatcagattcggcctgctcgggtgcgggcgtatcgccaagcgccattccgacctcctgggtggcaatcacatcgcgggagcaagcctggttgcggtctgcgatccgatccgcgcgcgggcggatgcggttgccgggaagttcgctgttccggcccattacgacatggacgaattcctggcacgcaaggatatcgacgcggttgccgtgctgacgccgagtggcctgcaccccgcacatgtgatcgcctgcgcgaaggccggcaagcacgtcgtggtcgagaagccgatggcgttgcggctgcaggacgccgacgacatgatccgggcttgcgatgaggccggcgtgaagatgttcatcgtcaagcagaaccgcttcaacgttccggtggtcaaggcgcgcgaggcgctcgacgccggccgcttcggcaagctcatcctggggacggtgcgggtccgctggtgccgcgaccaggcctattacgaccaggacgattggcgcggcacctgggcctatgacggcggcgtgctgaccaaccaggcgagccaccatgtcgacatgctggagtggttcttcggtgacgtggtgagcgtgcatgcgcgggcgacgacggcgctggccaatatcgaaaccgaggacaccgctgtggcgacgctcaagttccgcaacggcgcgctcggcatcatcgaggcgaccactgcggcgcggccgaccgatctcgagggctcgctgtcgatcctcggcgaaaagggcaccgtcgagatctccggcttcgccgtcaaccagatccggcactggcgctttgtcgacgaactgccgtcggacaaggacgtcgtggagaagttctcggtcaacccgcccaacgtctacggcttcggccatcaggcctattatcaccacgtggtcgattgcctggagaaccagcgcgccgcgttggtcgacgggctcgagggccgcaagagccttgaactgatctcggccctctatgagtcgatcgagaccggcgaggaagttgcgctgcggttcacgccgcggttgagccggctgggtgtcgtttcgtgaatcgaccggacgtgcatcaggccagcgtgcgcgacgtcgcgttcggcgaacgcgtcaagatcgtcgagccctgcaatctctatggctgcaagctcggcgacgactgcttcgtcgggcccttcaccgaaatccagaagggcgtggcggtcggggcgcgcacccgcgtgcagtcgcacgccttcatctgcgagctcgtcaccatcggcgaggactgcttcgtcgggcacggcgtgatgttcgtcaacgacaccttctccaccggcggaccggcgcgcggacgcaaggagctgtggcgcgagaccgtgatcggcaaccgggtgtcgatcggctccaacgccacgatcatgccggtcaggattgccgacgacgtcgtcatcggcgccggatctgtcgtgaccaaggacatcacgacaccaggtacgtatgccggcaatccggcgcgccggctgctggcgagccaatagggcaataggggaatatcgatggctgtgccgtatgccgacctgcaattgcagtaccagtccatcaagggcgagatcgatgccgcgatcgccggcgtgatccgcgataacgccttcatccgcggcagctatgtcgacgccttcgagcgcgagttcgcgtcggccgcggaagttacgcactgcgtctcctgcgccaacggcaccgacgcgctttacctcgcgatgcgcgcgctgaaggtgcagccgggcgacgaggtgatcacgacggcgcattcctggatctcgaccgcggcgatgattacgcattcaggcgccaccgtcgtgttctgcgataccgacgacgcgacgttcacgatcgatccggcagcgatcgaggctgcgatcacgccgcgcacggtcggcatcatcccggtgcacctgtacggccagccggccgacatggatgcgatcatggcgatcgcgcacaagcacaagctttgggtgatcgaggattgcgcccaggctcatctcgcgcgctacaagggccgcatggtcggcacgttcggcgaggcggcgacctattcattctatcccggcaagaacctcggcgcgatgggcgatgccggcgccgtcgtcaccaacgatgccgcgcttgccgagcagatggccatgctggcgcgccatggcggcctggtgaagcaccagcaccatatcgagggcgtcaacagccggctcgacggcatgcaggctgcgatcctttcggccaagctgccgcatctcgacgcgtggaccgaggcccgccaggccgcggccgaggtctatgatgcgggtctcaaccagatcgaggatgtcgtggtgcccgaggtcgcgccggggcgcagccacgtctaccacctctacacgatccggcatccgcgccgcgacgcgctcgccgcgcatctgaacgccaacggcgtgcagaccgcgatcaactatcccaccgcgctgccgttcctgccggcctatgcccggtttggccaccggcccgagcaatttcccaacgcccatcgcgaccagggccagattctctcgctgccgatcttcgccgagatcacgcggcagcagcaggacgaggtgatcgacctggttcggacgttctgattgcgaccgttgaggctcagcttcgctgcagcagaggcttcaggaacagctccagattggagcccgggaacaggtggcctttcaggcccgccgcacgcgcggcctcgaggtcggtcggttgatcaccgaccagaaagcttcgctcgacatcgacggcaaagcgctccagcaggtcattgatcatgcccggcgatggcttgcggcgatggctgacctgccgatagcgctcgacggttccgtcaggatggaacggacagtactcgaaggcgtcgatatgggcgccgatcttgccgagctcggccgccatccagtcgtggagcttttggacatccgcctcctcgtagaggcctcttgcaacgcctgactggttggtcacgacaaacgcataataacccatgtcgttgaccgccttcacggcctcgcgcgcgccgtcgatccagatcagcctgtggctctcgaacagatagccgatgtcccggttcaggacgccgtcccgatcgaagaaaaccgccggccttcgccgctgatctccggaagcgctgctcatgaggtgatgatcccgtctccacgaggcatgagtcagctcaatagttcacaatgccgcgcgcgacaacgcggactggacctcatgcggggcgtcgatcatcgttcgtccgcaatcaccttgccgtcgttcggcagcgagcctgcgccgacgagctcaacggcgccgccgagctttgtcaccgcacgcagcgtcgccgcgacttcgccctgcagggcatccgccgccgaggtacattcggcccgcagcgtcatcgcgtcggtctcgccggcgcgggtgacgacgaggcgcagccgtccgagctcgggatggcgcttgccgatttccgcgatctgctccgggcgcacgaacatgcccttgaccttggtggtctggtcggcgcggcccatccagcccttgatgcgcatgttggtgcgtccgcacgggctcgcaccgggcaggacggcggtcagatcgccgagcgcgaggcgaatccagggatgatgcggatcgagcgaggtcaccacgatctcgccgacatcaccgggcgccacgggatcgccggtgcccggcttgacgatctccaggatcagatcctcgttgaccgtcatcccctcgcgcgccggggtctcgaatgcgatcaggccgagatcggcggttccaaacgcctggtaggcctcgacgccgcgcgccttcatctcctcctgcaacgatttcggaaatgcggcgcccgagaccagcgcgcgcttgatcgacgagacgtcgcggccggcgttagcggcggcgtcgagcaggatcttcaggaagtccggggtgccgctatagccgaccgggcgataggcctcgatcagctcgaattgctgctcagtattgccggggccggccgggatcacggcacagccgagcgcccgtgcggaggcgtcgaagatgaagccgccgggggtgaggtgatagctgaaggtgttcagcaccacgtcgccctcgcggaagcccgccgcaaacagcgcccgtgccccgcgccaagggtccgcctggcggccttcgggctcgaagatcggtccgggcgaggtgaacaggcgggcaaaggagccgggcttgtcggccacgaagccgccgaacggcggggcggctttgtgcagggccgggagctccgatttgcgcagcaccggcagtcccgccaatgcctcccggctcgtgatggatgcgggatcggtgccccgcagcaaattggcataggcgggcgctgccatcgccttgcgcagcacctccggcagccgggcgaacagggcggcctcgcgggcggccggatcgcgcgtttcaagggcgtcgtaatggtcggtcatggcgggtccttgaggggaggatttgcgcaggtggcgtgccggtctgcccgtgctatcagacggtgagcgctgacattgggacggttccaggaagcacgatggctgaggcagagaacgtggcggcggacggggccgccgatgtcgtcgcgaggttgaagcgccgcatcatcgaccacgccttgccgctgtggtcgacggtggggtgggacagcacggccggcggcttcgtcgaccggctgcatcaggatgggacagccgacaacgcggccccgcgccgcctccttgtgcaggcgcgccaaatctattgctacgccaaggcggcccagatgggctggtatcccgaagggcgcgcgatcgcgctgaaggcgctggattacatgctcaccaaggccaaggcgccggacggccggccgggctttgtgttcagcctgacgccggagggcggcgtgcacgatccgctgcgcgacacctacggccatgccttcgtgctgctcgcactggcgactgtctacggcctcgaccaggacgctcaggttcgcgccgagatcgacgcgctgctggcgttcctcgacacccagctgcgctcgccccatggcggcttccaggaaggcctgccgccgtcgatgccgcggcggcagaacccgcagatgcatctgttcgaggcgatgatcgcctgcttcgacgcgacgcatgatctgtcgttccagaaccgcgccggcgatttcttcgcactgttcctcgccaacctctatgacaagcagacgcggacgctgggcgaatatttcgaggaggattggtcgcggatcccgccggtcagcgtcgagcccgggcaccttgcggaatgggtctggctgctgaagggttttgagcggatcaccggctgcccaacagggcgcccgcgcggcgagctgctggcctcggcgctgcgctatcgcgacgccaccggctgcctgatcgacgagggcgatgccgagggcaacatccgccgccacaccaggcggctgtggccgcagagcgagttggcgaaggcctggatcgcgcaggccgagtcgggcgaagccggcgctgcggacgaggcgcgcggggcgctggtgctgctggagcggcactatctcagccatcccgtggccggcggctggtacgaccagttcgacggcggcggcaattcgctgatcgccacgatcccggcgtcgtcgttctaccatgtgctctgcgcggtcacggaagcggagcaggtgctcagctagggccgccttcctggtgtgacgcgctttctgcacacgcaactccgcccgaaaacgctccatatcctcagagccagcgcttgcgccgcttgaagctcttcaaattcttgaagctcttgcgctggtcgccggcgccgccgaggtagaattccttgacgtcctcgttgtcgcgcagctcgtcggcggagccgtcgagcaccaccttgccctgttccatgatgtagccgtggcttgcgaccgagagcgccgcgcgcgcattctgctcgaccaggaggatcgtgacgccgagatcgcggttgatctccttgatgatcgcgaacacttccttgaccagcaggggtgacaatcccatcgacggctcgtccatcaggatcatcttcgggcgcgccatcagcgcgcggccgatcgcgagcatctgctgctcgccgccggagagatagccggcaaggccggtgcgctccttcaggcgcgggaaatatttgaacaccatgtcgatgtcggcagagacctcgccgtcgcgccgggtgaaggcgccgagccgcaaattctccagcgacgtcatgtcggcgacgatgcggcggccctccatcacctggaagatgccgcggcggacgatcttgtccgggtcgatgccgttgatgcgctggccctcgaacaggatctcgccgcgggtgacctcgccgtcctcggtcttgagcaggccggagatcgccttcagcgtggtcgacttgccggcgccattggcgccgagcaacgccacgatcgcgcccttcggcacctcgaggctgaggccgcgcagcaccaggatgacgtcgtcatagacgacctcgatattgttgatgctgagcagcggcggcggtgggaccgccatcggccccgtgcgggtggcttcgagggtttcgttcatctcgactattctccgctgtcgtcacccgcgtttcgtgcgcaattgcgcactcgagcgggtgacccagtattccagagacgccggcgatcacatcgtgagagcgcggcgaactgaatcccccgctttcgcgggggatgacgattgttgtcgaggctgcgctcgcggcagcctcacgatcctcaccagccgaaccattccggcttgcgcggcagctcgacggtcttcactttctcgagcttgatcgtgcccttgcccatcaggtcgttgatgtcgccgtcggtcgcgccggaaaccttggcgcgatagagatcgaccttggtcgtcgggcgatgatccttctcggtccagttcgagggattgcagacgccgtccatcccggccggcacccagtccttcttctggtagaagcccttggcgacgttctcgccggtggcgccgccgttcttggcggcccagtccagcgcttccttcatgtagagcgcgctgcacaccgcggcgatgtagtgcaccgggcgatagaccttgcccgacgggtcggacatcttcgagatttccatcaccgtcttcatgcccggcgcgttgccgccccagccgaccgccgtgcgcagcgggaagatcacgccgtcggcggcatcgcccgcggtcttggcggcgttctcatccatgccccagacgttgctcaggaactggacgtcgacgccggcggtcttgcaggccttcatgaccgagatgttggaggctgcggtgttgccgagataggcgtaattggcgccggagctcttcaggctgaggcactgcgccgaatagtcgccgggcgacagcgcgaacaccagcggcggcagcacttcgaagccgagctcggttgcgagcgcctcgccggcggccttcggcgcgttcggataggggtggttggcgcccatgtggacgaatttgggcttgcccggcttgcccttggccttccagtcctcggccgcccaggtcaattcggcgcgcagcgcgtccgagtagctcgggccgtagaagaaattgtacggcgccggcttggccttgccgctggtgccttcgggatcggtcagcgcggcggcatacgagcccgacaaatcggggatcttgtcctgcgcgaggaagccggtcagcgcctcggtgtccgcggtgccccagcccatgattgctgcgaccttgccgtccggcgccgaccatttcttgtacagcgcgatcgcgcgcggcacctggtagccatagtcgttgctgtcgacgctgagctgcttgccgccgacgccgccgttcttgttgacccaggcgaaggtgtcggcgacgccctggccatagggcgtgccgacgtcggaagtgccgcccgagaggtcctgcagatggccgatggcgatctgcgcctgcgcggtgccggcggcgctgccgatcagcagcgcgagagagaccgagctcaaaagggatctaatcgtcatttttgtttcctcctgcttattcgttgaaccgaattttgagttgctcgatacgtcagtgcgagaacgggtaaagcttccagtaggccttgatctgccgccagcggtgcgcgaggccgtcaggctcgaacatcaaaaatccgatgatgatcaggccgatcgcgatctcgcgcaggaacgtgatgttgttgttgagctgcagcgccttgtcgatggcgccgcccttcagccacgcgctcagccattccatcgattccggcagcagcaccacgaaggcggtgcccatcagcgtacccatcaccgagccggtgccgccgatgatgaccatcgcgaggaacagcaccgagcgctcgatgccaaagccctcctgcgagaccaccagctgataatgcgcgtacagcgcgccggcgatgccggcaaagaacgcggcaagtccgaacgacagcgtccggtacttggtcaggttgatgcccatgatctcggcggacagatagtgatcgcggatcgcgaccagcgcacggccgtcgcgggtgcgcatcaggttggtgacgagaagatagctgagcaccatgtaggcgagcacgacgtagaaatattgccggtcgccgcgcagcgtgtagccgaagatcgagaacgggttggcgctggccggcaccgagccgcccgagaaccagtcggcgcgcgagaagaaatcgagcaggatgtactgcgcggcgagcgtcgcgatgacgagatagagccccttcagccgagccgccggcacaccgaagatcaggccgaccagcgccgtcaccacgccggcaagcggaatcgcgaagaacaccgggatcggcaggttgttggagatgtaggccgaggtgaaggcgccgaacaggaagaacgcggcgtggccgatcgagatctggccggtgaagccgaccaggacgttgaggccgagcgcagcgatcgcgaagatgccgatctggatcgcgatcgagagcaggtagttggacagcagcatcggcgcgaagcaggcgagcacgatgccggcaatcgcgaaattgcggctggtcgcggtcgggaagatcgtggtgtcggccgcatagctggtgcggaaatcgccggacggaatgagtgtacttgtcgccatggatcagacccgctcaatgtccttggtgccgaacaggccgtacggcttgatcatcaggatgatgatcaggacgtagaacggcgcgatctcgtagagattgccccagtgcagatactcgctgtcgacatactgcgcgacgttttccaagagcccgatgatgatgccgccgagcacggcgccgccgaccgagtcgaggccgccgaggatcgcggccggaaagaccttgatgccgtaggcggagaggccggacgacacgccgttgaccacggcaaccacgacgccggcgaccgccgagacggtggccgagatcgcccaggccatcgcgaacacgctcttcacggagatgccgagcgactgcgcgacctgctggttgaaggcggtggcgcgcatcgccaggccgtatttggaggcgcggaagaaccaggccatgccgaccatcatggcgagcgagaccacgaggctcatcacatagacggtctggatctgcagcccgaacaggctgatcgactggctctggaatatctgcggaaacggctgcgggttgacgccgaagatccacttcagcgcggcttggaacacggtcgacaggccgatcgtcaccatgatcaccgagatgatcggctcgccgatcatcgggcgcaggatcacgacctggatcgcgatgccgaagatgaacatgaacaccagcgtgatcggcataccgatccagaacggcagctggtacttggtcagcagcgcccagcatacccaggcgccgaccagcagcagctcgccttgcgcgaagttcacgacctgggtcgccttgtagatcagcacgaacgacatcgcgaccacgccatagagcgtgccgaccacgaggccgttgacgatcagctggatcaggaactgggtgttcatggggtaccgtgctatcttcgcctctccccgcttgcggggagaggccggcgcgctgccgtcgatgcgaagcatcgtcgggagtgcggcgggtgagggggagtctccgcatgcgcggtgctagagagtctaaaaccgaacgcgcgaggaatctgcgaagcgcgtcgacggatgcggaaggagcgctctggtaccggctccgcggtcgcaggctgaatggttacaagttcgtcagacaggagccgatagggccttacacggtcgattttatctgccgcgaacatcgcctcgtgatcgaggtggatggtggacaacacgccaacagtcagaccgacgccgttcgcgacaaatggctcatcgatcacaaataccgggtcttgcgcttctggaacaacgagatctccggcaatttggctggtgttcttgaaaccattctcaccgcgcttgcggaggctccccctcacccggatcgctgacgcgatccgacctctccccgcaagcggggcgaggtgaaggtctgtgtatgacgcggacacagtcattccgcggcctccgcgatcgcagcacggccgagatcgaccacctgcaacgtggtgcggacgcgttgcgtcgtgccgtcctggaaacggatcacggtgtcgacgggaatgttggccttgccgcggtagatcgcctcgatgatgtcggcgtatttctcgttgatgacgctgcgccggacctttcgggtccgggtcagctcgccatcgtcggcatcgagctccttgtacagcagcaggaagcgtgagatgcgctgcgccggcggcagggtagcgttgacggtctcgacctctttcttcagcagcgcgtagacttccggccgcgacgacaggtcggtgtaggtcgtgaaggagaggcggttcttctccgcccatttcgagatgatcgagtagcggatgcagatcatcgcggccagtgcgtcgcggccggcgccgagcacgacggcttctgcgacatagggcgagaacttcagcttgttctcgatgtattgcggagagaaccgttcgccgcgcgaggtctcggcgagatccttgatgcggtcgatcacgacgagctgccggttgtcgttgtagtagccggcgtcgcccgaatgcatccagccgtccttgatgtcggcgaccgaggcttcggggttcttgtagtagccgtggaacatgttcgggtgccgcaccacgatctcgccgacgccgttgacgtcggcattgtcgatgcggatctcgatgttgtcggccatcggtacgccggtcgtgtcgggatcgaccttgccttcgggatgcagcgtgtaggcgccgagcagctcggtctggccgtacagtgtgcgcagcggcacgcccatcgcctggaagaacttgaaggtgtccggcccgagcgccgcgccgccggttgccgccgagcgcagccgggtgaagccgagccggtcgcgcagcgcgcggaacaggatctggtcggcgaagacagagcgcttgccctccgcgagcgccgcgagcccggtcttcatgccgagctcgtagagccgctgcttgaacggcgaggcgtccatcacgccggcgcggacgtcggctgcgatcgattcccagacccgcggtgcgaacagcacaaaggtcggcgcgatctcgcggaaatcgtgcatcatggtgtcgggctcttcgacgaagttgaccttcatccgggagagcagcgctttgccgagcgcatagatctgttccatgatccacggcagcggcagcaccgagacgtattcgtcctccggccccttcggatcgaaggaaagataggtcgcgcaatgccgcagcacgcgcccggccgagagcatcgcgagcttcggattggccgtcgtgcctgaggtcgtgcagaggattgcgacgtcgtcgccatcagtggcatcgaccagccggtcgtacagatcaggctcgcgcgcggcgcggtcgcggcccagcccaacgagcttgctcgcctccatcagcctcggatcgtcgtatttgcgcatgccgcgcggatcggaatagatgatgtgcctgagattgggcacccgatcggcaaggccgagcagcttgtcgacctgttcctcgtcctcggcgaagacgagcttggcctcgccataggtcaggagataggcggcttcctcgtccagcacgtcgcggtagaggccgaggctcatcgcgccgatcgcgtgggtcgcgatctcggcggcgacccagtctggccggttgtcgccgatgatgccgatcacgtcgtcgcggccgaggccgagctcgaccatgccgagcgcgaagtcgtgggtacgggtctgatagtcgttccaggtgaattcgcgccacagcccgagatccttctcgcgcagcgcgatctcgccgccgtgctccctggcgttcaggcgcagcatcttgggaaaggtgtcggcctgcgcggcgcgaccggcataatccatcatgccgcgctctcccgcactgccggcttgtcgtcggggtcgaccagcacctcgtcctcttcgccgagataggcgcgcttgacgtggggatcggcgagcacggtcgccggatcgccctcagcgatcttgcggccgaagtcgagcaccatgacgcggtgggagatgtccatcacgacgcccatgtcgtgctcgatcatcatcacagtcatgccgaactcttcgttgagatcgacgatgtagcgcgccatgtcttccttctcttcgaagttcatgccggccatcggctcgtcgagcaggatcagctgcggctccagcgccatcgcgcgggcgagctcgacgcgcttgcgcaggccgtagggcagggtgccggcggtcgccttgcgcaccgactgcagatcgaggaagtcgatgatctcctcgaccttgcggcggtgttccagctcctcgcggcgcgcaccggtcagccagtacagcgagcccgtgatgaagttgttcttcaggaggtgatggcggccgaccatgatgttgtcgagcacgctcatgtggtggaacagcgcgagattctgaaaagtccggccgatgccgagacggggccgcgcgttcggggtgaggccggtgatgtcctggccgcggtagaacagctggccttcggtcggccggtagcggccggagatgcagttgacgatcgaggtcttgccggcgccgttcgggccgatgatggagaacagctcgccctcgttgacgctgaagctcacatcggtcagcgcgcggacgccgccaaagcgcaatgagactccgcgcacctcgagactgttggccaccctgttccctccagatacgggcgctttggcgcgctctttatctttcgtttcgagctcggttcgatcttacatgggccgccgaaggaaaccatccgactaatgatgccggcgtccgggagcatcgctcgccccgatcgcctgcgtcatgcgcggtaacgccgcacccgcctgcaagcccgctcgcgcgtcgtccgccttcagcgatccatcgaagcgctgcacgcggcgttacgcgaggtggctctgaatacgagaaagcgataggttgaattgtcatgtgcccgacatttggtcaggaattttcgctggcattccaggcctcgggtccctggcttcgtgcacggcgttgctgcggtgcaatatcttgggtgggatgccgtcgctagaatgattgctgctgattacctgaagcgcatcgcggcctggtcgcgcgaactgaccgagcaagagatcgagatcgcgcgcgccggcatctccgagaagtcgtaccgcgccaacgaattcatcttcatgcgcggcgacaatttccagtactggaccggcatcgttaccgggctggcgcggatgggcatcgtctcgcgcggcggcaaggccgcgagcttcgcgggcctcacggcgggcgcgtggttcggcgagggcactgtgctcaagaacgagctgcggcgctacgacgtggtcgcgctgcgcgatacgcgcctcgcgatgatggatcgccggaccttcgtctggttgttcgagaacagcgtcggcttcaaccgcttcctggttggacagctcaacgagcggctcggccagttcatcgcgctgctcgaatatggccgcacgctggatgcgaccgcacggctggcgcgctcgatcgcctcgctgttcaatccgattctctatcccgagcttaccctgcaccttgaaatcacccaggaggagatcggggcgctgtcgggaatctcccggcagaacgccaaccagtgcctgaagcggctcgagcgcgaggggctgctgcggctcgaatatggcggggtcacgatcatcgagctcgaccggctgcgccactacggcgagtgagccggccccagaccgctttgaatcgggttttcaaagctttaaggccctgattccaaacgattatgccattagacttggaggtggccgggtgctacagaccggcctcgtcgggatcgcgcggcctcgcgctctctggagatgatatgacggctcaggactcaaagcggcgcgttgcgctgatcaccggcgtcaccgggcaggacggcgcctatctcgccgaatatctgctcggcctcggctacaccgtgcacgggatcaagcgccgctcgtcctcgttcaataccgcgcgcgtcgaccatctctaccaggacccgcatgccggcaacgtgccgttcctgatgcactacggcgacatgaccgattcgaccaatctgatccggctgatgcagcagatccggccgaccgagatctacaacctcgccgcccagagccacgtccaggtcagtttcgagagcccggaatacaccgccaatgccgacgccatcggcgtgctgcgcctgctggaggcgatccgcatcctcggcatggagaaggagacccggttctaccaggcctcgacctcggagctgtacgggctcgtgcaggaggtgccgcagaaggagaccacgccgttttatccgcgttcgccctacggcgtcgccaagctgtacggctactggatcacggtgaactaccgcgaggcctacggcatgttcgccagcaacggcatcctgttcaaccatgagagcccgatccgcggcgagaccttcgtgacgcgcaagatcacccgcgccgtcgcccgcatcgaagtcggcctcgagaacaagctctatctcggcaatctcgatgccaagcgcgactggggccacgcccgcgactatgtcgagggcatgcacaagatcctgcaggcggatgagcccggcgatttcgtgctcgcgaccggcgagacgcggtcggtgcgcgagttcgtcgagctggcgttcaccgaagtcggccgcagcatcgaatggcgcggcaagggcgtcgaggagatcggtgtcgacaaggcatcgggcaagacgctggtgcagatcgacccgacctatttccgcccgaccgaggtggatcttctgatcggcgacgccagcaaggcgcgcgccaaactcggctgggcgcccaagacgccgttcgcgcaactggtgaaggaaatggtggccagcgatctcgtcgaggccaggcaggatgcggctcatggcaagcacggcgtttgaactgaagggcaagacggtcttcgttgccggccatcgcggcatggtcggctcggcgttgatgcgccgactggcgcgcgaagacgccgatcttctgaccgtctcgcgtagcgaggtcgatctgcgcgaccaggccgcagtgaatgcctggttcgccgcgaagcggccgcaggccgtgttccttgctgctgccaaggtcggcggcatcgtcgccaacaacacgctgcgggccgaattcctctacgacaatctggcgatctcgaccaatgtgatccaggcggcgcatgccaatggctgcgagaagctgatgttcttcggctcgtcctgcatctatccgcgcctcgcgccgcagccgttgcgcgaggattcgatgctgaccggcccgctggagccgaccaacgagccctacgccatcgccaagatcgccggcatcaagatggccgaagcctatcgcagccagtatggcgccgatttcatcagcgtgatgccgaccaacctctacggtccgggcgacaattatcatcccgaatacagccacgtcgtcgcggcgctgatccgccgcttccacgaggccaaggtctcgggcgccgccgatgtcgtggtgtggggcaccggcacgccgcgccgtgaattcctctatgtcgacgatctcgccgacgcctgcatccatctgatgaagacctattcctcgccggaactggtcaatatcggcaccggcgaggacatcacgatcgccgaattcgcccgcgtcgttgcggccaccgtcggctaccgcggcgagatcagcttcgacagctcgcgccccgacggtacgccgcgcaagctgctcgacgtcaacaggctcgccaagctcggctggcgcgccaccaccccgctcgaggatggcatcaagctcgcgtaccaggcctatctgagcgagaccaagcaggcggcggaataacgccgaactgctacgtcgccgccgtgcggggcggcgctttcgacagcgcagtcgccatcgccgagatcagcggcttcatgaagaacgcatcgttcgccgggtagatgtcggtggataggccgtacgtcttcaactcattcgagaccacgggcccgacggaggcgatcggcgtgcgctccaggccgtcgcgcaattgcgcctcacaccggtgcgcctgtgcgacctccatgagacgccgaacctgaccggagctcgtcagcgcgatggcgtcgatgcggccctgcgccatctgctcgatcgcggtcacgatgttggcgtcggcggcctgcgcgtcatagacgtagggcagcaccgtatcgacctccgcgccctgcgcgttgatcgcggcgatcagggtggcgtgatccttgtccggatagagttgcaggccgagccgatggccgctcaggtcgagcttcgccagcatctcggcgacgccttccgaggtcggcttctcggtcgtcatttgcggctccaggccgatctcgcgcagcgcgcggccgggcttggggccgcgggcgaatttgcgggccttgccgaggctgccgacaaactccgcctcgacgtcgatccggcgcacgaccttcatcaggcgacgcaggccctcgccggtcatcagcacgaggtcgtcgagcggtcgttcgatggcgcggcggatccaggcctcgatcggcgccgggtccggcgcgtcgtggatggtgaacatcgggcattgcagcacatcggcgccctgctcggcgagcaggcgggaaaactgtgcctcctcgcgcgtctcgaggatcaggatgcggtagccgttcagccggtcagccatgatggtccctaacaaacattgtcgtcatttgttcgatttgacccccgcaccgggattggcgcaaggccgcctgcggtgatagacggggcccgaaaatgatccttccacgcaactgctcaagctttggtcaattggcatgcccgaccatcaattcgttctgaccctgtcctgtccggatcgtccggggatcgtctccgcggtctcgacttttctagcgcataacggccagaacatcctggatgcccagcagttcaacgacaccgagaccgacaagttcttcatgcgcgtggtgttcaccgcagccgacctggcggtcgggctgccggcgctgcagaccggttttgccgcgatcgccgaacgtttcggcatggaatggcagatgcgcgaccgcgccagccggcgccgggtgatgctgctggtctcgaagtccgatcactgcctggtcgacatcctctatcgctggcgcaccggcgagctcgagatgatcccgaccgctgttgtctccaaccatccgcgcgagacctatggctcgctcgatttcggcgatatcccgttccatcatcttccggtgacgaaagacaccaagcggcagcaggaagacgcggtgtggaagctggcccaggataccaagaccgacctcgtggtgctggcccgctacatgcagatcctgtccgacgagatgtcggcgcggctgtcgggccgctgcatcaacatccatcattccttcctgcctggcttcaagggcgccaagccctatcaccaggctcatgagcgcggcgtcaagctgatcggcgccaccgcgcattacgtcaccagcgatctcgacgaagggccgatcatcgatcaggacgtcgagcgcatcagccatcgcgacacgcccgaggatctcgtgcgcaagggccgcgacatcgagcgccgcgtgttggcccgcgcgatccgctaccacctcgccgaccgcgtcatcctcaacgggcgcaagaccgtggtgttcgtggactgatccgcgtttcatgatgccgcgttccgatcgatcatcgcgaagcaccggagcagatccggcacatcttcttcggccattgccacatggtgctgagcggctcggttgccggcgtccccaccacgtcaccgtctacatggtggagttcggctaccgcggcgaaatgctgcgcgaggatgctctcgattaggccgacgctcagtgggcagcgctctgcgttgtcgccgccgccttgggatcatcgccgcgctcggccgccggcataaggcgcttgcgctcccgttcctgcatgaacttgtcatattccggggtgcccggccgcggcggcgcgtcggcgggcaggccgccggcccaggccggaatgtagtcggccattcccgccgaaactttttggttcacggtgccgcaccccgcgagcgcgcaggccgcgagcgcgagggcagtcaggacagggatgtggcgtgtgaagtttggcattggcggcagcatacagccctgatctttatggaagatgatcttgggcgcgaccgttcggctgcaattgtgcttgtttgttgacaatggcgattgatttgtacgaccgtacaaatgaagcgagatcgcggcccatccaagcgggcgagatcggttctcgttggggcgttgagtttcggggagcgattctggtatcctgatacttgtagctatggctgggctgatcactccacgcgcgacacccgtccatcgtccgattgacaatggggcgcttggagacgccttgtcgggctgcggcttggctgtgacatgctggggctaaggttgaggcaagggccggggactcggctcgatgcagaagaatggaagggggagggatgtcgatgttcaatcgtcgcaagatgttgttgtggggcgctgctgcggccgcgcttcccggattgtgcgccgtggcggcgcgggcggacgatgccgtcaagatcggcctgatcctgcccatgaccggcggccaggcttcgaccggcaagcagatcgataatgcgatcaagctttacatgcagcagaagggcgacaccgtcgccggcaagaagatcgagatcatcctgaaggatgacgccgcggtgcccgacaacaccaagcggctcgcgcaggaattgatcgtcaacgacaaggtcagcttcatcgccggcttcggcgtgacgcccgcggcgctggccgcggcgccgctggcaacgcaagccaagatcccggaagtcgtgatggcggccggcacctcgatcatcaccgaacgctcgccctatatcgtgcgcaccagcttcacgctggcgcagtcctccacgatcatcggcgactgggcggtcaagaacggcatcaagaaggtcgcgacgctgacctccgactacgcgccgggcaacgacgcgctgaccttcttcaagcagcacttcaccgccggcggcggcgagatcgtggaagaggtcaaggtcccgctcgccaaccccgacttcgcgccgttcctgcagcggatgaaggattccaagcctgacgcgatgttcgtgttcgtgccggccgggcagggcggcaacttcatgaagcaatatgccgagcgcgggctcgacaagagcggcatcaaggtgatcggccctggcgacgtcatggacgacgatctgctcaacaacatgggcgatgccgcgctcggcgcggtgaccgcgcatctctattcggcggcgcatccgtcccagatgaacaaggacttcgttgccgcctacaggaaggcgttcggcagtcgcccgggcttcatggcggtcagcggctatgacggcattcatctgatctacgaggcgctgaagaagacgggtggcgatacgaacggcgacaagctgatcgaggccatgaagggcatgaagtgggagagcccgcgcggtccgatctcgatcgatccggaaacccgcgacatcgtgcagaacatctacatccgcaaggtcgagaaggtcgacggcgagctctacaacgtcgagttcgcgaccttcgaggccgtcaaggattccggcaagaccaagaagtgacgcgcgaaagcgcgtcatcccggggcgcgccttagcgcgaacccgggatctcgaagtttttgaaatgagattccgggaccagcgccggcgcgctgccccttacatcgggctttgtctgaattcatggcctctatcctcaccaatttgttcgatggcgtcgcttacggcatgctgctgttcgtgctggcctgcgggcttgcggtgacgctcgggctgatgaacttcgtcaacctcgcgcatggcgccttcgccatggccggcggctatatctgcgccgtgctggtgaacaattccggctggccgtttttcgccgcgctgccgctcgcctttgtcggcagtgccctgatcggcatcgcgctggagcgcacgctgtaccgccatctctacagccgcagccatctcgatcaggtgctgttctcgatcggtctggtgttcatgtcggtcgccgcggtcgactacatcatgggatcgtcgcgggtcttcatcaaattgcccgcggcgctggagggccagatcgatctgttcggcgtcggcatcggacgttatcggctgatgatcgtcgtgatctgcggcctgctcacgctggcgctgcagctgatccttgccaagacgcggttcggcagccgtctgcgcgccgcggtcgacgatccgcgcgccgcgatcggtctcggcatcaacgtgccgcaggtgtttgcgttcacctttgccttcggctgtggcctcgccggcctcggcggcgcgctgagtgcggagatcctcgggctcgatccatatttcccgctgaaattcatgatctacttcctgatcgtggtgacggtcggtggctcctcctcgatcaccggaccattcctcgcatcgctgctgctcggcatcgccgacgtcgccggcaaatattatgtgcccaaggtcggccccttcgtgatctatacggtcatgatcgtgatcctgctctggcgcccgaacggcctgttcggccgcaccgcggcgcggtgaggctgagatgaccgcgctatccgacgtctcctctcacgcgatggccggcgcgcgctggcgggtcagcgaggtcgcgttctgggggctcgcgctcgcctgcgcgttcctgttcccgtcgcgctacctgatcatgaccgacatcgtgcggctcggcctgttcgcgctgtcgctcgacctgatcctcggctatgccggcatcgtctcgctcggccatgccgcattcttcggcgtcggcgcctattcggccggattgctggcgttgcacggcatcatcagcgagcccgtcatcgcgctggtcgccgccggcctcgttgcggcggtgctcggcttcctgaccagtttcctggtcatccgcggcgtcgatctgacccggctgatggtgacgcttggcatagcgctattgctggaagcgctcgctgagcgcttctctgatatcaccggcggcaccgatggcctgcagggcatcgagatgcagccgatcctcgggctgttcgccttcgacatgttcggcaagaccgggttgttctactcgctgatcgtgctgttcatcctgttcctgctggcccgccgcgtggtgcattcgccgttcggcctgtcgctgcgtgcgatcaggaacaatccgctgcgcgcggctgcgatcggcataccggtcaaccgccgcctgatcgctgtctacacgctggccgcgttctatgccggggtcgccggcgcgctgttcacgcagaccacggcgctcgcctcgctcgacgtattttctttcgagcgctccgccgacctgatgctggtgctcgtgatcggcggtaccggctatctctatggcggcctgatcggcgccgtcgtgttcaagatgctgcaggagctgtttcagagcctcaccccgcaatactggctgttctggatcggcctcgtgctggtcgtgatcgtgatggtcggccgcgcacggatccaccgctgggtgctgttcgtgccgaacctgatcatccgtcaattcgccggtcgcaaggccgccgtcgccgtgccggagaacgaggcgtcatgacgatcgcgctggaaacccgcaatctcgaaaagtcctttggcggtcttcgcgtcacccgcgatctctcgctgaaggtgatgcagggcgcccgccacgcgttgatcgggccgaacggcgccggcaagaccaccgtcatcaaccagctcaccggcgtgctgacgccgaacagcggccgcatcctgctcgaaggcagcgacatcaccggcctctccgtgcacaagcgggttctgcgcgggctgtcgcgcacgttccagatcaaccagctctatcccgacctgaccccgctcgagaccatcgggcttgcggtctccgaacgaatgggccgcggcggcgactggtggcggcggatgggaacgcgcgatgacgtcaacgccgagatcgccgagatattgtcgcgcttccatctgctcgacgtcatgaccgagctcacctcgacattgccctacggcaagcagcgcctgctcgagatcgcggtcgcgattgctgccaagccgcgggtgctgctgctcgacgagccggcggccggtgtccccgagagcgagcggcaagatatcctggcggcggtcgtggcattgccgcgcgacgtcaccgtgctgctgatcgagcacgacatggacctcgtgttctcgttcgccgaccgcatctcggtcctggtcaatggcggcctgctcacccagggtacgcccgacgaggtcgcgcgcgatccgcaggtgagggcggtctatctcggcgaggccgccgatgcctgatctgctctccatccagggcctgcgcgccggatacggcgaggcggtggtgctgcccgacatgtcgctcgcgctggccgacggccaggtgcttgcgctgctcggccgcaacggcaccggcaagaccacgctgatcaactcgatcgtcgggatcacccgccgtttcggcggcagcgtcgcgctcgcaggcctcgacatcacggcactgcggcccgatcagcgcgcccgcgccgggatcggctgggtaccgcaggagcgcaacatcttccgttcgctgacggtggaagagaacatgaccgcggtggcgcagcgagggccgtggacggtcgcgcgggtgtacgagatgtttccgcggctgaaggagcggcgcagcaatttcggcaaccagctgtccggcggcgagcagcagatgctggcgatcggccgcgcgctgaccttgaacccgaaggtgctgctgctcgacgagccgaccgaggggttggcgccgatcatcgttgaggaattgttaaaggcgatcggaaccatcacgcgctccggcggcatctgctcgatcatcgtggagcagaacgcgcaaaagattctggggctcgccgaccgcgttgtgatattggaacgcggcatgatcgtgcacgacgccgcaagcagcgcgctgaaggctgatcgctccgtcctcgagcgccatctcggcgttgccgcgaccaagaaacactgacgacctcagggagttcaccatgcagcgaaccaagcctccgttccgcgccgacgaggtcggcagcctgttgcggccgccgaagatcaaggaagcccgcgccaggctggagaagggcgagatctcggccgacgagttgcgcaaggtcgaggacatggagatcgagaaggtcgtgcacaagcaggcctcggtcggcctcaaactcgcgaccgacggcgagttccgccgctcctggtggcacttcgacttcctcagccatctgaccggctgcgagctgttccaccccgacatgggcatccagttcgccggcgtacagacccggcacgatgccatccgcgtgattggcaagctggatttctccgatcagcatccgatgctcgatcacttcgggttcctgaagaagtatgccgaccaggcgcatgtcacggcgaagatgacgatcccgtcacccgcggtgctgcactttcgcggcggccgcaagctgatctcgaaggaggtctatcccgatctcgaggagttctatcaggacctcggcaagacctatcgcaaggcggtgaaggcgttctacgacgccggttgccgctacctgcaattcgacgacacggtgtgggcctatctatgctcgccggaggaattgcagaagtcgcgcgaccgtggcgacaatccggatggactgcaggagatctacgcccgtgtcatcaactatgcgatcgccgatcggccgtccgacatggtgatcacgacgcatgtctgccgcggcaatttccgctcgacctggatttcctccggcggctacgagccggtggccgagaccatgctggccggtaccaactacgacggctacttcctcgaatatgattccgaccgcgccggcggcttcgagccgctgcgcttcctgcccaagggcaacaaggtcgtcgtggtcggcgtcatcacctcgaagttcggcgagctcgagaagaaggacgacatcaagcggcggctggaggaggcggcgaagttcgccccgatcgagcagctcgcggtgtccccgcaatgcggcttcgcctcgactgaggagggcaacatcctgtccgaggaagagcagtgggcgaagctgcggctggccgtcgaggtcgcgaacgaggtgtggggcaaatagcatcaactcggtcgtcattgcgagcgaagcgatccacgtccccgcgaggacagaatggattgcttcgtcgcttcgggggagggtggcttcactgctcccccagatagacctcgccgagcagcgaggagttcgaccacggcacctgcttgcccttggtcgcggcgacgacctcggctcggacccgcgtcagcatctgctgcacctcgaggccgggcgtgccgacatggcgcgacagcgccgtcgagaacgggctgttggcgccctcgccgtcgagcgcgacctggcccggcgcggtcgcgtacgcgatcagcgtgccggcgccgagcgtcgagcctgatccgagcgaggtgggcgcggcaagaccggagccggcctcgatgccgcggcttgggcctgcggatgccacctgcggcgccatcggattgttgcggcaggcatcgaggatcaggatgttggtgcggatctgatcgtcgagaccggccatgatcgtatccatatcgaccatcgcgtcggtcatgcgtgcacccgccttgaactcgatatcgaccggcacgaggtagttgcggccgtcgacctgcacgccatggccggcatagtagaccacggcgatctgcgaccgcgtcgcctcgcgcaggaagtcatggatcgtcctctgcatcgcgtcgcgatcgagatcgagaccctccgagacggtgaagccgatatcgcgcaggctcctggcgatggcgcgcgcatcgttgggcggattgggcagcgctttcacatgcgcataggcgccgttgccgatcacgagtgcgacgcgccgcccggtcgctgcggcctgcacgcgggctgccggaactgccgcggccggcgccggcggtgcgggcgcggggctgctctcggcggcaggcgctgctgcggtcttgcgcggtgccgcgtcggcctccttgagcagcgcgagccgcaccttcgcggtggcctggttggccttgctgccggcgtcggaggcgacgccctcgagcgcggcggcgtagtcgtccttggcatgcgcagcgtcgcccttcgcctcgtaggcgagaccgcgctgggtataggccgagatcagcacgctgccgggcggcgtcatgatgttggccggcgccttcgccttcgcgagccggatcgcttccgtcgtgtccgcgatcgcgcgcgcgatgtcgcccttggcgcgccagatcacggcgcggcggatcagcggctgcggcagtgatggatcgattctgacagcctcgttgatgtcggcgagcgcgccgtcgagatcgccgagcgcctgcttcgaggcgccgcggttctgataggagaacgccgagctcggatcggccttgatcgcggcatcatagtcggtgatcgccctggcgtagtcgcccttgctgcgataggcgttgccgcggttgtggaagatgatgccgctcggccccaggcgcagcgcgtcgttgaagtcggcgatcgcgatgtcgtactcgcccttgtcgtaataggccgagccgcgcagattgtagacggcagtgctggacttgaggcgcaacgcctcggtcgcgtccgcaatcacctgcgcgtagttgcccttcttgttccagccgaccgcacgccagaaatgaatggtcgcgagcttctcaccggaaaacaccttcaacgcgatgatcttggtacaggcgtcgatcatctgatcggcgggcgttgtgtcggtcgtacagagcgggccgagctgggcgtgcgtctgtgcgacacagggcgccgccgacagcatggcagcaagcaggcaggggatcaggagcaggcggcgcatcggttatcccagcggggtgagccgtcaagatgatcgacgacggcgaggcggtccaaagggcgatccagggggcaatccatgactgtttggtgattgggccgtggagggggttcaactggtgggaaaatggtggtaagacgtcgccacacacaatctctgcccacttttgtcccactcgccgcggcccgctccaggcttcatgaagaacgacgaaatcctcagccagatcacggatttctgccggcgctccgacatggcggagacgacgttcggccgccgtgccgtcaatgacggcaagctggtgcaccggctgcgcgagggcaagcggatcaccatcgatacgctcgaccgcatcaacggcttcatcgcaacctcgaccccgggcggcgtggcgccgccgcgcggcctcgtggtgccgccggaaaagcgcgatcccaggggcaatttccgcttcttcgagaaccgccagcgctacctgctgttcgtgcacacctgcagcgagaagcgggtgatcgctgaccgggtcgcgctggaactggcggcgatccacccccgaccgccggcgctgcgggtgttcgacgccgggatgggcgacggcacggtgctggcgcgcgtcctgcgtgccatgcatggccgcttcccacatatgccgttctatgtcgccggcaaggaactgagcctggaggacgtccgcctcaccctcgacaaggtgccggaccggctgttcgagcatccggcgagcgtgttcgtgttcaccaacatgtattacgccgaggcgccctggctgacgcccaagaactccgcagcggccgccagcatgatctggcacgaagtggccctgcgcggcgcctcctcgggtgatttcgaggcccagatcgcggaactcggcccgttcctggagcagaattggcgggccaatctcagcccaggcaatgcgatgccgatctacgagcggccggtggcgctggtgctgtaccgggacgatcaccgcttcctgctcgattccattattccgcgggccggccgcgccgaggccaatttcgatctcgtgatcgcctcgcagccctaccgcgccaaatcctcggtgaatttccgcgccaagcggatcatcgcgccgctggcgcgcgcgctgcgcggcggcgggcggttgataggaatccactcccacggaggcgatcccgggctggaaatcattcaagccgtctggcccggagaaaatcctttcgccgtcagccgtcatgagatactgcgcgcggtgaaatacgagttgggctcggcgggccgcgagctgaacttcaatgcctacgccgataaccgttcgatcttccgatatgatatggaggcgctgcctaatgaggtgaccggctcgatcggaacctcgacggcctttgctgcgtggaatgcggcggtgtatgtcgcgcagatcgaagatgagcggttgaccgaaacgaccgaaaacggacgagctctcgaggccacgcgcgaagttctccgcaaacacaacgggctgtggttttacgacgaatcctacgtcatctcgcgacggcgagactgacattccggggacatattcaccaaccaacgtcgggacatcgacgaaacaaggggtttgcttgatgcgcgcgtcttatctcttcaccagcgagtcggtctcggaaggccatccggacaaggtctgcgatcgtatctcggatgagatcgtcgatctgttctaccgcgagggaccgaaggcgggcatcgatccgtggcagatccgcgcggcgtgcgagacgctcgcgaccaccaacaaggtggtgatcgccggcgaaacgcgcggcccgagctcggtcaccaacgagcagatcgagggcgtggttcgctctgcgatcaaggacatcggctacgagcaggacggcttccactggaagacctgcgacatcgagatactgctgcatccgcagtcggccgatatcgcgcagggcgtcgatgcgctgcagccgggcgaggtcaaggaagagggggccggcgaccagggcatcatgttcggttacgccaccaacgagacgcccgacctgatgccggcgccgatcttctacgcccacaagatcctgcggctgatctcggaagcgcgccactccggcaaggagaaggtgctgggtccggactccaagagccaggtcaccgtgcagtacgagaacggcaagccggtcggcgtccgcgagatcgtggtctcgcaccagcatctggtcgaggacctcacctcgaagcagatccgcgacatcgtcgagccgtatgtgcgcgaggcgctgccgaaggagtggatcagcaacaagacgatctggcacatcaatccgaccggcaagttcttcatcggcggtcccgacggcgactccggcctgaccggtcgcaagatcatcgtcgacacctatggcggcgcggctccgcatggcggcggcgcgttctccggtaaggatccgaccaaggtcgaccgttcggctgcctacgctgcgcgctatgtcgccaagaacatcgttgcggcgggtcttgccgaccgctgcacgctgcagctcgcctacgcgatcggcgtggcgcgtccgctgtcgatctacatcgacacccacggcaccggtaaagtgtcggaggacgagctcgagaaggcggccgccaaggcaatggatctgacgccgcgcggcatccgcacccatctcgatctcaaccgcccgatctacgcgcgcacctcggcctacggccatttcggccgcacgccggacaatgaaggcggcttctcctgggagaagaccgatctcgtcgagccgctgaagcgcgcgctctgattttctcacctcgccccgcctgcggggagaggtcgccgcgaagcggcgggtgagggggattctccgcgagctcagcgcgcgggtagagcccctcaccatagccgatgctctgcatcggcgttcttcaaggacggcggccgaaggccgcctatgcctctccccgtaagaacggggagagggagatgatcgtgcaacatcgcgttccgctcgctttgtaactgacacgctggattcacccactaggaaaccgacatgaacgcccccacgaagcccggcttcaccgactacatcgtcaaggacattgcgctcgccgatttcggccgcaaggaaatctcgctggccgagaccgaaatgcccggcctgatggccacccgcgaggagttcggccccaagcagccgctgaaaggcgcgcgcatcgcgggctcgctgcacatgacgatccagaccgccgtgctgatcgagacgctggccgcgctcggcgccgacatccgctgggtctcctgcaacatctactcgacccaggatcacgctgccgccgcgatcgccgccgccggcattccggtgttcgccatcaagggcgagacgctgaccgagtattgggactacaccgccaagctgttcgactggcacggcggcggcacgcccaacatgatcctcgatgacggcggcgacgccaccatgctggtgcatgccggcgtgcgcgccgagcagggcgacaccgcgttcctcgacaagccgacctccgaggaggaagagatcttctacgcgctcgtgaagcgcctcctgaaggagaagccgaagggctacttcgccgagatcgccaagaacatcaagggcgtctcggaagagaccaccacgggcgtgcatcgcctgtacgagatggccaacaagggcacgctgctgttcccggcgatcaacgtcaacgacagcgtcaccaagtcgaagttcgacaacctctatggctgccgtgaatcgctggtcgacggcatccgccgcggcaccgacgtgatgctgtcgggcaaggtcgcgatggttgcgggcttcggcgacgtcggtaagggctcggccgcctcgctgcgccaggccggctgccgcgtcatggtctccgaagtcgatccgatctgcgcgctgcaggcggcgatggaaggctatgaggtcacgaccatggaagacgcagcgccgcgcgccgacatcttcgtcaccgccaccggcaacaaggacatcatcaccatcgagcacatgcgcgcgatgaaggatcgcgccatcgtctgcaacatcggccacttcgacaacgagattcagatcgcgagccttcgcaatctgaagtggaccaacatcaagccgcaggtcgatgagatcgagttccccgacaagcaccgcatcatcatgctgtccgaaggccgtctcgtgaacctcggcaatgcgatgggccatccgtccttcgtgatgtcggcctcgttcaccaaccagacgctggcgcagatcgaactctgggccaacaacaaggacggcaagtacgccaagaaggtctacgtgctgccgaagacgctcgacgagaaggtcgcccgcctgcacctcgccaagatcggcgtcaagctgaccgagctgcgcaaggaccaggccgattacatcggcgtcaagcaggaaggtccgtacaagtcggatcgctaccgctactgagctgcgctgactgcaatcgatgaactgaagagccccggcatcgtccggggctttttgctgcgctgttttgccggcgggcctccccattcgtcgtcctggcgaaagccaggacccataaccatcgcaatcgatcgtgagcgggacctcggcccccagcgtcgcgcaacaacgcgcggttggggtaatgggtcctggctttcgccaggacgacgacgaggatgtttcgcgattcagaacataaaacacgcggtgtcatcacccgcgaaagcgggcgatccagtattccagagacggctgggcttgagccgagaggccgcgacgtactggatcgcccggtcgagccgcgcgatgacagcgtggaatggggcgcggcttcgtatccgtaggcctcggagcaatagacagaaccatgcgtcattgcggggcgtgcgaagcacgaacccggaatccattcatccaagagttatgcggtccgacggattccgggctctcgcttcgcgagccccggaatgacgacggaaagactcactccgatgcccgcgccgtcccgtgccccagctgccgcgagatatcgccggcacaatcgcgcagcgcggttgcgattgcgctgtcccagccggcgtcgaatgtgccttccgggcccatcgcggtgatgacgacggcgacgtggccggcatgatcgaagaccggagcggcgaacgcgttgacgccgggcaggggatcgccgatcgcgcgcgcgagaccgcggctgcggacctcggccagcatctcggcggcctttgcgttgatcggctcacgtttcggattgtagccgacgccgagccgatcgaggccgctgtcgagcgctgccttgacggcgttcggcggcatgaaggcggcgaaggcgcggccggtcgcggtctccagcagcgccaccacggatccgacgcgcatcgcgatatgcacgggatggctcggctcctcgagccgcaccacggtggcgccatgggtgccccacaccgacagcgacaccgcatgattgatgctgtcggcgagcgcggcgatcctgggcgtcgcgatccgcaccgcggagagccggcgcaggctgatcaggccgagctcgagtgccagtgccccgatctcgtagcggccggtgctctcgtcctgctcgatcaggccgatgcgggaaaagctgaccagatagggatgcgccttggccggcggcatgccggcctcccgggcgaggtcgcgcagcatcatcggctcgccgctgcgggcgagcgcccggagcaattctccgccgacctcgatcgattgtatgccgcggctttctctcgtcatgtggctccgttcgttttcctgcgcccgcacttagcacgtaggatgcatggccacagtcgagccgtcgacccttcgagacggctgcgttgcggcctcctcagggtgacggagtgttgaccgtcctctgctaggccgcggcacccgccagatgcttgcccgcgatgtagccgaaggtcagcgcggggccgagcgtgatgccggcgccgggatagttgccgcccatgatactcgccatgtcgttgccggcggcatagaggccagcaatcggctggccgtcggcgtcgagcgcgcgggcgttggcgtcggtgcggatgccggcataggtcccgagatcgccgatcaccatcttgatcgcgtagaacggcccgcgctggatcggcgcgatgcagggattgggcccgtgcagcgcatcgccctggtagcggttgtaggcacgcgagcccttgccgaaggcgggatcgcgtccctcggccgccagtttgttgaattcggcgacggtggccccgaatgcgccggcgtcgatgccggcctgcgcggcgagctcggacagcgtcgcgccgcgcttgagatagccggtcttcagatggtgcccgagcggcatcgggcgcggcggcacgcagccgagaccgtatttgcgcagcgtctcgtgatcgcagaccaggtaggccgcgatctcctcgccgggcttcgccgctctgatcatcgcctgcacgaagtcgtggtaggaattgccttcattggcaaaccgcttgccgtcacgcaggaccgcgatcacgccgggcttggcgcgatcgatgaagtgcggcatcacgcccttcgagccgtccttgcgcgtggtgaccgagaccggcacccacgccgccgcgttcggcagcgagtcctcgacgcggccgccggcggcttccgcgagccgcagaccatcgccggtgttgccggtcgggcccggcgaatagtgctccttgccggtcggcgcatgcggaaacatcttctggcgccgcgccacgtcatggggaaatccgccgcaggcgagcacgacgccgcgctttgcattgacgcggatggtgtggccctcgcgcacgacgatcgcgccgcgcaccacgccgttgtcgacgatcaattcgcgcaccggtgaattgagccagagcgggatattgagatcgaacgccgattttgccagccggccggccagcgcattgccgttggtcagcgtcatgccgcggccgttgcggatcacgtcagcggcgtgtttcgacagccgcttggcgacataggccgccgaggtgatcgaccgcgtcgcgcgcatgaagtgcacgatctccttgccggagccgagcatcatgccgaacacggtgagctcgggcagggggctgccgagatccttgagggccggtccaagctcgtgggcgtcgaacggccgcgtcaccatcgagcggccgccctgcgcgccgccgggggcttcggcatggtagtccgggaaggtcagcggcatgtcgaaacgcactgcggtcttcgtcgtgaagaagtcgaccgcctttggcccttcggtcaggaacgcatcgacgcgcgcggcatcgaagctgttgccggcctcgtggcgcagataggtcctggcctgatcagggctctcctcgatgccccacgccctggccagcgaggtgcccggaatccacagccagccgccggagcgcgccgtggtgccgccgaaccgcggctccttctcgacgacgaggaccttcaggccgtgatggccggcagtgaccgccgccgacagcccggcgcagccggagccgacgacgagtgcgtcgcaatcatacgtttcttcgttagccacgtgatcgatcctatttcttcagcagcgggcacttggattcggagaccggacgaaacgcatcctcgcccttcaccgtcttgatgatgtcgagatagtcccaaggcttcttggattccgagggcttcttcaccttcgccaggtacatgtcgcggatcacgcggccgtcctcgcgcagtctgccgccgtgcacgaaggtgtcctcgatcggcagctcgcgcatcttggccatcaccttctgcggatcgtcggtgccggcagcctggatccccttcagataatgcagcaccgagccgtagacgccggtctggatcatggtcggcatcacgttggtgcgggcgaagaacttcttcgaccaggcgcgcgtcttctcatccatattccagtacgacgctgtcgtcatgtaggtgccctgcgcggcgttgagcccgatggcatgcacgtcggtgtcgaacatcagaaggccgaccagcttctggccgccctgcacgaggccgaactcgccggactgcttgatcgaattgtcggtgtcctggccggcattggcgaatgccaccacgtcggccttcgagctctgcgcctgcagcgcaaaggaggagaagtctgccgtgttggtcggatgcttgacgccgccgagcaccttgccgcccatctcgttgatgaagcgcgtggcatccttctcgagctgctggccgaacgcatagtccgcggtgatgaagtaccaggacttgccgccctccgcgatcaccgccgaagccgtcactttcgacagcgcataggtatcgtaggtgaagtgcacggtgtttgggctgcacagctcatcggtcagcgagctcgcgccggggccggagagcagcgcgatcttgttgcgctcgcgcaccatgttgtgcacggcgatcgcgatgccggaattgggaatgtcgacgaccgcgtcgaccttgttgttgtcgaaccagccgcgcacgatctgcacgccgacatcggtcttcatctggtggtcagcggagacgatctcgatcggcttgccgagcacggtggggccgaattcctcgaccgccatcttggccgcctcgaccgaacccgggcccgaattgtcgcggccccagctcgacaggtcggtcagcacgccgatgcgcacgacgtcatcggaaacctgggcgcgagcagccgtcaccgtcgccgcgaggatggctgtcgccaaaacgtgtctcatcgttcctcccttggatgtccgggctctccggcgcgcaatccaaagagttagatattatcgaattagtttgtcaatggcgaaaagacatgtgtgaatattgccacaaggttgcgacttcgaatgcggcggtgcttcacatttggtgagtgttcgcttacatggctcatccgggatggcactgcgcggctccagctcacgccagagcttgcggcagtaccaagtcactatgaacaggggaattttcgcggacggcgacgcgcttcgccgcccggggcagggccacccgtcgccgggaccggctctgcaggggcggtgcatcaagagggtcggcggactgcgatcatagacggattatgttgagacagctcttcgcgccgcagctcgttattctctacgcgctggtggcctccacactttacgtgcacttccgcggcaagcagcggttgcgcttcgcgcgccaactcggcgatcactcgacctatctcgcgccctacaatgtgctgatgtatgcgggctcggccgtgcccaacacgccggtgatcccggtcgagcagtttcccgagctgaagaagctctccgacaattgggagaccatccgcgacgaggcgacccggctgttcgacgagggcttcatccgcgccgcggccaagaacaacgactggggcttctattcgttcttcaagagcggctggaagcggttctatctgaaatggtacgacgacttcctgccgtcggcacgcacgctgtgcccgcagacggtggagctgctcaattcgatcccgaacgtgcacggcgcgatgttcgcgatgctgccgcccggcggcaagctcggcgcgcaccgcgatccgttcgcgggctccttgcgctatcacctcggcctggtgacgccgaactcgaaccagtgccgcatcctcgtcgatggcgtcgaatgcgtctggcgcgacggcgaggccttcatgttcgacgagaccttcatccacagcgccgagaacaagaccgacgtcaaccgcatcatcctgttctgcgatgtcgagcgtccgatgaagtacggcttcatgacggcgatcaaccgctgggtcagccacaacatcgtcaaggcgtcggccacccagaacgtcgacggcgagcatgtcggcgcgctgaacaaggtgttcggcaagctctacgaggtccatctcgcgagccgcaaggtcaaggaatggaatcggaacgtgtactacacgctcaaatattccgtcaccgcgctgatcctcggcctgatcgtggtgtcggcgctgcggtgatgcgcggggcggattgcgttccctccggcctgcgaccgagcaatccctgcgcttgatgcaggaaagcaaaagccccggagcgatccggggctttgtctttgggcgctcgccccggacttcacgcatctttggctggccatctcgccccggatgggttttgtctccgatccgttgcgcggcggtgatacagtttcactcggcgtttcgtatcgaggggatattgtcatgttgcagaccgctgcagattttgccactaccgcgctgagcggctacgagctgttggccgatccgcagctgaacaagggtacggcgttctccgaggccgagcgcgaggcgttcgacctgcacggcctgctgccgcccaacatcctgacgctggacgagcaggtctcgcgccgcctcgaggcattgcgcggctacgagaccgacatcgagcgctatgcctttctgcgcgagctgcaggacaccaacgagactctgttctacgcgctcctggtcagcaacctggaagagctgctgccgatcgtctacacgccgaccgtcggtgagggctgccaaaaattcagccggctgtttcgcaagccacgcgggctgttcctcagcattccgcaccagcaccggatcgaccgcatcttcgcccatccgcgcttcgatcacgtcgaggccatcgtggtgaccgacggcgagcgcatccttggtctcggcgaccagggcgccggcggcatgggcatcccgatcggcaagcttgcgctctacaccggctgcggcggccttcaccccgcgactacgctgccgatcatgctcgatgtcggcaccgacaatcccgactgcctggccgatccgctctatatcggctggcgcaacgagcgcgtccgcggccagcaatatgacgatttcatcgaggcgttcgtctcggctgtcgtgaagcgctggccgcacgtcctgctgcaatgggaagatttcgccaagaacaatgcgacgcggatgctcgagcgctatcgcgaccggctcctgaccttcaacgacgacatccagggcaccgcggcggtggcgaccggcgccttgctgtctgcgatcaacgtcaccggcgtgccgctgaccgagcagcgcgtcgccgtgctcggcgcaggctccgccggctgcggcattgccagcctgatccgcgccgcgatggtcgatgccggcctctcggagagcgatgcggcgaagcgcttcttcatggtcgaccgcgacgggctgttgctcgagggcatgagcgggctcgcgccgttccagctgcctttcgtgcagaacaagcaggcgattgccggctggcagctcagccatcccgacaagatcgcgctgctcgacgtcgtgcgcaacgccaagccgacggtcctgatcggcgtctccggccaggccggcgcattctccgagccgatcgtccgcgcgatggccgagtgcaacaagcggccggtgatcttcccgctgtcgaacccgacctcgcgcgaggaggcgacgccggccgacatcgaggcatggaccgaggggcgggcgctgatcggcgtcggcagcccgttcccgccgatcacccgcgatggcgcgcgcttcaaggtcgaccagaccaacaattcctacatcttccctggcgtcggtgtcggcgcgcttgcggtcggcgccagccggatcagcgacgggatgttcatggccgccgccaaggcactggccagcgtctcgccggcccgcaacaatccgaagcacaatctgctgccgccggtcagcgcgctgcgcgaggtgtcgcagacggttgcgctggcggtggcgttgcaggcgcacaaggaagggctcgccaaggatgttccgatcgacgaggtcgaggcgcgcatccaggccaaggtctggaccccgcgctacgtgccgtatcggcgcacgggcgggaacgcgacctgatcgcggatgccgcgacgtcgtcagcctagcagccgcggcaaatgcccctgatcctgcggtcaaccatcgcgtcttcctgatcgatgatctgctgcgacgtggccgtcgttgccgggacgtcggcggcgtgcggctggcgatggccgaccggcgccgaccatggccgcgtcgcggtttcgtttgctgcgtagacgctgggctcctggattgtcggctgcgcgaaacaggatgttgccgttgccgccgacaggatagcagccaagccaagctgtctgccaaatcgtcgaagctcgaacatgagactctccgtgccgtcgccgccgcgtttgcgtgcggccctgatgaatggaatgcctcgcacgtttcgatattccccgatccgcccgatgtgatgcggcgctcgcggttcggtgatcgcgcgtgatgaaataatcctggggcgctgacgctccttggtcacaggagccgagcttggtcggcttcacccatgcggagaaatcctatgaccaaattgaccttcgcggcacttgcgctggttgcggcagctgcgtattcggctcaggcgtcggcggccgcccacaatgctgcggcgcggcgcgctcatgccgcgacgccggcgacgacgccggtcagcaacaagaccaccgactgcgtgcgcgcgccgaacgtcggatcgttcgcaaccgcgcccttcaccgaaccgccctgcatgcccggtacgatgcgttgaccacacgcaacgaaaagccccggacgtcaggtccggggcttctggcttggcctcattctcagaggctggttattccggcttgccgatcgtcacggcgagcgtgccgacgccgtcgacgccgcattcgagcttgtcgccgacctgcagctgcgagaccccggcgggcgtaccggtcatgatgatgtcgccggcggcgagcttcacctgctgcgagagctgccagatgatctccggcacgttccagatcagttcggtgaggtcgcccttctgggcttccttgccgttgacggtgagccagatcttgcccgcggtcggatgtccgatcttggaagccggctggatcgcggagcagggcgccgaatagtcgaacgacttgccgacctcccagggccgctccttcttgcgcgaggcgatctgcaggtcgcggcgggtcaggtcgatgccgacggcatagccgtagacatgctcgagcgccttgtcggcgggaatgttcagcccgccgctcttcatcgccaccaccagctcgacctcatgatgcaggtccttggtcagcggcgggtaggggatcgtcgcgccgtcaggcaccagcatgtcggcatgcttgccgaagaagaacggcggcgcacgctcgtcattgcccatctccctgatatgctcgagatagttgcggccgacgcaccagatgcggcgaaccggatagacgccggtctcgccgacgacgggaagcgagggctgcgggggaagcgggatgacggtggaggcggcgttcatgtgggtctcgctgctcttgaggtgaagttcgactggtctagccggtggcgctgatcggcgccagtgccagcggcgacgggtcgtggtggtgctgcaagcggaagaacgaggcgtagcggccgccacggcgcagcagttcctcgtgacgcccgcgctcgacgatctcgccaccctcgaccaccaggatcgcatccgcatgcatgatggtgtgcaggcggtgcgcgatcacgatcgtggtgcggccctggcagagatgctcgatcgcctcctgcacctgcttctcggactccgagtcgagtgcggcggtggcctcgtcgagcaggatgatcggcgcgttcttgatcagcgcgcgggcgaccgcgatgcgctggcgctggccgccggacagctgggcgccgtgctcgccgaccggcgtgtcgtaaccgagcgggaagctcatgatgaagtcatgcgcgcaggcggccgtggccgcgtcgatgatctcggcctcggtggcgccgcccttgccgaaagcgatgttggcgcggatggtgtcgcggaacagatagacgtcctggccgacataggcggtctgctggcgcagcgatctgcgtgagaccgacaggatcgactgtccgtcgatcaggatgtcgccctcgcgcgtctcgaagaagcgcagcagcaaggcgagcaccgtcgatttgccgccgccggaggggccgaccagcgcggtgaccttgccgggctcggctgtgaagctcatgcggttcagcaccggctcgccgggccgataggcgaagttgacgtcgcgcagctcgatccgcgcgtcggagagtttcagcgccggcttgtcgtcgtcggcctgctcgctggccgggctgtcgaccacctcgagcagcatccgcgcgccgaccagctggctgttgaggtcgatgttgagccgcgccagccgcttcgccggctcggtcgccatcaggaaggcggtcaggaacgtgaagaactggcccggcgtcgagccgagcgccaccacgctgtagccgccatacatcaggcagccggcgacggcaaagccgccgagcatctccatcagcgggttggagcggttggcgacgcgcgccatcttgttggcgttgttctcgacggtcgcgatgtgctcgtcgatccgctgctgcatggcgtcttccagcgtgaacgccttcacggtgcggatcccctgcagcgattcctgcatcgtctccatgatgtcggcggtgccggtgaactggttgtaggcgagccccttgatccgcttcaccagcttgcgcagcatcagcatcgccggcggcaccgccacgagcccgatgaacgacatcagcggatcctgccacaccatcacggcgagcatgctgatcagcatcaggaagtcgcggccgatcgcattcaccagcatgttgagcacgtcggtgatcgacttggcgccggcggtgagccgcgccaggaactccgacgagtgccgctgcgagaagaagccgatgctctcgctcatcagcttggcgaataattgccgctgattgctggcgagaatggcgttcgagatcttgttcaggatcaccatgtggccgtaggtcgccacacccttgatgaacagcagcaccaccgtgatcccggcgaacatggcgatgccggggatgttcttgtcgacataggcctggttgatcacctggccgaggacataggtggcgccggcggtcgagccggccgcgatcgccatcaggccgaacgccatcagatagcgccgccagtaggtaatcccttgttccatgatcaggcggcggatcaggatcgccgcgccatagggatcgtcggtaattttctttggaaactgagccatccgctttccattgacggcgggcagcgccggccgtcagggttgcggacctccttgcccgcttggcggggctttttcaagcacaataacggcttgatttttaggccgattctgcctgccgggcggagccgccgcgttcccggaacagcttctcctcccaggccagcgcatggctcgcgatggtctcgagatcatcgtagcgcggggtccagtcgagggctgaacggatcctggtggtgtcggccaccatggtcatgatgtcgccgggccggcgcgcggcgtaggcgaccgcgaaattgcgcatcgagacccggcgcaccgcctcgatggtctcgagcacggaatagccgcggccgtaaccgcaattcatcgtcaccgattgcccgccgctgcgcagataggccagcgccgagcggtgcgcctcgaccaggtcgctgacatggatgaagtcgcgcacgcagctgccgtcctgggtcggatagtcggtgccgaacacgtcgatcttggcgcgctggccggtcgcggcctcgaccgcgatcttgagcaggtgggtggcgccgatggtggatagcccgacgcggcccttcgggtcggcaccggcgacgttgaagtagcgcagcacgacgtagctcataccatgggccgatgcgacatcgtgcagcatgatctcggtcatcagcttcgacgagccgtagggcgacaacggacgcgtcggcgcaatttccggcaccggcacctggtccggattgccgtacaccgcggctgtcgaagagaagatgaagcggctaacgccgcccctcaccgcggcgttgagcaggctgcgcgtcgtcatggtgttgttgcggtagtaaccgagcggatcgcgcattgagtccggcaccaccaccgagccggcgaaatggatgatgctgtcgatgccgtgctgtgcgatcacgccctcgacgaggttctcgtcgccggcatcgccgatgaacagcggcacgacttcgggcaggaacgcagagaagccggtggagagattgtcgaccacgacgacgctctcgccggcatcgaccagcgcatggaccatgtgacttccgatatagccggcaccgccggtcacgagcacggtcatgtctagagctctcccgatatctttaacgggcgatgctagcgggagtgcggtgaagagggggtttcgccgcggccgaactggccactatgcttaatgttgcgtataggaactggcgcgaaacggagacttgcgtgccgatcgagaacacagctgccggcgagctcgagctcatcgtgcccaatctgcaccggcgttattccggtgtcactgcgaccaaccgcatggttgcaccgaagcttgcaaagatgtttcgcgcaggctggctcggctcgcatcgccccgacggcatcgatgcgatgggatttgtcgatctgatgcggctgtggcggcgcgcgcggccactgatctggcacgcgcggcgcaacgacgagatgattgcggggctcgcgctgcgcgcgctcggctggccgttgaaactgctgttcacctcggccgcgcagcgtcatcacacctggttgacgcgctggctgatccgcaacatggacgcgatcatcgcgaccagcccgctgtcggcctcctacctgacgcgcgaggccacggtggtgatgcacggcgtcgacaccgaccgttatgcgccgccggccgatcgtgcggccgcgtttgccgagagcggattgccgggccgctacgcgatcggctgcttcggtcgggtgcgcgcgcagaagggcagcgacgtgttcgtcgaggcgatgtgccgcctgctgccacgctatcctgatttcaccgcaatcatcgtcggcgccgtggtgccggagcaactggccttcgcgggcgaattgaagcgcaagatcgaggccgccgggctgcaatcgcgcatcatcatcaccggcgaattgccgatcgaggatgtcgtgcgctggtatcagcggctgacgatctacgccttcacctcccgcaacgagggctttggcctgaccttgatcgaggcgatgtcggccggcgcggcgctggtggcggcgcgcgcgggcgcggccgagttcgtggttgaggacggcgttaccggcgtgctgacgccgcccggggatgccgacgcgctggcggcgacgctcgagcctttgatgcgcgatccggctgcggctgcggcgatgggcgggcgggcgcgccaacgagttgtggataagttcagcctcgatgcggaagccggcgcgatcgccaaggtctatcgcgcgttgatctgagccagcacgcgctgtgcgatctccacgacctcctcggccgcgatgtcgcgcatgcagcggtggtcgttcatggtgcagaccgtgcgctggcacggctggcacggcagcttgctcctggtctgtcgcaccgtcgcggcgaggggattgaggggcgcccagaggtagggatcggtcgggccgaagatgcccatggtcggggtgccgatcgcggccgcgatgtgcatcagcccggaatcgttggcgatcgcgacactggccgcagccatcgccagcgcgccgttgcgcagatcggtgccggtgagatcgcggatccgtgggccgccggctgccacaatctcctgcgccagcgccttctcgccgggcccgccgaccacccagacgtcgaaaccgcgctcggcgaacagccgcgcggcttccggataataggtccagcgcttcgaggcgccgaccgagccggggcccaatgcgatggccggaccggtaccgaggccgttggcctgccgccaccggttgacctcgtcggccggaacccgaagctgcggcaccggccattccgggggacgggccgcgccgtcgggcaatgccagtacggcgttcttgtcgatgaagcgcggctgcttcttttcaccccaccgcatcgcgttgatcaggccgaaccgcgcttcgccgaagaagccgatccgctcggggatgcctgccagggccggcgcgatggccgacttccaggtccgcggcagcaccagcgcggtggcgtagttccgcttccggaactcggccgccagctcccgctgccgggccagcgccaaacggctgcgcggcaggtcgaacacgatcgcggaccgcacccccggcatataatcgaccaaaggggcgcaaaggctggacgtcaggaggtcgaccggccgattcggccaccgcttccgcaacacccggaccacggtctggccgcgcacgaaatcgccgatccaaacatagggcacgacgaggataggtctggtatcctcggtgtcctgagtttcgatatcagatattgaatcaatattcatttctaaaagggccaaggccggaccgagcgcgggcaagtcggtaaccggttcgcgataagaggtaaagccgtcgttgcctgtggcgcgggagtggggcaaagctggcggctgcaaaggaatctggcgggatttcatcatgtttctggtaaccgggggcgccggttttatcggatcgaacgtcgtggccgcgttgaatgacgcaggccgcagcgatgttgcggtctgcgatatccttggacaggacggcaagtggcggaacttggccaagcgtcagctggccgatgtcgttcccccggccgagatcggcgactggctgaaggggcggcggctgaccgccgtcatccaccttggcgccatttcggagaccaccgcgaccgacggcgatctggtgatcgagactaatttccgtctctcgatgcggttgctcgactggtgcaccgcgaatgcaaccccgttcatctatgcctcgtccgccgcgacctacggcgacggcgagcaggggtttgacgacgacgcatcggtcgaggcgctgaagcggctgcggccgatgaacctgtacggctggagcaagcagctgtttgaccttgcggtcgcggagcgcgcggcgaagggcaagccgctgccgccgcaatgggccgggctcaaattcttcaacgtgttcggcccgaatgaatatcacaagggcccgatgatgagtgtgctggcgcgccgcttcgacgacatcaaagcgggccgcgtcgtgcagctgttcaagtcgcatcgcgagggcatcgccgacggcgaccagcgccgcgacttcatctatgtcgacgatgtcgtgcgggtgatcatctggttgatcgcgacgccgcaggtctccgggctgttcaatgtcggcaccggcaaggcgcgcagcttcagggacctgatcgtctcggcctacggcgcgctcggtcgcgagccgaacatcgaatatgtcgacatgcccgagcagattcgcggcagttaccaatacttcaccgaaagcgtcgtcgatcgtctcgcacgcgccggatacaatggcggcttcacccgcctggaagacgcggtcggggcctatgtgaacggcttcctcgatcgcgcggatcgctatcgctagagcggatgacggtgactgatgttcgattttgaagcgatctcgcgtgcaatgtccggccagaccgtgctctgcgtcggtgacctcatgctcgacgagttcgtctatggcgaggtgtcgcggatctcgccggaggcgccggcgccggtgatcgcggtcaggcgcagcgagaccaatatcggcggcgccggcaacgtcgcgcgcaacatcgcctcgctcggcgggcgctgcattttcgtcggcctgatcggcgaggatgccgccggcacggtgctctcggaggcgctggcgaaagaggccagcatcgagaccgtgctggtgcgcgacgccgcgcgaccgaccacgcgcaaggtgcgcttcgtctccgagcagttctcgacccatatgctgcgctccgattgggagctcgccgcgccggccgcgcccgccatcgagcagcagctgatcgatacgatcctgccgcagctggcgcgcgccgacatcgtgctgctgtccgactatgccaagggcgtgctcaccgcgcgcgtgatccgcaacgtgatcgacgccgcgcggcaggcgcacaagcgggtgatcgtcgatcccaagagcgccaatcttgcgatctatcgcggcgcgaccgtattgacgccgaaccgcaaggaattcgccgaggcaacccgcagccgcgccgatagccaggacagcatcgcgcaggcggcgcccgatgcgatctatctcgccgactgcgaggcgatgctggtgacccaaggcgagcgcggcatgacgctggtgacgcgcgagggcggatcgatccacgtgcccgcgctgccggtcaaggtgcgcgatgtctccggggccggcgataccgttgcggcggctctggcgctggcgctcgccggcggtgccgactgggaaggcgcgctgcggatcgcaagcgccgcggcggcggttgcggtcggcaagaccggcaccgcgatcgtcaggtcggccgaattgcggcgaaggattctgccgcatgcgtcgctggcagccgaggagaagatcgtcccggccggcggcgatatcgatgcctatctcgaggaatggcgccggcaggatctgcgcatcggcttcaccaatggctgcttcgacatcctgcatcccggccacgtcaaggtgctgaccgccgcgcgcggcgcctgtgaccgcttgatcgtcggcttgaacagcgatgcctcggtgaagcggctgaagggggagggccgtccggtgcagaacgagcgcgcccgggccgaggtgctggcggcgctggaagccgtcgacctcgtcgcgatcttcgaggaggacacgccgatcaacctgatcaccaaggtgcggccgagcgtgctggtcaagggcggcgactacacccgcgagcaggtggtcggtcacgagatcgtcgaggccgccggcggcgaggtggtgctggtcgagatcctgcagggtcacagcacgacgtcgctggttgcccgggcccgcgagggcaaggcgtgagcgcgagcatggcatcctcggcaccgaccgcggcgtgtccggcctggcgcgatccggcgcgctggcacaccacgaccgatgtcgtcgcggtcctgatcgcactgtcgctgccgtggtcgacctcgctggtcggtatcttcggcgtggtgctgctgatcgcgattgcgccgaccgtcgagctccgggcgttctggacgctgctgaagcggccgatctgcgtggcgccgatcgcgctgttctgcctcgcgctcgtcggcacgctgtggtcggacgccgcctggggcgcgcgactatacgcggtcgggccgaccgcaaagctcctggtgcttccggtcctgctctatcatttccaacgttcgacccgcgggatatgggtgttcgtggctttcctcgtgtcctgcacgctcttgatgctgatgtcgtggctcgtgctggcctatccgcacctcgcgctccgggcgcccgtgccgggcgagcagggtgtattcgtcaagaactacatcgaccagagccaggaatttacgctgtgcgcggtcgcgctggcctatccgatcgtgatgctgttgcgggacaaacgcatctggccggccatcctgctgatcgtgattgcgctcagcctgttcgccaacatggcgttggtggtggtgtcacggacagcgatcgtgacggttccgattatgttcgcggtttttgcgctgctgcatctgcgctggcgcagcatcgtcctgatcctttgcgcggccgccgcgttgtccgtggtcgcgtggtatggatcgtcgccattgcgacggacggccgagtcattccagcgtgactacaagctctacatggagcgcaacgagccgacctcgctcggcctgcggctcgaattctggcgaaagtcgctcggcttctttgccgaggctccggtcatcggccatggtaccggatcgacgcggggcctgttcgagcgcgtcgcgaccggcggcgtggcccaggcgtccggcgaggtgatcggaaacccccacaatcaaacgttgaacgtggccgtgcagtggggcattgtgggtgtggcgatattgtacgcgatgtggctagtgcacctgttgctgttccgcggcgacggtctcgtcaactggatcgggcttctcgtcgtggtacagaatatttcaagttcgttgtttaattcacacatcttcgactttcatgaaggctggatgtatgtgctgggcgtcggagttgcgggcggcatggcgttgaaagggcgatcggggaccgatttggaacccgagcctccaatccgttcatgatcgctgctgtccatgatcgctggcatgggctccgcagatacgctatcagcctgccaatgtctcgtagcgaactcccagttgccggcaccccgtccattagatgacgcgtctttcacaattcaccctgcgcaacttcctgatcctggcacatgacgcgctggcgacgacgtttgcgttgctgacgagcttctatctgcgtttcgagggcagcctcctcaccgatcgactgccgcatttgctgcgcatcctgccctggttcgtgctgttcagcatcgtggtcagctatttttctaatctgaccacggcgaaatggcgcttcacctcgctgccggacgcggtgaacatcctgcgggtggccgcggtgctgacgctggcgctggtcgtgctggactatgtctactttttcaccgaagcggcttcgctcagtccggtgttccttggccgggtcacgatcatcctgttcttcttccttgaggtgttcgcgctgagcgcgctgcgcctgggctatcgctatttccgctattcgcgcacgcgacttcatgcccggtccgacaatgccgcgccggcgctgctggtcggacgcacggccgacgcggaggtcgtgctgcgcggcatcgagaacggcgccatcaagcggctctggccggtcggcgtgctctcgccgtcgatcgcggaccgcggccagatgatccgcaacattccggtggtcggcggcgtcgatgacatcgaggccgtgattcgggatttcgagagccgccagcggccgatcaagcgcgtggtcatgacgccctcggcgttcgagccggacgcgcatccggagagcctgctgatgcgcgccaggcggctcggcctgatggtcagccgcctgccgtcgctggagggcggcgatgcgccgcgactgaccaatgtcgcggtcgaagacctgctgctgcgcccgagccagaagatcgactatgcccggctcgagacgctggtgaagggcaagtccgtgatcgtgaccggcggcggcggctcgatcggtgcggagatctgcgatcgggtcgcgaccttcggcgcggcgcgcctcctggtcgtcgagaattcggagccggcgctctatgcggttaccgaggcgctgtccgcgcgcgacgccggtcccgagatcgagggccggatcgccgacatcagggatcgtgagcgcatcacgcgcctgatgagcgagttcaagcccgacatcgtgttccacgccgcggcgctcaagcatgtgccgatcctcgaacgcgactggagcgagggggtcaagaccaacatcttcgggtctgtcaacgtcgcagacgcggcgcgcgccgcgggcgcgagcgcgatggtgatgatctcgaccgacaaggcgatcgagccggtgtcgatgctcgggctgaccaagcggttcgccgagatgtattgtcaggcgatggatcacgacctgatgaccgaggccaagggcaagtcgcacatgcggctgatctcggtgcggttcggcaacgtgctggcgtccaacggatccgtggtcccgaaattcaaggcgcagatcgaggccggcggaccgatcacggtgacccatccggacatggtccgctatttcatgacgatccgcgaggcctgtgatctcgtgatcaccgccgcgacgcacgcaatgaccccggcgcggcctgacgtctcggtctatgtgctgaacatggggcagccggtgaagatcgtcgatctcgccgagcggatgatccgtctgtcgggcctgcaaccaggtatcgacgtcgagatcgtgttcagtggcatccgtccgggcgagcggctgaacgagatcctgttcgcaagccaggagccgacgctcgagatcggcgtcgccggcgtcatggccgccaagccgaaccagccgccgatgtcgacgctgcgcaagtggctcgcggcgctggaagatgcgatcgagcgggatgaccgcgtgaccatccgtgccgtccttcaggacgcggtgcccgagttcggatcgaatgccgcctgaccgcgccgtcctgcggacgatgacgcaggaccgtttcgaaagccattgatgcccagttcccgaaaagtcgtggtcgccagccagcactatccgccggaccacagcacgaccgccgcgatcatgtccgcgatcgccgaacggatcgcgcaggaggcggaggtggtggtggtctcggggatgccgggctcggcgagggcgccggcgccggggcggcccgccgtcgtcgaaatcaggaaccggctgccgggcaaggcggcgctgatcaagcgcgcactggccgaggcgctgttcaccggccggatgttctttgcgctgttgtcgcggctgcagcggggcgacgtggcgctcacggtgaccgctcccttcgcgcttccgtacgcggttgccgtcgcggcgaggttgaagggggccaagtcggcgctgatcctgcacgacctgttcccggacgttctcgtgatggccggcctgctgcggccgtcctcgctggttgcgcgagcgatgcgcgccatcaacgcgctgatgttccgtgccctgaacgcggtcatcgtcatcggccgcgacgccgagaagctgctgctgcgctatggcggaatgacgccggccaagatccgcttcatcccgaattgggccacgctcgcccctggcaatcgtcccgtcagccccgacaatccgtttcgcaaggccattgccgcccgcttcgtcgttggcctgtccggcaatctgggtttcacccacgacccggatatcgtcttccaggccgcgcggctgttgcgcgaggagcgcgatatccatttcctgctctcggggtggggcatgggattcgcgcggttgaaggacatgcaggctgcagcgcagttggccaacgtcacgctggtcgaccgcgtcgcggacagcgagctggatgcgctgctctccagcgcggacgcctggctcattccctatcgcaaggacgtcgccggtgtatcggtcccgagccggttctataatctgctcgcggccggccggccggtcatcctggtctccgaacccgaggccgaggcggccctgaccgtcagcgagaacgggctcggctgggtcgtcacgccggggcggcccgatcaactcgccgatgccgtcaggctggcgtcgcgatcgcaggacacagggatggccgaacgcgccgtcgcgaccgcgcggagcttcagtcccgagcgggcgctggcgagctatgctgcgctggttgcggagctgttatccgatcgcgatgtggagcggacagcatgaatgatcgccgccggacggttctggtgacaggtgcgagcggctttgtcggtcgccatgtggtgcccgagctggcgcagaacgactggctggtgcggcgtgcggtgcgcaccttgccgctggatgcaaacgacgtggcgatcggctcgctcagccccgccaccgattggcgcgccgcgctcgagggcgtcgacgctgttgttcatcttgcggcgcgcgttcaccagcagtccgacgagcaggcgatcgagctttaccgcaacgtcaatatcgaaggcacgctgcatctggcgcgctcggcggttgcggcgggcgttcgggatttcgtctttgtcagcacgatcctggtgcatgggcgcagcaattacgggcgccccccgttccgcgaggacgatgtcctgacgccccgcggcctgtacggaaactcgaaggcggccgccgaagtcggcctcaaggagatcgcgccaggcagcggcatgagggtgaccgtgatcaggccgccgctgatctatggtgccggtgcgaaaggcaatttcgccttgctcaagcgcgcggtgctcaatcgcatgccgcttccgctggcgtatgtgaagaatcgccgcgcgttcctgtcggcggaaaacctggcgtcgttcatcctgcatcgcctgtcgcaaccgggaagcgatttcgatgtgttcctggtggccgaccgcgagcaagtctcgacgcgggagttcgtcgaacggctggcccgcgcggctgaaacctcgccgcgcctgttctggctgccgccgccgctcttgaagatgtcgctgacggtgggcggccgcaaggaggcctatgacagcctgtttgcctcgcttgaacttgatctgtccaagatcgcgagcacaggatggcagcagccgatcagcctggacgaggggctgaggcgcgcgctcagccgaatcgatatctgagcgatcagaatgcgtgcgagaaccggcgcagctgccaggcgacggcgactgcgccggccagcagcagggcgaggtcagcaaccagcgaattgagcaggaccgaggcgaaagcgagcagcgccagcaccacgttgagcgcaaggacttcgccgacgacgcgccacaccgtgaagccgttgtcggtcgcgcgctgatagaagtgcgagcggtgcgcggcccagaatggctcgcgccgcgccatgcggcgaaacagcgtgaccgtcgcgtcggtcagatagtacagcggcaacagcagcgcggcggcgaattgctgatgcagcgcgagctcgagcaggcaccagccgagcagcaggccgatcggcaggctgccgacatcgccgaggaatatctttgccaccggccggttgaacggcgcgaagccgagcagtgcgccgcacagcgccgccgcgaccagcgcgggagccgcgccgatatggccgtagctgccgagcagggcgaccgccaccgtgatcggcaccgcctcggccaccgtcatcaggtcgagcccgtccatgaagttgacgaggttcacgaaccagaggccggcaatcaatagcaggccgcgttcgagccagagcgggcaggccggaacgagcctgagatcgccgggcaccgaaaacaacacggcggcaacggcggcggcctgcagcagcagccgcgggatgacgggcagggagtggatgtcgtcggcaaagcccaccaccgcgatgaacaggcaggccgcgaacaccgtgaagggaatcgccaggtccggcgatccggccagcacgatgacgatccccgccgcgagcagcgtcgccgccgtgaccgcgatgccggcgccttgcggcgttggaatgcggtgcgacgagcgtgcattcggcttggccagcgccacgcgcagcagcaccggccgcgtcgcccggatcaggacggccgagatcgatgcagccagaaccgctgcgatcaacgacaggaggatctcgaaactgctcatgctggtctggtcactgcgatcccgggactcacgcttgtgatccggggactgcgatcgcctctgtgcccttggcagccttttccgggctcaggacccagaccaggccgccgaatacgccgaccacgaacgacaccgcgccgaacagcagcgagatgttgacgccctcattggcgaccaatccggcatagccgaaggccagcgccatggtggcctcgcgcacgccccagccggcgatcgagatcggcatcatcgtgatcagcatgacaggcggcaacagctggaatatctcgccgaaggtgaccggagccgtgatcgacttcaccacgcaccaggcgatcacgacggtcacgacgtgaatggcgatcgaaagggtggcgaccctcaagccgtgctcgcggctgaacagcacgcggttggcgatgaccgcacaggcgtggatgtggtgcgttgcccaccattgcttcagccagggccacggcagcaggccgatcaccaggaagccaaatccggccgccagcgccgcgaggtcgagcagcagcagcgccgtccagccgtgggaatcggaaatcagcctatagctccagggcagggtggccgcgatgacgaccgccagcgcaatcagtccgaccgcgcggtcgacgaaaatcgagtaggtggccgtgcgccagcccgcaccggcgcgcgcgacgagccagagccgcacggcgtcgccgccgatcgaggacggcagcgtctggttgaagaaggtgccgatcacgttgaagcgcatcgcctgcgcggtccgaagcggcgcgccgcactcgacgctgatctcacgccagcgcaacaccccgagaaagatctgcaggaacgagaccgcgatggcgaggccgagccagcccaggctctcgacctggatgcgggaggcgagatcgtacagattgaccttgcgcagcgagaaatagagcagcgcggccgagatcaggatcttgacggtcgaaagcaggattcggcgcatttcggttcgcgctgccaggtgtcaggatgtgtcaaaaacagcgcaaaacgctttcgcgcgcccaaattcgtcgccttggtatggtttccgcaccgatctggcaatacccgtgctggtccctattgcggcaggtgggaaggggcggctaaacaggccggaacggggacgtcccgccgctcaccgggagtttagaccggtaaaatccgaccagacgcgcgggggcgcgtgaccgctcggatcgtgcttcccacgtcaaagggggcgccggccgcggcggtccgggccactggtatgccgtccgtggatgggtacgatggacttgcacgacaggatttgaggcatcgatggatcgacgaattattcccctgatcatgtgcggcggtgcgggcacacggctgtggccggcgtcgcgcgaggtgcatccgaagcagttcctgtcgctgttcggggtgcgttcgaccttccaggagacgctgctgcgcgtctctgatccgaccttgttcgagcgtcccatcgtgatcaccaacgaggcctatcgcttcatggtgttggagcagctggcccagattggccgcgaggccgacgtgctgctggagccgatgcgccgcgactccgggccggccattgcggccggcgcggcatttgcgcagagccgtgacggcgaagcgatcgtgctggcgctcgccgccgaccacctggtgcgggatacggccgccttcgtcgctgcgtgccgcggcgggttggtggctgccgaagccggccgcatcgtgactttcggcgtcaagccggagcggcccgccaccgaatacggctatatcagtccgggtgaggtggtcgccggcgaggtgcgcgcggtggcggagttcgtcgagaagccggatgccgcgacggcggcgggctatatcgatacgggttatctctggaacagcggcaacttcatgttccgcgccagcgtgctgctcgacgagtatcgcaatgtcgatgcggacagcattgcctcggtggagcagtcggttgcgtcagcgacgcgcgatctcggcttcgtcaagctcgatgcatcggcattcggcgcggcaaaggcgatctcgatcgattacgccgtgatggagaagaccgcccatgccgcggtggtgccggtggcatgcggctggtccgacatcggctcgtggcgccaggtctgggagctctccgacaaggacagcctcggcaacgcggcgcgcggcgcggcggtgttcgaggacagccgcaattgcaacgtcgcgaccgaccgggcgctggtcgcgctcgaaggcgtcgacgacctcgtcgtggtcgcgacccaggacgccgtgctggtgtcacgccagaaggacgccaacgggctgaagcggctggtcgcgaaattgaaggtcgccgcgcccgaggtgaccgagaaccacatcaaggtgcatcgcccctggggctcctatcagtcggtcgacaatggcgaccgccaccaggtcaagcgcatcatcgtcaagccgggcgggcggctgtccctgcagaagcaccatcaccgctccgagcactggatcgtggtgcgcggcaccgcccaggtcaccgtcaacgagctggtcaagacggtgcacgagaacgagtcgatctacatcccgatcggcgcggtgcaccggctggagaaccccggcaagatccagctcgagctgatcgaggtgcagaccggcagctatttcggcgaggacgacatcatccgcatcgaggatgactaccggcgcagctgaggcgtcggttcccgcgcgaatgatcgggcgtgggacgatgtaactctttgaatcaaaacgtgtccggatttcgcccttggcaatcgccacatttgaggcgccgtgctatagcggctgccaacgaagcggggtgatttgcgccgaaggcgcggatcgggaagacgggcctaggtgctgattccctcggagccggtgtggctccctgaggagccgggacaaccgccagaacgttacttggggtctacgatatgaatgcaaaagtgtccgcagccggcgcgaaggccgatatcggccgcgccttgcgcgtcggcgtgatcggagccggcgtgatgggcagcaaccatgcccgcgtgctggccggactgcccggcgtcgtgctgatcggcatcgttgatccgctgccggaacaccgcacccgcgccatcgacctggtcggctgccgcgccttcgaaaccctcgatcagctgcttgccgagggcatcgatgcggtgacgatcgcagctcccacccatctgcatcacgagatcgcgctcgcctgcatcgcgcgcaacatacatatcctggtcgagaagccggtcgcatccacggtcgaagagggccgcgagatcgtcgccgccgccgagcgggccggcgttacgctgatggtcggtcatgtcgagcgcttcaatccggcggtcgctgcgatcaagcaggcgatctcgggcgaggacatcctgtcgatcggcatcacccgggtcggcccgttcccgccgcggatgtccaatgtcggcgtcgtgatcgatctcgccgtgcacgacatcgacctgatccgctggttcaccgagtccgacatcgtcgaggtgcagccgcaactctcgagcgcggtcgccgagcgcgaagacatcgcgctgctgcagttccgcaccgcctccggcgtgctcgcccacatcaacaccaactggctgacgccgttcaaggcgcgcaacgtcacggtcgcgacccgcggcaagtatgtgatgggcgacctgctcacccgccaggtcaccgaatgtttcggcttcaagccggacggcagctattcgatgcgtcatctgccggtcggacacgacgagccgctccgcgccgaactgatcgccttcctcgatgccgtgcgtagcggcaagctgccggcggtgtccggcgacgagggcgtcgccagcctcgagatcgcgatccgctgcctggaatcgcccgcgcggcccgctgcctcgacgatgcgcaagggaccgcgccgcgtcgccggctgatcgtattcaccggccgattgtcatccattcaacacgtgcaaagagcttccatgaaccagcatatgcagcttgagcccattcccttcatcgatatttccgcgcagcgccggcggctcggcaagtcgatcgatgacgcggtcgcgcgcgtgctcgaccattgccagttcatcaacgggcccgaagtcaccgccctggagaaggcgctggcggactatagcggcgccaagcatgtggtgagctgcgccagcggcaccgacgcgctgctgatggtcctgatggcgaagaatgtcggcccgggcgatgcggtgctgtgcccgaccttcaccttctgcgcgaccggcgaggtcgtgacgctgaccggcgcgacgccggtcttcgtcgatgtcgacgaggagaccttcaacatcgacgtcgactcgctgaagcgcggcattgcgacggcgcgcgcccgcgggctgaagccggtggccgtgatcccggtcgacctgttcggccagagcgcggatcacgatgcgatcggcgcggtcgccgaggctgagggcctgtttgtgttggatgatgccgcgcagggcttcggcgccacctacaagaaccgcaggctcggcactttcgggctcgccaccggaaccagcttcttcccggcaaaaccgctcggctgcttcggcgacggcggcgcgatcttcaccgatgacgaggaactcgcgcgcacgctgcgcagcatccgcgtccacggccagggctcggacaagtacgacaacgtccggctcggcctcacggcgcggctcgacaccatgcaggccgcgatcctgctcgagaagctgaagatcttcgacgacgagatcgcggcgcgcaacaaggtcgccgaacgctattcgcgcgcactcggcaacctcgtcgcggtgccgcgcgttgctcccggctgcacctcggtgtgggcgcagtacaccatccgcctgtccgagggcatcgatcgcgacgccttcgcggccgcattgaaggcgcagggcgtcccgaccatgatctactatccgaagtcggtccatcagcagacggcctacagccactatccggttgccgacggcggcctgccggtcagcgagcggctgtcgaaggacgtcattgccctgccgatgcatccctatctcgacgaggcggcgcaggaccgcgtcatcgcggctgtgcgcagcgcgctttcggcctgatacgcagcttttgcgtatggtgatgatgcgctagaagcagcgcatgcttgggcgcatcttcactgtcggcggctataccctgctatcgcgggtcaccgggttcgcgcgcgacatcatgctcgcggcgatcctcggtgccggcccggtcgccgacgccttcttcgtggcgctccggctgcccaatcattttcgcgcgatcttcgccgaaggcgccttcaacgccgccttcgtgccggcctatgcccatgtccatggcgaacgcggcgaagcctcggcacggctgttcgccgaccgcatcttcacgctgctgttcgcctcgcaggtgatcctgctggtggtcgcgatggcgttcatgccgcaggcgatgagcatcctcgcgccgggcttcaccgaggacgccgcccagcgccagctcgcgatcgagctgacgcggatcacctttccctatctgctgctgatcacgctggtgacgctctatggcggcatgctcaacgtgatgcatcgcttcgccagcgccgccgcggcgccgatcttcctcaacctcgcgatgatgatgacgctggcgctcgcggcgttcttccccagcgccggccatgcggcggcctggggcgtcctgatctcgggcgtcctgcagtttgccctgctcgccggcgacctcgcgcgccacggcggcctgccgcggttcgcgccgctgaggctcgacgaagacgtccgcgccttcttccgtgcgctgggtcctgcgacgctgggctcgatggggacgcaggttgcgttgttcgctgacaccatcatcgcgaccttcctgcccgcaggcgcgctgtcggcactgtactatgccgaccgcctcaaccaattgccgatcggcgtgatcgggatcgcgatcggcaccgtgctgctgccggagatgtcgcggcgcctgaccgccgacgatcacgccggtgcgatggccgcgcagcgccgcgcgttcgatttcacgctgctgttctcggtgccgttcgtggcggcgttcctgacggtggccgatccgatcatgcgcgcgatgttcgcccgcggcgcgttctccaaggcggacgccgcaagcgcaggtgccacgctcgccgcctatgcggtcgggctcattcccttcgtgatgatccgcagcgccgttgcgaccttctatgcccgcaaggataccgcaaccccggtgaaggcggcgctgaccggggtcgcggtcaacgtcgcgctgaagatcgcgctggtcggcacgctggcgcaggtcggcctcgcgctcgcgaccgcggtcggcgcctgggtcaacctgctgctggtgctgatattcgcgatccgacgcggctatctcgtgctcgaccgcgtgctgatccgctcgttcggcacgtttgcgatttgcggcgtgctgctcgcgctcgcgctgtggctgacctcccatttcgcctatgtgtggttcgcgccggtgcagcatttccgcgacgaactgatcctgctgctcctgatcgccgtcggcgccttcgtctacgccttcctgattcttgcgctgttcggccgcggctggctgttcgcgctgcggcgcgtatagttttacctgtcaaatcaaatgcataggaacggggtgcacgacagcgccgcgcgcggtggaaagcggtttgcgcttcgcgggcaaccacgccaatatgcgcaaaacacaccaaggcaattggagagacgatggcagctcccatcaaattcggcgtcggacaaagcgtgcggcgcaaggaggacgacgctctgattcgcggcaagggccgctataccgatgacgtcgcgccatctcccgcattgcacgcgttgatgctgcgttcgccgcatgcgcatgccacctacaccatcgatgccggcaaggcccgcggcatgccgggcgtggcgctgatcctgaccgcggccgatgtcgccgagctcggcggcctgccgtgcctgttcaacctcgaaaccgatccgttcattgcgccgccttatccgatcctcgccaaggatgaggtgcgccatgtcggcgatgccgtggccttcgtggtcgccgataccgtcgatcatgcccgcgacgcgatcgaggcgatcgacgtcaaatggacgccgctgccggcggtggccggcctcgtcaacgcggtgaagaagggcgcgccgcaggtatggccggacaagcccggcaatgtgctgttcgatgtctcgatcggcgacaagggcgcagccgaagccgcgttcgccaaggcgcatgcggtggccgagatcaccatcgtcaatccgcgcgtcatcaccaatttcatggagacgcgcgccgcggtcgccgaatacgacgccaagaaggatcatttgacgctgacgatcggcagccagggcagccaccgcctgcgcgagatcctctgcgacatgatcctgaagatgccgaaggagaacatgcgggtgatctgcccggatgtcggtggcggcttcggcacaaaactatttccctatcgcgaatacgcgctgatctcggttgcggcgcgcaagctcaagaagtcggtcaaatggaccgccgagcgttccgaccatttcatgggcgacgcgcagggccgcgacaacctcaccaccgcgaagatggcgctcgccgaggacggcaaattcctcggcatggatgtcgatttgatgggcgacatgggcgcctatctctcgaccttcgcgccctatatcccgcatggtggcgccggcatgctgccgggcctctatgacatccaggccttccattgccgagtccgcaccgtgttcaccaacacggtgccggtcgatgcctatcgcggcgccggtcgcccggaggccgcctacgtcattgagcgcctcgtggatgccgccgcgcgaaaactcggcatgacgcccgacgccatccgccggaagaacttcatctcgccgaagtcgctgccctacacgaccgcgaccggcaaggtctacgattccggcgacttcgtcgcgcatatgaagcgcgcgatggagatcgccaactggaaggagtttccaaagcgcgccaaggcggcgaagaaggacggcctggtgcggggcatcggcatggcgagctatgtcgaggtctgcggcaccatgggcgaggagaccgccaatgtggcgctcgatcccaatggcgacatctcgatcctgatcggcacgcagtcgagcggtcagggccaccagaccgcctatgcgcagatcgtcgccgagcagttcggcgtgccgcccgagcgcgtccatgtgctgcagggagacaccgacaagatcgcgaccggtctcgggaccggcggctcggcctcgattccgtccggcggcgtcagcgtgcagcgggcgacgcacgagctcggcaacaagctgaaggagctcgcggcgcaggcgctggaagccggcgccggcgacctcgaaatcgcagacggccgcattcgcatcgccggcaccgaccgttcggtcagcttcgccgatctcgccaagcgtcccggcggcgacacatcgaagatgaatgcgagcgcgaccttcgccagcgctgacggcacctatccgaacggcacgcatctcgccgaggtcgagatcgatccctcaaccggcatcatcaagatcgtcagttacgtcatcgtcgacgatttcggcgtcacgctcaatccgctgatgctggccggccaggttcacggcggcgcgatgcagggcatcgggcaggcgctgatggagcaggcggtgtacagcccgaccgacggtcagctcgtcaccggcaccttcatggactatgcgatgccgcgcgccgccgacgggccgtccttcgtgttcgaaacccacaacgtgccgtgcacgaccaacccgctcggcgtgaagggcgcgggcgaggccggcgcgatcggctcctgcccggcggtcgtcaacgcgatcgtcgaggggctgcatcgcgagttcgggatcgaccacatcgacatgccggcgacgccggagcgggtctggatcgcgatccgcgaggcgcagcgccgccatactctctgataaattgtcgcaggcggaatgaagattccgcctgcggtgtttgccaaccaggccggccgcgcacctgcggaccgggacagagcgaattgaggggttttgccgatgaagcggattgtcgtcgttgctgcgatgctggcgttgagtgcgggtgccgtcgtagccgaccaggagcaggtcaagcagacccaggcgcagatgaaggagaccggcaagaacgccggtgcgctcggggccatcatcaagggcgagaagccctatgaccaggcaaccgtcgatgctgcactggcgaagttcgaggacaccgccaagaagctgccgacgctgttccccgaaagctccaaggggctgaagaccgaaggcgattactcggccgatccgaagatctgggaagacaaggcgggcttcgagcagcacatcgcgagctatgccaaggccgtcgcggacgccaagggcaagatcaaggatgtcgacacgctgaaggccgagctcggtgtcatcggcaagcagtgcggcggctgccacgagacctatcgcctcaagaagggctgatcgtggtttccgacgctgcaggtcttcattgaagaggggcggacgccgcgtagcgtccgcccctcttttgtgtcggccttttgttgttcgatttgcgccgtcgggcctacttggtgacctggccgcggatctcgccgcccgggttggccgcggtgtggacgttgacatagtacttgccggcgagcagatcggcggcctgcgcgtcggtcagcgtggcgctgccttcgacagggctcgacgtcgcgttcgggatggcgaccgcgacgccggaattcttgccggcctcggcagggccgtggaaatgcgcggcggtggctgggcctgacaggccggaatatgtcagcttccagctgagtttcttgctggcggcatcatagtcgatgtcggcagtgccggtgcccgcgctggtggtggcaggcacttcggatttgccgtccagcttcgctgtcagcttctcggcgaaggccggaccggcgagggcgacggcagcaccgagtgtcagcgtggcaagcaaggtcttgtttggcatggttctctcccctttgacgtcacaggacggttgcagttcttcaacagcggcttcgccgatttattcccagaatgatcgtgagctgcggcaaatttgatgagagcttgtacgaagggttgtcatcatactggttgatacgctagcgcgaccaatgacggatcggtgaatgttgcgacgaattgttctccttgccggcctggccggcatcatcggcatctgcgtgttctggtggctgacgatccccgcgaccgtcgccgcgagtgcgctgccggcctaccagccaaacctggccaacggcctcacaacgttcaatgcgggaggatgttcctcctgccacgcggtgccgaagcaggacgaccgcaccaaattgggcggcggcctcgcgataccgtcgccgttcggcaccttctacgcgccgaacatctcgcccgatccgaatgacggcatcgggcgctggagcgaggccgatttcgtcaccgcggtcatgaagggcacctcgccgtcggggacgcactatttccccgcgtttccctacacatcctatcagcacgccagggtcaacgacgtgcgcgacctgttcgcctatctgaagaccttgccgccggtcgccggcaaggtgcgcgaccacgacgtgccgtttccgttcaacatcaggcgcaatgtcggggtctggaaattcctgttcatggacggcaagccgttcgtcgcggatgcaagccgctcggcgcattggtatcgcggcgcctacctcgtcaacagcttcggtcattgtgccgagtgtcacagcccgcggaatttcctcggcggcatcatcagctcgcagcgtttcgccggcggcccgaatccggagggcgaaggctgggtccccaacatcacgccgcgggggatcgcggactggagcgcgaaggacatcgcctatttcctcgaaagcggacagacgccggacggcgatagcgccggcggatcgatggtgcgcgtgatccgcaacacctcgcagctctcgtcaagcgatcgcgacgcgatcgccgactacatcaagtcgctgccgccggtcgacgggccgccaaagccgatgaagaagggcggctagagcggagcacgatctttcgcaacaccgcgcgacgcacgtttccggatcatgctctggcgcagcggcgtgtgctacctggtgacggccgtcgggatgtgagcggtgctgcccagcggctcgatggagaagttgatcggcacgtcctggccgtcacggcatttcaggaggcccgaatagccctgcgctccggatgccgcgaggtggcatttgtcgtcggccaatgccagcgtaccctcgacatgcggtggccgcgtcgatacgtgcagctcgagggtgccggtcttttcctccgatccgttgatgctgcagagcccgacatgccgcaatgtgatcgcgccggcatagcctgtgctgtcagcggtgccggcgagattcgcctgcatctcccattcctgcagatagccgatctgacctttcgcggagagggactgcgccaatgcagggccggcgctgattgcgcatgctgcgagcaacatgcgtgcggccggttcatgtgcacgccgcatcacggcaactctcgcacgaagcgaaagccgttgccatagtagcgcacgtcgacgtcgtagcggaatcgcgccgccgagcggatcgcggtcgccggactggtgaagttgccgccccgcagcacacgcagccggcaatcgccgctggtccatgccgaggcgtccttcggtgcgttgcggtaattgtcgttccagcaatcctcgacccattcggcgacgttgcccgcggtgtcgtacagtccgaaaccattggggcggaatgagccgaccggtgccatcttctgcggcgggggagtgacgcagttcgcgcattgggcgcgccccgtgccgacgtcgcggccccaccagtacggtgtcttggtcccggcgcgcgccgcatattcccactcggcttcggtcggaagccgatacttctgtccggtgcgttgcgacagccacgccaggaagagcttggtatcgtcccagctgacattgatgacgggctggctgccgcggccccaaccgtgatcgtcgggccgaaacttgcaggcgcctgcgtcggcgcattgatcccattcggcgaaagtgacttcgcggcgcccgatcgcgaacggccgtggaatggggatcgtccgctccggcttttcgtacggcgtatcgttggaacccatcacgaagtcgccgggcggcaaaacgacgagctccccacagtctgtacagtcgcggaaaacgtctccaggttcaaggcgcgacggctgcgtcggagcttgcgccacggtcagatgttcgggaggcgctggacgatgcgaaccagattcactatcctgcctgagggttgcggtcttgccgttggcgccaagtgttgtggccaacgctgtgattgatatcacaaacagggaatttattttcatctatcgtatccggctaaaatgccaatgatcgtcaacgcgattgtgcaatcaagcggagcaagaatgcttcattcagcgatgatcggcaagccgagctccgaagcagacgactagcagttatcgcgcagccgagatttcagcgcggacaagactggacacaattttgatgatgcgattggccgcgacgacgtggccgggatcggggaattgcaaatgatgcgattgcagaagatgcgtaggtctttcccgtcagcgttggtgccgcttcttgctctgctcgcattcgccgtgcccgcgcgagcgcagaccgggggaccgacatcgtcgccacctggcgccgccgtctacttcatcggcctcaaggatggtgattcaattcccccgaagtcgaccatccactttggcctgcgcggcatgggtgttgcgcccgccggttcggatcgcgcgaattctggccaccatcacctgatcatcgatgcgccgacgcccccgctcaatgtcgagatcccgaacgacttccagcatctgcatttcggggcggggcagaccgagaccgaactgacgctgccgcccggcgaacacacgctgcagctcgtgttcggcgacaagaaccatgttccgcattcgccgccggtgatctcggagcgcatcaaggtgaaggtcgtcgatcccgccgcggctccgcaggccg

SEQ ID NO: 5 - DNA, 243392 bp, Bradyrhizobium enterica
ccctcacccgatttgctgcgcaaatcgacctctcccaagggagaggtgaactcgacgccgttccagctcaacctgatctcatcaggcttcagttcaacgtcaaaagcggtctatccgatacggcgaggtgtccaccgaggatgcctcgccgttcatcgtttcggcgagcacccgcgcggtcgccgggccgagcgtgaagccctgatggccgtgaccgaaattgacccacagcccacgatggcgcggcgccggcccgagcaccggcagcatgtcggtcgtgcaggggcgggtgccgaaccagggttcgggctcgacgcgactgccgatctcgatcagttgccgtgcggcggcttcggcgtagccgagctggatcggcgtcgcgggcgcgtccggactggtgagctccgcgccggtggtgatgcggatgcctttggtcatcggcgccatcgcgtagccattggcgctgtccaccagcggcaggtcgagcgagcggccgccctgatagtgcatgtggtagccgcgcttgcgcaccagcgggatccggtagccgaacttgcccagcaattgcggtgaccacggtcccagcgcgaccacgacgtttgcggcatcgatccggccgctattggtatcgaccgaccagccggcggtcgtctcggtcagcgtctgcgcgtcgccgtgcaagagcgtgccgccgagacgttcgaacaatccggcataggcggaaacgagaccgccggggtccgacgtggtccacggcccgagccagtggatggcgccgggcaggtcgtcgcgcagcaacggctcagccttggcgagctcgcggccgtcgagcacgcgaaactgcacgccgaactcgcgccggttctcttctgcgaccgcgatcgcctgctctagcgcagccgggtcgcgatgcagcaggcgatagccggcgcggcggatcagattgtcggcatgggcatcgcggatcagcgtgtcgtgctctgctgtggcgtgggcgatcagccgcgcccaggcgagggtggcttcgcggtgccgctcgggcgtcgagttccaccagtagcgcagcaacgggccggcatgccgcggcagtgaggccaggcgatagtgcacgtcgttggtgcgccccatcgcgatcctggcgaggacggccggatcccgcggcatcgggtagggccgcactgcttcgctctggatgatcccggcattgccgtagctggtctcgcggcccggctccttgcggtcgacgagcgtgactgaccagccgcggcgctgcagatgcagcgccgtgctgacgcccaccatgccgccgcccagaacgatcgcgctttgcattgcatccgtctccgtcaggctccgttacgcctgacgaacggaaatgcctgtccaataaaaacgcccggcgtgaaccgggcgttttgacttgtagctggcgctagttgccgccgccgaagcggcgcgaccaccagcctttgcgggccggcgcctctgccgcagcgggctctgcggcagatgttgcgggctcaggggcaggggccacttcttccgccgcgctctggaccagggtgggcgccggtgcctcgggttgcggactcgacgcgaagctgaccttttcgcgcaccgttgagcggcggcgctgcgagcggtcgctttcggcggccgtatcctccgcggcaggcgctgcaacaggttcgggctcgtgtgctgtggccgtctcgacagcaatggtctcgaccggctgccattccgtcggcggcgcgaccggctcgggctgcgccagcgagggcgccggctccgcgtcatggccgtccaaatcggcgacggcgtcggccgcctcgggcggtgcgatcgggcccagctcgtcggagatcgatccggcgagaccgtcatctggtccgccgctgccgcgccggcggcgtccaccgcggcgtccgcggcggcgcggacggcgatcgccattgccggcctcatcgtcgcggactgcgccctgcgcttcgttggcttcgtcctcatcgccttcggcatcggcggcggcaaccgcctcggtgccctcgggcaacacgtgcatcaggtcgccgtcctcgcgcggcgccggagcgccttcgcgggcctcgttgccaccgcggccgcggcggcggcggcggcgcttgcggcgctggccgtcgccttcgccctcggcggagccggattcttcgccggccgcccggtcgtcggcgaggccttcggtctcgtcggtctcgatctcggcctcgtattcgaacagctcttcctcgtcgtcggcctcatcgacctgcgccggcgcggcggccgcctgcgcggcaagcagcgccttggcggcttcgagcgtatggacctgctcaccgcgatcgatgatgtaggattgctggccgtgcacggtggcgtcggcgacgatcgacagcgagacgcggaaggcgtcttcgaggtcgcgcagatggccgcgcttgtggttgagcacgtagagcgcgacgtcggtgcgggtacggaccaccagattgtgggtcgcgcccttcatcaggatttcctcgatgccgcgcagcagctgcagcgcaaccgacgagaccgagcggacgtggccggagccgccgcattgcgggcagggctctgtcgagttctccagcatgctggcgcggatgcgctggcgcgacatttccaggaggccgaaatgcgagatgcggccgacctggatccgcgcacggtcctggcgcaggcagtcggacagcttgcgctcgaccgcgcggttgttgcgcttctcgtccatgtcgatgaagtcgatgacgatcaggccggcgaggtcacgcaggcgcagctgtcgcgcgacttcttccgcggcttccagattggtcttgagcgcggtgtcctcgatatggtgctcgcgcgtggcgcggccggagttgacgtcgatcgagaccagcgcctcggtctggttgatcacgatgtagccgccggagcgcagctgcacggtcggcgagaacatcgcgtcgagctggctttcgacgcccatccgcgagaacagcggctggccgtcgcgatactgtttcaccgcgcgcacattggccggcatcagcatcttcatgaagtcgcgtgcttcgcggtagccggcttcgcccgccacctggatctcgtcgatctccttgttgtagaggtcgcgcagcgagcgcttgatcagcgagccttcctcgtagaccagggtcggcgcctgcgacttcagcgtcaggtcgcgcaccgtctcccacatccggatcaggtattcgaagtcgcgcttgatctccggcttgctgcgggaggcgccggcggtgcgcaggatgatccccatgccctcgggcacgtcgagatcctgcaccacttccttgagccgcgagcggtcctgggccgaggtgatcttgcggctgatgccgccgccacgcgcggtgttgggcatcagcacggcgtagcggccggcgagcgacagataggtggtcagcgcggcgcccttgttgccgcgctcctccttaacgacctgcaccagcatgacctgccggcgcttgatcacttcctggatcttgtactggcggcgcgggcggaacgggcgctccggaacctcctcgagcacgtcgtcaccgccgacggactcgacgacatcctcttcctcgccttcttcgccgtcatcctcgtcatcatcttcgccagcttcgtcgctgcgcgcggattcgggggcgacttccaccagcgaggcgtattcggtgaccgcatgctcatcggccgcggcgtggacttcttcggcagccacatacggcgcgtcatcggcgtgggcggcgttttcctcgacctgttcctcatgggcccgctcgggctcatgattgacctcgaccggctcgaaggcctccggggcggctgatgcaaccgaggcttcgaccgccgcggcgacgggatcggtcggagcatcggcagccggcgcctcgctcacgaccggggcacggtcgtgatcgtccgcatggtcatggtcgtggtggtgatgatcgtggtggtcatgatcgtggtcatcgtggccatgatcgtggtggccgtgatcatcatgagcgtgaccgtgctcatcatcgtggtggtgctcatggtcctcatgatgcgcatggtcatgcgcctcatgctcgtgcccctcatgggcgaccacgccgtgctcgtgatgctcggcatcgaccggatgttcgtgggcctcggctgtcggcagcgcctgcgcgtcgccggcgccttcgatcacctcgctctggacacggtcgccgtggccgcggcggcgggcattgcggtggcgcgagcggcggcgatggccgcggttctcgtgctcttcctcggcctcgcgatgggcgcgctcgtcggcttcgatcagcgcctgacggtcggcgaccgggatctggtaataatcgggatggatttcgctgaaggccaggaagccgtgccggttgccgccatactcgatgaaggcagcctgtagcgacggctctacgcgcgtgaccttggcaaggtaaatgttgccgcgcagttgcttgcgctgggcggtctcgaaatcaaactcttcgacgcgattgccgcggaccacgacgacccgggtctcttccgggtgggtggcatcgatcaacatcttgttgggcattttggagctcttgacggcggcgggcgcggatcatggcgcgcgcaaactgcgccgcccggtgacgcgacggtccacctgattcgggggtgaggggaaggccaaaacgcgtctcgcggcgcagcgccggacgggaactcaccgggatgatgcgacgggcgaggttttcacctcgcgtcagcgcgagcattcgggggatcctggtcggcaatgcagtctggcgcattaagcgtcggcccgtctaaacatgttggcggcgaaattgaccgccgtatcttttgctgaaagccccgtccggcgccgaagcgcctgccggcgatcgcatatcgaggccccaaggaatcccccaaggaaccggataatcggttacgccgtgtctcaaaccgtccctctggcgagggagtgtgtctgggaccggacgccgctcgggcttgaatccgccactccgtgtcagccgcgcgcggcgctggctggggagggaccggaaaaacacggcgggatcttcgacttggaaggttccaccgctgcaccaagaggctgaacgcgacacaaccgggagtactagccgtcagcattccgtacatacgtggattgaccgtcgcgtgcaagggaagcgtcacgccgccgcaacactcggttcttttcgctccgatgtcattagggcacgattaaccgtgtggttctaatgcggtaagaagcagctgggaggctccgaatcgggtggagaaccgcgcaaaacaccttgtttttctgggatgcgggctgttgtgcgctgcagcattggtggttgccgtggccagcgccccgagcgcggccgaaggcccgcaggccggtgcatccgcgccggacgccagcaccgcgaacttcccggtcgcatccggcgccaggcttgccggcgacggcaagcagacccgattcatcctcgatctggatcgcaagatcgaatttcgcgccttcccgttggccgacccgtaccgggtggtggtcgatatcccgcaggtcaatttccagctcgcggccggtaccggctcggctgggcgcgggctggtcaaggcgttccgctatggcctcgtgatgcccggcggttcccggatcgtgttcgacctgaccggaccggtgaagatcgccaattcctacgtgcttgacgctgccaatggccagccgccgcggctggtgctggatttcgaggaggtcgatcgcaccagcttcgtgcagtcgctcgcgcccgagagccgtcccgagctgaagcctgcgatctccgagtcgaccacggcggccataccggccgtcaccacggcggcgttgccgccggttgcggtcaccgactcgcgcccgttgatcgtgatcgatcccggccacggcggcatcgacaacggcacccagtccggcgatcagaccgagaaaaacctggtgctgggcttcggccttgcgctgcgcgaccggatcgagaagtcgggcaagtatcgggtgatcatgacccggtccgacgacaccttcattccgctcaacgaccgggtgaagatcgcgcgcacgcaatccgcggcgttgttcgtctcgatccacgccgatgccttgccgcgtcgcgagggcgatgcccagggcgccacgatctacacggtgtcggacaaggcctccgacgccgaagccgaacggctggcggaagcggagaacaaggctgacgccatcgccggcgtgaacctgaccgacgagccgaccgaggtcgccgatatcctgatcgacctcgcgcagcgcgagaccaagaccttctccaaccgcttcgcccggctgctgatggacgagatgaagtccacggtgcggatgcacaagcatccgctgaaatcggccggcttccgggtgctgaaggcgcccgacgtgccgtccgtgctggtcgagatcggctacgtctccaacaagggtgacctcgaacacctggtgtccgagaactggcggaacaaggccgtcggatcgatggtccaggcgatcgacacgttcttcgccaaacggctggcaaccgctggaccggccaagtgaaattgtccggctgaaaagccggtgccgttgcgcggaagccctagtttggccacagcggcaacggtatagacaatcgaccgcaggtccgcagaatcgaccatattgtccggcggctgttgtttttgttcgcatgcgcaaggcggctcgccgggccaaggccttgttgtggaaagtcctcgttgtgacggggctttgttgtgagccttggttgtgcgaggcttcgcacttttggacaggcgcctctgacgactgagcgccggagggtaggaacggaacgtcgataatgcgcctgctcgtgcggtttatgggtttcttgttcgccgccggaaccgtcgtgttcctggtcggtgtcgccgccgtcgccggcgccatctggcatttctccaaggatctgcccgactactcgcagctgcaggactacgagccaccggtgatgacccgtgtgcatgccgccgacggcgcattgctcggtgaatattccaaggagcgccggctctatctgccgatccaggcagtgccgaagctcgtgatcaacgcgttcctcgccgccgaagacaagaacttctacgagcacggcggcatcgactatcagggtatggcgcgcgccgcgattctctacgcgcagaattacggctccaaccgccgcccgcagggcgcctcgaccatcacccagcaggtcgccaagaacttcctgctgaccaacgaggtctcgttcgcgcgcaagataaaggaagccctgctggcgatgcgcatcgagcgcgcctattccaaggaccgcatcctcgagctctatctcaacgaaatctatctcgggctcggcgcctacggcatcgctgcggcgtcgctggtctatttcgacaaatcggtcaacgagctaacgatcgcggaagcgtcctatctcgcctcgctgccgaaggcgccggccgcgctgcatccggtccgcaaccgtgaccgcgcgatcgaacgccgcaactatgtgatcgaccgcctgctggagaacggctggatcaagcaggccgacgccgacaaggcgcgcaaggacgcgcttaacgtcaccaaccgctcgaacggcgcgcacatcttcgcaggcgaatatttcgccgaggaagtccgccgcgacatcttcgagcgctacggcgaaaagaagctctacgaggggggcctctcggtccgcaccacgctggatcccaagatccaggtgatggcgcgcaagaccatggtggccggcctcgtcaactacgacgaggcgcagggctggcgtgggccagttcacaagctcgacatctccggcgactggggcgtcaagctcgccgacgtcaaatcgctgtccgacatctcgccatggcggatggcggtggtgctggagaccagcgaccagtcggcgcggatcggctttcagccgggccgcgagctcggcggtgcggtcagcaaggaacggcagaccggcatcatcacgatggagggcgtgcgctgggccaagtccaagggcaaggcgccgacggcggtgtcgcaggtgctgcagcccggcgacgtgatctatgccgatccgctggtgaccaaggacggcaccgcggtcgaaggccagtaccgcctgcgccaattgccggaggtctccggcgcgatggtggcgatggacccgtggaccggccgcgtgctcgcgatggtcggcggcttctcgttcgaccagagccagttcaaccgcgcgacgcaggcctaccggcagcccggctcgtcgttcaagccgatcgtgtattcgtcggcgctggacaacggctatacgccgtcgaccacggtgatcgacgcgccgatcgagatcgatcaggggcagggcgccggcgtgtggcgaccggagaactattccaccggcaaatattacggcccgaccacgctgcgcaacgcactgcaacgctcgctcaacactgtgacggtgcggctcgcgcaggacatcggcatgccgctggtcggcgagtatgcgaaacgcttcggcgtctatgacgaattgccgaactatctgtcctatgcgctgggggccggtgaaaccaccgtgatgcggatggtgacggcctattcgatgttcgccaatggcggccgtcgcgtgaagccgacgctgatcgatcgcatccaggatcgctacggccacaccattttcaagcacgatacccgcgaatgccgcggctgcgacgcgcctggcggctggaagagccagccggagccgcagctggtcgaccgccgcgagcaagtgctcgatccgatgaccgcttaccagatcaccgagatgatggaaggcgtggtccagcgcggcaccgcgaccgtcgtcaaggaagtcggcaagccgatcgccggcaagaccggcaccaccaacgacgaaaaggacgtctggttcgtcggcttctcgccggatctcgcggtcggcgtctacatgggctacgacaagccgcgcaatctcggccgcgccgccaccggcggtcacgtcgccgcgccgatcgcccgcgacttcctgaagcttgcgctcgccgacaagccgccgacgccgttcaaggtgccggccgggatcaagctgatccgggtcgatgccaagaccggcatgcgtgccggccccggcgacggcggcaacaccatcctcgaagccttcaagccgggcaccgcgccgccggagaattactcggtcatcggggtcgccgatgccgacggccgcggcccggcgccgcagccgtcgcagggaggcgggcagcctgacagcggcttcttcatgcggccgggaaccggggggctttactagcggccgatgcgacgaatcgccgggatagtgcggccaagccgattgcgctttgccgcgccggtcgctacatcccccggaacctttttgccaacacctgaaagaccatgcgcgcggaaatcgaacgccttgttgaagagatcaagcagtcagtcgggctgctgaggaggcatctttgacgtcgaacaatcgacggcacgcctcgctgagctgaacaagctcgcagaagattccaatctctggaacgatccccagaaggcccagcggctgatgcaggagcgcacctcattggaggacgcgctctcgggtatcggcaaggtcgagcgcgagctcgaggatcaggtcggcatgatcgagctcggcgaggccgagaacgatgccggcgtggtcgctgaggccgagaaggcgctcaaggacctcaagaaggaggtcgcccggcgcgagctggaagcgctgctctcgggcgaggccgacaagttcgattcctatctcgaggtccatgccggcgccggcggcaccgagagccaggactgggcccagatgctgctgcgcatgtacacgcgctgggcggagaagcacggcttcaagatcgagttcctcgaagagtcccagggtgaagaggccggcatcaagtccgccaccatccagatctccgggcacaatgcttatggctggctgaagaccgaggccggcgtgcaccgcctggtgcgcatctcgccgttcgactccaatgcgcggcggcacacctcgttctcgtcggtgcagatctttccggtgatcgacgacagcatcaagatcgagatcaaggagagcgacgtccgcaccgacacgatgcggtcgggcggcgccggcggccagcacgtcaacaagaccgagtcggcggtgcgcctgacacacattccgaccggcatcgccgtggtctgccaggcgggccgctcccagcacaagaaccgggcacaggcctgggacatgctgcgcgcacgactgtacgaaatcgagctgaagaagcgcgaggagcaggcggctgccgatcaggccgccaagaccgatatcggctggggtcaccagatccgctcctatgtgctgcagccctaccagatggtgaaggacctgcgcaccggtgtgcagacctccgacacctcgggcgtgctcgacggcgacctcgatgaattcatggcggcgacactggcgcagcgtgcgttcggcaccgggcccggttccgtcgaggatgtggattagctcatgccgcgcgtcgctttcatcggattgggacgcatgggccacgggatggccggccgttatctcgaagccggcttcacggtcgcggtttggaaccggagcaaggccaaggccgaggatctgatcgcgcgcggcgcgcaatgggcgacctcgccggaggatgccgcgatcgatgccgatgcggtcgtgacgatggtcgccgacgatgcggcatcgcgtgatgtctggctcaccagggatggcgccgccgccacgatgaaggccggcacgctggcgatcgaatgctccacggtctcctaccagcacacgctcgatatggcgcgcgagctgcagagccgcggcctgatctacatcgattgtcccgtcaccgggctgccggaggctgcggccgccggcaagctgacgctgctggttggcgctgacaacgccgacctcgacaaggcacgaccgttcctcacgccgatcggcagcacgatccgccatttcggtgcggtcggcaccggcaccgtgttcaagctgatcaacaacctgatcggcgcggtgcagatcgcaagccttgccgaaggcgttgcgatcgccgagcaggccggcctcaacatgcaattggtcgccgaggcgctagggaccggcgcgatcgccagcccgcaggtgatccgccacagcaagcggatgatcgaccgcaacttctccggcgcgtcgttcacggcggcgctgcgtcacaaggacgcggaatatgccgtgcggctcgccgaaacgttgctgcccggcgtgcccgtgagccgcgccgcgctcaccgcctacgacaaggccagggctcatgcccccgacggcgacgaaggccagatgatcgagatcgtatcgcggccgaaataggcgggccagccattccgggaaatcgggtgggaatatttgcggcgccgcgctagtcacctctgccagtgcagccgggtgcccgccatgccttccgtcgacaacagaatcgatcgccgcgactggggcctgcttggcctgctgtcggtgctgtggggcggctcgttcttcttcaacggcatgatcctgcgcgaattgccgccgctgacgctggtgctgctgcgcgtggtgctcggcacgatcatcctgctgccgctgctgcgggccaggaagatcgaattcccgcgcggtgtgccggggtgggcgccgttcgtcgcgatggggttgttcaacaatgtgctgccgttctcgctgatcgtgttcgggcagacctacattccgagcgggctggcttcgatcctcaatgcgacgacgccgctgttcgcggtggtcatcatggcggcggccggcgaggagaggctgcaggcgcgtcgcgtcgtgggcgtggtggtcgggctgatcggggtcgcgatcctgcacggcgatgcgctcggcttcgagagccgccagggcatcggcatcgcgctgtgccttgccggcgccttcagctatggcatcgcggcactggtcgggcgtcggctgccgcagcgcgtgccgccgctcggcacggcgacgttccagatgctggcatcggccgtgatgattgcgccgatcgccgcggtggccgatcggccctggctgctgccgatgccgcaggcgaccacgtggctcgcggtgctcgggctcgcggcgctgtcgacggcgctggcctacatcgtgttctttcagatcctgcaacgctccggcgcgaccaatgtggtgttggtgacgctgctgattccagccaccgcgatgctgctcggctatctcgtgctcggcgagccggtctcgtggcgcgaggtgaccggcgcgctggtgatcgcgagcgcgctgctgctgatcgacggacgtgtgttaacgttcggccagcgcaaacagcgtccggtcggctcgacgacacgctgacatcttgcgccgcaaatctttgttttagcgctgcgagatctaaagcgcgatgagatcatgttgaatcgtcactgcgctttggattcttgtttaagcatgatcttttcggaaaccgcttcgcacttttccggatcatgctttagttcgacgcaacggcatccttgatgaaagattgcgttttcgcggaataggttccgagctcttgcgcgttgaactccggcgacttgaggtagtcgccgtgatgcttcatcaacatcttcagattgcgcgtccaggcaccttctttcggatcaaattctaggagttcctcggccgaccaaagaagatagccaaccaaccatttgtagcgctctaattcttctccctgcagttgactgaagtcaccttgagaaagctttgggtattggacggcaagcttgagatactctcggagggtcgcttttgcggtcgtctcccgatgacttattcgattaagggcgagttgccgcccggctattagtacggcgagaagcgcgacaacgggtacaaatcctggagagatttgagcccaatccttcaaaaggtcgtacatcggctcctccagtcgctaggttgccgcggtccttggatattcctgcttccacgccgcataccagccagtaaaacgaccgctgtcgcgctcgccgccgtgccaggcggcgtaggcggtgccgtcatcggcgaccagcaccacggcatcgagccccttggagcggcgcagcgtgtccattgcttgcaccggggtctgcgcgatcggccccgcaacgttgaacgaggtgttgaccgacatctcgacgccgatatggcggccgagcgccttcagataggcgtaggtaaggggatcgtcggcctcgcgcacgatctggatgcggccggtgccgtcggcgtgcaccacggccggtatcttcgcgcgcgcctccggcttcgaatgcgccgtgagcaccatgtagttgtaggcgttgtagtcagcgtcggaggcgccgtcttccagctcgaaataatcgcgtgcggcctcaagcgtcgccatcggcgccagcggccggatcgcctcgcggtacttgacgcgttcgttgagccgctcgcgcacctcgggatcgcaggggttggcgaggatcgagcgatggccgagcgcgcgcgggccggtctcggccgcgccctgatagatcgcgatcacgccgccttgcgccaccatgctggccatcagatcggcaacggcatcgcgcccctctgatgtcgtcacattgccgatcacgatcgaggcgacgtcgtcggcgttgagtgccgcagcgatgtcggtgttcgagggcggcaggccgcagtagaacgcatgcgacagcggcgcaccgcgcggcgcgcccgccatatgcgcaatcagccaggccgcgccgatcggcacgccgggatcgccgggcaccggcggcacccacatgtgcagccgcgtcttgcgctgctgggcctgttcgaaccacgcctcgtcaaaatgctcgagcagccgcatgttgccgagcgcgttcagcgccacgccgccggtcagcaccaggcggtcggtgccggtgatgcgcaagagatgatcgatgacgtggatcatcgcgtcctcgaacaccagttgcgtcgcagccgccttgtcgacgcggtccttggtgtcggggcggtggttgatgtcctcgacgcgcagcacggcatcgggattccagagctggtcgggccgcagcggcgggccgagaatgtcgatcagcggctgcttgtagggattgtcggcaggatcggcaaaccagttggccatcgcgcgattgagctgcacgcggccttcggggccgagctgcagcaccgccttcaatcgctgatagtagggattggtggcgcggttcatgtcgccccaggcggccgcgcccatgtagcggccttcgctggagagccaggtccagccgccctggctcgacgagatcacggtgtagaaggcgccgagcgaatcgaacaggctctcattgcagtacagccgcttcatctcgccgttctcggcgacatagagcgagatcgagccgacgtcgccggtgccgtcgagcaccgcgatcgccacacgttcgcgcagatcggcgaacggcgaggcggtgaacgagtaccaggcgtgattgtcgtgatgcggcatgcagatcagcggcagctgctcgccaagcccgtacatcttgccgagcctgcgtgagatgcgccgcacctggtccatctgtcgcaggttgatcgcgggcgcgatcggtgcgcgcagcaatttaatgctggccggcgcttcctcgagcgaggtgcggatcagcatcggcagcagtgccggatagtcccatgtcgtgacgaaggctgcgacgtcgccgatgtcgcggcccatccgccgcagcaccttgcgcatgtcgtcgagcgcgtgttgtggaaactcgttggtatgcttgtttccggaaaagcgctcttcctcgttgttgacgatcaggcgcgggccgtccttctgggtgacctcgaccagcgcgacgccggtgttgtgcgtgccggggcaggcgaggcccgcgatatagatggtctcgccgcgctgcagcctctcgcggatcgaggcgatcgtggcttgcgcgaactcgccgttaactttgtggaggccacgactggccagcgcacgttcgctgaggcggcgtgtgatttcatagcccgcagccgcaatacgcggatgccgcggaccggtacgaatgtccggtttacgcaatcaaaacgcctcgactcgtgatccccagatcgaccttcaatcataaacagcgccaggcaacaatgccgtttcgtccaacggaaaaacccggcgcttgccagcacatgcgtctcttgcgagacttgcgtcaaaaccacgacaaaaatcgggagaaaacgatgccggctcgtcctggatatattggcgcaatcgcggcgttcgcaagtgtggcactgatcgcgacattggcgtatgcgcagaagaaatacgatcccggcgcgaccgataccgaaatcaagatcggcaacatcatgccgtatagcggcccggcgtcgtcctacggcgtgatcggcaagaccgaggccgcgttcttcaagatgatcaacgagcagggcggcatcaatggccgcaagatcaacttcatcagctacgatgatgcctattcgccgccgaaggcgatcgagcaggcgcgcaagctggtcgagagcgacgaggtgctgttgatcttccaggcgctcggcacgccgtcgaattcggcaatcatgaaatacatgaatgccaagaaggtgccgcaattgttcgtcgcgtccggcggcaccaagttcggcgatccgaagaactttccctggacgatgggctttcagcccaactaccagagcgaggggcgcatctacgcgaaatatattcgcgacaagtttcccgacagcaagatcgcggtgttctggcagaatgacgacgccggcaaggatcagttcaagggcttgaaggacgggctcggcgacaaggcgggcatgatcatcgccgacaagtcctacgaggtctccgatccctcgatcgattcgcagatcgtcgcgctgcacgattccggcgcggacatcttcttctcctgggcggcgccgaagggatcggcacaggcgatccggaaggtgggcgaactcggctggaagccgaaattcttcctcgccaacaccgcgacctcggtcgcctcggtcctgaagccggcggggctcgaatattccaagggcatcatctcgacggcctatctgaaggacccgaccgatccgacctgggacaaggatcctcccgtcgtgaaatggcgcgcgttcatggacaagtattatcccgacggcgacaagggcaacgccaacaacctctatggctatgtgcaggccgaggccatggtccaggtgctgaagcagtgcggcgacaatctgacgcgcgaaaacgtgatgaagcaagccgccaatttgaagaacttccactccgacctgatgctgccgggcgtcatggtcaatacctcgccggacgactacttcccgatcgagcagatgcagctgatgcggttcaacggcgaggcgtgggagctgttcggcgatgtcattaccggcgaggtggggcacgacgcgacgcggtaagcgctcgccagtcacgcgattgctcgtgccaacccaccgctgtcgtcagtgctttcgcagggacgacaccgaatcttctccggtcggcgggcgcggtgcgcctggtggcggcggcccgtcaggtaggagcggccctgcgcccgattctctcagcggagcaacaaccggccccgggccgggcggcggcatgggcgatggcggtcgtcgctgagccacaaacgagatcggcgcaagcgagggcgcttgcgccgatgttcagatcgatcgtcgtgaggcgaggcttaacccgcgctgagccggatgccggcgcggaggaagcgctgcggatcgaccgcttcgccgtcgatgcgggtctcgtagtgcagatgcggaccggtggaacggccggtcgacccgaccgcgccgatcacctggccgatcttgacgtattcgccgaccttgacgccgatctcggagaggtggccgtagcgggtcgaaaggccgttgccgtgatcgacctcgaccatccggccgtagccgccggcccagcccgccgacaccaccttgccgttggcggtgacgcgcaccggatcgccttgcgcggcgcggaagtcgaggccggtgtgcatcgccggccggccgaggaagggatcgctgcggacaccgaagccgctggtgaattcgacctcgccgaccacgggcttgcggtagggcaccagcgccagcgtctggttgaggcgctgcatctgcgcgcggttgatgttgatgcggtagagctggcgctcgaacgcgccggcgtcgggcgcgagcttcaccggcacgaacgggccacccatgccggagcgcggcacagcggcttcgagttgcgacatgttgaggccgagatcgctgatcacgccgcgcatccggcgcacccgcgattcgatgccgtcctcgaccgaggagagcgcggcgacctgacggcgctcgacctggtcaagcgaggtctgcagacggaccagcacgttgtcgacgccctgggccttggcgaattggttcggctgcgtcttggcgatcagcggtgcgcgagattccagccgcgcctcgcgatccggcggcgccacgaagatcacggtgtcgctgatcggggagggctttggcgttccggatgacggcgcagattcggcgcggccctgcggcttgatcgatccggtcgaagtggcatcgggcatcgcgccgagcgcagtggcgcgcgattccagcgtcgactgccgcttcataatctggtcgagcttctggtcgaactgttcctggtcgagcagctggcggctggtggtgcgatcgaccttggcgcgcagctcggagatgcggtcctcataggcgtattgcatctcggcctggcgcgcgatcaggcgggtcagcacgtcgtcgcggaacgcaaaataggtcgcggtcgccgccgaccacatgccgagcaggaccacggttccgaccgcaatccagaacacgaccggcccgaaccggacctgcttgccggcatggaccagcgtatagccctcgccggatgctgccgccggtgcggcgtgatgggcggccggacggcgcgccggtgcccggccatggtcctggggatgatggtgtttcaggtattcctggtgatgaccggaccggctcgacatcggtactcccgcggccggtcggaccaagctccgcacggctactttgcggggccgatttgagcccgccatggttaattttcaggaaacggaaccctcccgtcagagctcccgggtggcctccaataccgcttcggcgtggccgtcgaccttcacatggcgccagatccgggcgacttttccaccggaatcgaccagaaccgtggtgcgaataattcccatgaaggtcctgccatacatggatttttcgccccaggcaccgtatgcctcgagcatctcatgggcggggtccgaggccagcggcaccgacagctggtgtttgtttcgaaatgactcctgcgccttaaccgtatcggctgatatgccgaccacctcggcgcctgctgctgcgaactcgcccttgagccgggtgaagtcgattgcctccctggtgcagccgggggtgtcggcgcgcggatagaagaacagcaccagcttcttgccggcgaaatccttcagcgagactctgccgccgccatcgcgcggcaagtcgaagccaggcgccgcggctccctcggcaagtgtgacggcagacgacttgatcacggtcgcggcgggctccggctttaacggtttcgatgcagccttgtgcgaggctttgacttgaacacccgctgcggtcttggctttcgctgttttggccgcttgctcggacgccttcttggatgcggcctttttcgcaaccgttgtgcgggttttcgtcgcggacttcccagtgcttgcgcttctcgcgcgcgcaacctttgttgcggccggctttccggttgtattggaggatttcttgcgcgttttcttggacatacgccttcctttcgtcgctttccgaagctcaaccattggggtattgcgggtcttgttagcggcggccggattcgcaccggccgctgggcaagtttgatggccgcggagtatggtgacaaggagttcgacgcgtaacccgtccgcttgttgaattggcttttgattggttggtctggtccgttcttttggggccgatcttggggccatcggcgagtgacatgatgaggcgaggataggcggcgatgccggcacgggagcgctcgatagtagtcgacgggcgccctgatgacggcaagcagcttcgccgtcagcaccgagaggcaatggcaaggaacacgtcgccgcaggggccaaatccgcgcgccggggctgacttctctcaatgggaagacgacgccgcgtgggacgagcaggatgaggcggcgggcaaccgtgcgcggcaattgctggcgcgttccaacaacaacctgcatcgcttcaccgatttctgttccggcatgcagcgctggctgcacggcgagcgctggatccgccgcatcggattggttctcgtggtgctggtcgtgctgttcgcgacctgcttcggcgcattgtggtggcggctcggcgccggtccgatcaatctcgatctggcgacgccatggcttgccgcggcgatcgaggagaatatcggccacggcaacacggtcgaggtcggcggtacgcagatcgagcgcgccggccgggtcaggatcgcggtgcgcatccgcgacatcatcgtccgcgaccgcgaccatgcggtcgtcgccagcgcgccgaaagccgaagtgcgattgtccggaacggcgcttctgatgggccagctgcgggcggagagcctcaatctggtcgatgcggaactgtcggtgcgcatcacgcccgacggcaatgtgacggtgtcggccggcgacaccgcaaagccgctggccaccggcgtcgcctccaagcgcgacgcgggcctgccgccgacattcccgcgtccgacgcccacggccccgccgccggttgcgtcgccgcccgccgcctccgagccctcggcggcctcgcccgattcggcccagagcgggcttcttgccggtctcgactggctcgacagcctcagcatgaccggcctcgacgggcagaacctcaacgagatcggcctgaagaacggcaatctcgtcgtcgacgaccagcagcgcggcaacaaatggagctttgagaatatcagcctgagcctgcgccgcccaagcggcggcggggttgcgctcagcttcggcgaggagggcgccaagccctggttggtccgcgtgctggtcggaccgcagcagaacggtgtgcgctcggtcgacgtcaaggccgacaaggtgtccacccggaacatcctgctggcgatgcggaccaaggatctcacctacaccgccgacctgccgctgtcgggcgagatgaagggcgaactcgggcgcgacggcctgccgacctatttccgcggaaagatcaatgtcggcgccggcaacatcatcgacaccgacacgcccgactacccgatgccggtcgattcggccgagatgagcgtggaatgggattcgggccggcgcgtgctgctggcgccgatcaaaatcgtctcgggcgccaaccgcatcacgctgctcgggcatcttgaaccgcccaacgacaatgtcgccgactggcaggcggggctatccggcggcaccatcgtgctggccggcgccgacaagaatgaaccgccgctgattttcaatcgcatcaatataggcttccgtttcgacaccgagaagaagcgcgtgctgctgacccaggccgacatctccaatggcgagatcggcgtcgccggcactggcagcatcgactattccggcgagccgcggttgcagctcggattcgccggcacgccgatgtcggcctcggccctgaagcggatgtggccgatcatcatcgtgcccgaggtgcgggaatgggtgctcgagcggatcgaccgcggcacgctccagcgcatcgatgtcggcgtcaattcgccagtgcataatctgtcacgcaagggcccgccgatccccgatgacggtctttcggtcaacatcgtcgcgtccggcgtcacggtgcgcccggtggatcagatgcccgcggtgcatgatgcggatctgaaggcgagggtgaccggccgcaccgcgaccgtgtccatcaaccagggcatcgccgacacgccggcggggcgcaagatcacgatctcggatttcacctttgaggtgccggacatggcaccgaagccgtcgccgtcgaaggtcaggttccgggtcgactgcccggtgccggccgccgccgaaatcctcgcatccgaccggctcagcgatctctccggtccgccgatcgatcccaacgccagcaggggcaacgtcaccgcgaccatcaatctcggcatgccggtaaagggcgagctcaccaagaccgacacgcaatattccgtcaatgccgacatcaccggtgtcgcggtcgacaagctggtgatgaaccagaagctcgaggccaacacgctgaagctggccgccagcaatgccggcttccaggtcaagggtgacgtcaagatcaacgggcaggcggcctcgctcgactatcgcaagccgaccgatggcgatgccgacgtcaagctgcaggcaacgctcgacgatgcgggccgcgcgcgcctcggattagatctcggtcctgccgtctcgggcgcgatcccgatcaagctctccggcaagatcggcagcggcgacaatcccgccaccaagatgggcgtcgaggcagacctcactcagctcaagctcgacaacatcctgccggggtgggtcaaagcgcagggccgggccggcaaggcgaccttcaacgtggtgccgaagggacaatcgacgcggttcgaggatatctcgatcgaaggcgccggcgtctcgatcaagggcgcgctcgaggtcgaccagaacggcgatctcatgaatgcgaacttcccgacctatgcgccgtcggaaggcgacaagacatcgctgcgggccgatcgcggacccgacggcgtcatcaaggtgacgatgcgcggcgatgtgttcgacggccgcggcttcctgaaatcggcgatctccggccgcgacagcgatcccaagagcaagaccaggaccaccgatttcgacgtcgatctgaagctcggcgccgtggccggtttcaacggcgaggcgctgcgcagcgtcgatgccaagatctcgcgccgcaacgggttcttcaaggcgttcacgctgagcggcaaggtcggccgcgacacgcctgttacggtcgatatgcgcggccgtcagcagggccgcgaggtgatttacctgcagaccggcgacgccggcgcattcctgcgcttcatcgacacttattcgaaggtcgtcggcggccagctcacgctggcgatggagccgccgatccccgagccgagcccgagggaaggcctcatcaacatcaccggcttctcggtgaagggcgaaacccagctcgaccgcgccgtcgccggcgggccggtcagcacccagaacggaatcgggttcgatgcgctgcgcgccgagttcacccgccagagcggccagctctcgatccgcaacggcgtggtcaagggaccgagcatcggcgcgaccatcgagggcagcatcgactatgtcggcaatcaggtgcggatgaacggcaccttcattccgatgtacggcttgaacaacatgttcggccagatcccgttcttcgggattttcctcggcgccggcagcaatgaaggcctgatcggcgtgacctatgaagtggtgggaacaccgagcgcgccggtgctgcgcgtcaacccgatctcggcgctggcgcccggcctgacgcggaagatcttcgagttcaagcagtacggcccgaacgacctgccgacgacgaacaacaattaggggaatcgattggcgggaagagcgttcacttcgacgagttcgaacgcatagccgttcacagccagtcgcggacctcctgaaaaacggcgtcaccgccgcagcgccggcaccaccaggaacgggatcagtccgagcaccacgttgaccagcgcgaacgcgatcagcggattgtagctgtgggtccagtcgtggatcaggccgccgccccaggagccgaggccggagccgagaccgctgccgatcatgatggtgccgtagatcgtgccgacgcgttcgccgcggaagatcttcagcgcggtcgcggtgatcagcgggccgcgtgagccgatcatgctgccgaagcagatgatgaagccggtcaagagccagtagttcgggtaccactgcagcagccagagcaggatgatgcccagaatcgagacgccatagctgaacagcacgctgggcctgcggccgatgatgccgtcgagcgtggagacgccgagcatgccgacgaacagagcgacgccggagaagccccaggcggtggcggcctgcagcggtggaaagccgacatcgatcagataggcgacgatctgcgccgtcagcgcgtacatcgcaatcgcggtgaagaagaaggtcgagaacagcgcccagaaggcgtgatggcgcatcgcccgcagcaacgtccagccttcatcggccagattgctctcggccttcttcacgatatgcggcgagccgccggcgagcaggcgccacggcagcaagaccagcggaataagcaggccaagcgcaccgatgccgaacacctgataggcctcgcgccagccgatccggtcgatcagcacctgcgacagcggcagcagcagcaagaggccggcgccagtcgccgaatacatcacggccatcgcggtcggcagtcgcggaccgaaccagcggccgagcaggatcgagttcgagacgttgccgatcagcgcggtgccgaatccgacgcagaggccgacgctcagttggaattgccagagctgctcggcgcgcgaggcgaccaggaaggcgcagccgagcagcgacaggccgagcgcatagaccacgcgcggaccggagcggtcgaacagtcgtccgaccagcggcgcagtcaggccactggcgagccaggtcagcgaatagacggacacgaccgaggcacggtcccagccgaaattttccgagatcggtttcaggaacaccgtgaagctgtcgctgaggccgcgcccgagcaccgacagcacgaagcacagcgcgagcacgttcagcgcggtgcgcgattgcttcgccggtgcggcaagcgtgtcgttcggaggcgtggtctggtccatcggtatgcagggagcgcgctttcgtcaccccctgcaaccgacaaatgcgaatgcgcctatgcaggcttcagcagaacatggcgcttcttgccgagcgacaacttcaccacgccttccggcgtgagattggccggcgtcagcagcatcttctcgtcggtgacggcagcgtcgttgacgcgcaggccaccgcccttgatctgccggcgcgcttcgccgttggaagcgacgagctcggccttgacgaaggcggcgagcaccccgatgccggcttcgaattcgccgcgcggaatttccaccgtcggcaaggtttcggccagcgcaccttcctcgaaggtgcgacgcgcggtctcggcggcctcattggccgcatcgcggccgtggagcagggcagttgcctcggtcgccagcaccttcttggcctcgttgatctcgctgccaccgagagcggcgagcttgttgatctcgctgatcggcaggatggtgaacagcttgaggaacttgacgacgtcggcgtcctcgacattgcgccagtactgccagaagtcgtacggcgagaactggtcggcgttgagccacaccgctcccttggcggtcttgcccatcttgtcgccggaggcggtggtgagcagcggcgtggtcagcgcgaacaattgcggcgtgcccatgcggcggccgagatcgacgccgttgacgatgttgccccactggtcggagccgcccatctgcagccggcagccggcgcggcgtgacagctcgacgaaatcgtaggcctggcagaccatgtagttgaactcgatgaagctcatctcctgctcgcgttcgagccggagccgcaccgagtccatcgtcagcatgcgattgaccgagaagtgccggccgatgtcgcgcagcatctcgatccagttcagcttggtcagccactcggcgttgtcgagcatgatggcgtcggacttgccgtcgccgtagcgcagcaccttggcgaacacgccgcggatcgaggccttgttggcttcgatctcggcgaccgtgcgcatcgcgcgggtctcgtccttgccggaggggtcgccgaccatcgtggtgccgccgcccatcagcgtgatcggcttgttgccgctctgctgcagccagtacagcatcatcatggtcaggaagttgccgatgtgcagcgaccgcgcggtgcagtcatagccgacataggcggtggcctctcccttcgcggcaagcgcgtcgaggccctcgaaatcggagcactggtgaacgaagccgcgttcctgtagagtgttcaggaaatccgatttaaatgcagtcatttgtcggcgagccagatcattcttgttttacggtttttgcatctatttgcggaaccctgatgcttgaggctgccgcaggcggacgcgcagtggcattataggatgtacttgtttgagacaagccgggggttcccggctggggcgcttctacgatgatgttaacggcactcggtctgatgagcgggacctcgctcgacggggtcgacgtggcactgatcgagaccgatggccgccagatcagggccttcggacccacgggctatcggccctataccgagagcgagcgcagcctgctgcgccaggccctgaccgaagccgttcatctgtcccggcgcgacgcccggccggggatcctgcggcaggccgagcaggcggtcacgacagctcacgccgaggcggttgccgccttcacggcgcagcaccggatctcggcacaggacatcgacatcgtcgggttccacggccagaccgtgctgcatcgccccgagcggaagctgacggtgcagatcggcgacgccttggcgctcgccaaggtgatccacattccggtgatgcatgatttccgcgccgccgacgtcgaggccggcgggcagggcgcgccgttcgtgccggtctaccaccgtgcgctggcgcaatcgctgaaccgcgaggggccgatcgtcgtcgtcaatatcggtggtgtttccaacattacatatatcgacggcccggacacgctgatcgcctgcgacaccgggccgggcaatgcgctgctcgacgacttcatgttccgccacatgcatcagccgttcgacaccgccggcaagttcgccgcgctgggcaaaccggacgaggcctggatcgcgcaggcgctcaggctgccgttcttttcggttccaccgccgaaatcgctcgaccgcaacgacttcgcgagcctcaagctcggcgccgtggcaccggccgatggggccgcgacgctgaccgcgttcacagcggccgcgatcgcccgcgtcgtgccgctgctgccgaaacggccgaagagctggatcatctgcggtggcggcgcatccaacctgacgatgctgcggatgctgcgcgagcgcctggcgccggcgaccgtcgagcccgccgaggcgctcggctgggcggcggacgcgatcgaggcgcaggcgttcggcttcctggccgcgcgcggcatgaaggggctgccgctgagctatcccaccaccacgggggtgccgatcccgatgaccgggggcatcatcgcgcgaccgtgacttagatgcaaatgcatctaccttgacagttccatgccgctgcatttaattcgatgcagttgcattgaacgcgaggttcgtcatggccgccctgaagctgatcagccacaagctctgtccctatgtgcaacgcgctgtcatcgcgctgcaggagaagggcgtgccgttcgagcgaatcgacatcgatctcgccaacaagccggactgtttcctgaagatctcgccgctcggcaaggtgccggtgctggtggtgacccgcgacgacggcaaggaggtcgcgctgttcgagagcaatgtgatctgcgagtacatcgaggagacgcaagccggcgcgaagctgcatccgcaggatgcgctcacccgcgcggagcaccgcgcttggatggagttcggttcggctatcctcggtgacctctgggggctcgagaccgcgaccgatgccgccgccttcgagagcaagcggcaggcggtggccgcaaagttcgcgcgcgtcgaggctgcgctcggcgcgggtcctttcttcgcgggtgacaagttcagtctggtcgacgcagtgttcgcgccgatcttccgctatttcgatctgttcgatcagttgaccgatcttgcggtcttcacccacacgccgaaactccgcgcctggcgcagcgcgctggcgcagcggccgagcgtgcgcagcgccgtgtcacccgattatcccgcgctgctgcacgcgttcctggtcggccaccgcgcgcatatgctgaagctcgccgcgtaagccatgtcgcattccgttgcctgggtcgcgctggtcatcgccggtcttctcgatgtcggctgggcgatctcgatgaagtatgccgaaggctatacgcggctcggctggacgctggtctcgctgctgctgctcgccgcgttcgtgttcctgctcgggcgcgcgctgcaggtgctcggcgtcggcgtcgcctatacggtgtggaccggcatcggcgccgccggcacgctgaccatgggcgtgctgctgttcaacgaggcgctgaacccgatgaaggtcgcggggatcgtattggtgctggtcgggattgcggcgttgaagttcgcgccggaatgatcaggcttacgtgccttgaaaacgttccagcgaatcctcatgggcatcctcggccactccgtcctcatattcgacggaatagacgacgcccggtggaaacctgtcaaagtaagtgccggatcgatcttggggacgaacgaccaagactacccaagccttgtggcctcgacggagcgggtcagacgcgtcatcctttacccgcacgatgtcgctataagtgaactcgcccgccgtgttcgcgggcgacgtcactgccgcttcaccgcacgttggcgagacgcatgtcgagatagccggtcaccgtctccatcagcggctcgagcttgccgtcgaagaagtggttggcgccggggatgacctgctggtcgatcacgatgcccttctgcgtcttcagcttctcgaccagcgtgttgacgtccttgggcggcaccacggcatccttgtcgccgtgcacgatcaggccggacgacgggcagggcgcgaggaacgagaagtcgtagagattggcgggcggcgcgatcgagatgaagccctcgacctccggccggcgcatcaggagttgcatgccgatccatgcgccgaacgagaagcccgccacccagcaggcgcgcgcctcgggattgatcgcctgcgcccagtcgagcgcgcttgccgcgtcggacagttcgccggtgccgtggtcgaacgagccctggctgcggccgacgccgcggaagttgaagcgcagcaccgagaagccgcgatgcgcaaacgcgtagtagcactggtagacgatctggtggttcatcgtgccgtggaactgcggatgcggatgcaggatcatcgcaatcggcgcgttcttctgcttggccggatgatagcggccctcgagacggccagcagggccggtgaaaatcacttcaggcattgtgttcccttgattgacgcgttcccttgattgacgtcgatcaatcaaccggttggagccatcttcagcgacggggcgcgaacagggcggctcatgatgaaatcggcacaggcgccgccgcgcggcacgctggtgggccttctagcatgacgcaaggggcaaaaatcaaggaaattgtgccgcttggccggcgtgaattcgcgcggcggcgcgcgatccggatcgacatgccgaatcgttcgctagccacctgaagttttgctttgtcatattgctatcgtgctcgccacgaacggatgtcttgcctggcaacacaggtgtggttttcgtgcgcgcgaaaaaccgctcttgccggcgactctgatctggtctcggtgcccgactgtcgctatgtcgcaagggaaggccgcaaccacggtgattacggcgggcaagctcgatggccgatcgcgtctatctcgactggaatgccaccacgccgcttcgccaggaggcgaaagcggcgatggcggccgcttgggacttgagcggcaacccgtcctcggtgcacagcgaggggcgcagcgcgcggcggctggtcgaggatgcgcgcaatgcggtggcgaaggcggtcggcggccggcctcaggacgtcgtatttctctccggcgggaccgaagccaatgcactcgcattgacgccgggattgcgccgcggtgcaggcgcgccggtcgagcggctgttggtgtcagcgatcgagcacgcatccgtgctcgccggcgggcggtttccgcgcgaggcaatcggcgcgatcaatgttacgcaggccggagtgattgatctcgatcgtctgcgtgcgctgctggctgatagtccgcccgcacttgtctcggtgatgctggcgaacaacgagaccggcgccattcagccggtgggcgacgtcgcagacatcgtccatgccgccggtggtctgctgcatgtcgatgcgatccaggcgttcggcaagatcccgttcgatctcgcctcgacgaaggccgacctcgtgacgctgtcggcgcacaagatcggcggaccgaagggcaccggcgcgctggtgcttgctgagggcgttgatgggctggaggcgctgctgcgcggcggcgggcaggagcttggacggcgggcagggacggagaacgtcgcggggatcgcaggctttggtgcggccacgaaggctgcgatggcggtgttgaaggccgacgccgcccgcgtcaggggattgcgcgaccggctcgagcacgggctgcggcagacgccggacgtgctggtgttctccgacgacgtgaagcggttaccgaataccgtcctgttcacggcaccgggtatgaaggccgagacggccgtgatcggattcgaccttgggggggtagcggtctcgtccggctccgcctgctcgtcaggcaaggtccagccgtcgcatgtcttggaggcaatgggataccgttcagaggtgtcccagggagcggtgcggctcagtcttggctggtctaccacggagacagacgtggatttgaccctcaaggcttggcgaaagctcgccgatagcctagttaagggagagcgacgaaacacagcttgaactgttctaagcgggtgatttcgcgttcaaagcatcgtaagagacttttcggaactgagatccaccgcggtccttgaaaccgcgagcggaggatatgaatgcctgcagtacaagagacggtcgagcgcgtccggcgcatcgacgtcgaccagtatcgttatgggtttgagacgctgatcgagtccgacaaggctcccaaggggctgtcggaggacaccgtccgcttcatctccgccaagaagaatgaaccggcctggatgctggaatggcgcctggaggcgtatcgccgctggctgaccatgaccgagccgacctgggcgcgcgtcgaatatccgaagatcgactaccaggacatctactactacgcggcgccgaagccgaagaagacgctgtcctcgatcgacgagatcgatccggagatcctcaagacctatgagaagctcggcatccccttgcgcgaggttgcgatcctcgagggcgtcgagccgccgcccggtgggccgcagacgccgagccgcaagatcgcggtcgacgccgtgttcgattcggtctcggttgcgaccaccttccagaaggagctgaaggcggccggcgtgatcttcatgccgatttcggaggcgatccgcgagcatcccgagctggtgcagaaatatctcggaaccgtggtgccgacctccgacaactattttgcgacgctgaactcggcggtgttctccgacggttcgttcgtctacgtgccgccgggtgtgcgctgcccgatggagctgtcgacctatttccgcatcaacgagcgcaacaccggccagttcgagcgcacgctgatcatcgccgacaagggctcctacgtctcctatctcgaaggctgcacggcgccgcagcgcgacgagaaccagctgcacgctgccgtggtcgagctcgtcacgctggacgacgccgagatcaagtattcgacggtgcagaactggtatccgggcaattcggaaggcaagggcggcatctacaatttcgtcaccaagcgtggcgactgccgcggcaagaattccaagatctcctggacccaggtcgagaccggttcggcgatcacctggaagtatccgagctgcatcctgcgcggcgacaattcgagcggcgagttctactcgatcgcgatctcgaacggtttccagcaggtcgactcgggcaccaagatgatccacctcggcaagaacacgtcgagccggatcatctccaagggcatcgccgccggcaagtcgcagaacacttatcgcggccttgtcagcgcccaccgtaaggcgaccggcgcgcgcaactacacggcctgcgactcgctactgatcggcgacaaatgcggcgcgcacaccgtgccctatgtcgaggccaagaattcctcggcgaccttcgagcatgaagcgaccacgtcgaagatttccgaggacgtgctgttctactgcatccagcgcgggctctcgcaggaagaagccgtcggcctcgtggtcaacgggttcgtgaaggacgtgctgcagcaactgccgatggagttcgcggtggaagcgcagaagctgatctcgatcagcctcgaaggttcggttggttaatccatcccgtgtgagggcgcggccgccgcgcctcccggatgatgttcaggaaaaatcagatgtctctgcttgaagtgaaagatctgcaggttcgtgtcgaggagcgcgagatcctccacgggctgtcgctcacggtgaacccgggcgaggtgcacgcgatcatggggccgaacggttccggcaaatcgacgttgtcccacgtcatcgccggcaagccgggctatgaagtcaccggcggccagatcctgttcaagggcgaagacctgctggagatggagcccaacgaacgcgccgccaagggcgtgttcctggcgttccagtatccggtcgagatccccggcgtcactacctggaacttcctgcatgcggcgctcaacgcccagcgcaaggcgcgcggcgaggacgagatctcgtcgccggcgttcctgaagaaggtccgcgaggtcgccaagtcgctgaacattccgcaggacatgctgaagcgcggcgtcaatgtcggcttctccggcggtgagaagaagcgcaacgagatcctgcagatggcgctgttcgagccggccgtctgcatcctcgatgaaatggattccggcctcgacatcgacgcgctgcggatcgcggccgacggcgtcaacgcgctgcgctcgccggagcgcgcgatggtggtgatcacccactaccagcggctgctcaactacatcgtgcccgacgtggtgcacgtgatgtcgaagggcagggtggtgaagagcggcggcaaggaactggcgctggagctggaagagtccggttacgcgcagttcgaagacgctgcctgacagatacgggttctcagatgaacgttgtcgcaaagactgagaccgggcgcgcgctgggcgatgcattcgccgtcgcgcgtgaccgcctgccgggcaagagcaagatcgccgatcagcgccgccaggcgttcgaggcctatgagcgctcgggcctgccgcatcgccggatcgaggattggaaatacaccgatttgcgcgcgctgatgcgcgaggtgctgccgctggcgcctgcgccggatgccgcagctctgggccgcgctgctgccgccatcaagctgcaggcgatcgacggcgtgcgccgcctggtgctggtcgacggcgcgtttgcgcctgatctgtccgatctcggcaacctcgacaagggcctcggcatccaaccgctgcgcgaagtgctcgacgccggtgacggcgtgctctccacgcaggcctttgcgaccgacatctccaatccgatgatcgcgctgaacggtgcgatggcgaccgatggcgttgtcatcgagatcgccgacggtacggtgctggcgcagccgctgcacatcgtgcacgtcgcatccggcaccgccccggcctcgatgttcacgcgctcgttgctgcggctcggacgggatgccaatgtgacgttggtggagagctatctcgccggcgagggcgccaaggcctaccaggcgtacgacgggctgatcgtcgcgatcggcgacaatgcacggttggaccacgtgcgtctggtcgaggacagcatcgatgccttcaacatttcctcggcgacggtgtcgctcggtgcgcatgcccatttcaacaccttcggcctgacctcgggcggtcatgtcagccgctaccagctgacggtgacctgcgccggcgagggctccaacgtcgagaccaacggcctcaatctgatcaacggcacgcagcatgccgacaccacgctgttcatggatcacgcggtgccgcactgtgcgagccgcgagatcttccgtgccgtcgtcgacgaccgcgcgcattcggtgttccagggtcgcatcattgtccgtccggacgcccagaagaccgacgccaagatgatgacccgtgcgctgttgctgtccgacgacgcggaagccgacaacaagccggagctcgaaatcttcgccgacgacgtcacctgcggtcacggcgcgaccaccggtgcgctcgacgagagcctgctgttctacatgcgcgcccgcggattgcccgagaaggaagcgcaggcgctgctgatccaggccttcgtcggcgaggcgatcgagagcattgccagcgacgcgttgcgcgaggtggcaattgccaccgcgcagcgctggctggaagcgagggcatgagcatgcataaggcggtcgccaacggttcttacgacgtcgctctcgtgcggcaggattttccggcgctcgccatgcagatctacggcaaaccgctggtctatctcgacaacgccgcatcggcgcagaagccgaatgcggtgcttgaccgcatgaccgaggcctacaagagcgaatacgccaacgtgcatcgcggcctgcactacctcgccaacgctgcgaccgaggcctatgagggcgcccgcggcaaggtcgcgcagttcatcaacgcgcgccgcaatgaggagatcatcttcacccgcaacgtcaccgaggcgatcaacctcgtggcatcgtcctggggcggagagaacatcaaggagggcgacgaaatcgtcctctcgatcatggagcaccactccaacatcgtgccgtggcacttccttagggagcgccagggtgccgtgatcaagtgggcgccggtcgacgatgaaggcaacttcctgatcgaggaattcgagaagctcctcactccccgtaccaagatcgtcgcgatcacccagatgtcgaatgcgctcggcacgctggttccggtcaaggaggtggtgcggctggcgcatgcccgcggcgttccggtgctggtcgacggcgcgcagggcgcggtgcatctgccgatcgacgtccaggacctcgattgcgatttctacgccttcactggccacaaggtgtacgggccgaccggcatcggcgcgctctacgccaagcacgagcatctggtggcgatgcggccgttcaacggcggcggcgagatgatccgtgaggtcgccaaggactgggtcacctatggcgatccgccgcacaagttcgaggccgggacgccgccgatcgtcgaggcgatcgggttgggcgccgcgatcgactacgtcaattcgatcggcaaggagcgcatcgctgcgcatgagcacgagctgctcacctacgcgcaggagcgcctgcgcgagatcaattcgctgcgggtgatcggaaccgcccgcaacaaggggccggtgatctccttcgagatgaagggcgcacatccgcacgacgtcgcgaccgtgatcgaccgccagggtatcgccgtgcgcgccggcacgcattgtgtgatgccgcttttagagcggttcaatgtgacggccacctgccgcgcatcgttcgggatgtataatacaaaggaagaagtcgaccatctggcgcaggcgctgatcaaggcgcgggaattgttcgcatgaccgatacagccgaagtcaagacggccaccatggaaaccacctcggcactgccggcggaggagaccgagcgcatgagcggcgagatcgtcgcggcgctgaagacggtgttcgatccggaaatcccggccgacatctacgagctcggcctgatctacaaggtcgacctcaaggatgatcgctcggtcgacatcctgatgaccctgaccacgccgaactgccctgctgccggcgagctgccgaccatggtcgagaacgcggttgccagcgttcccggcgtcggtgtcgtcaacgtcaatctggtctgggatccggcctggacgccggaccggatgtcggacgaggcgcgcctcgtcctcaatatgtggtgatgtgttagcggattggacttaggctcgagacaatgggcaattgatttgccgctgggactgaccacatgagtgacatgacccaagtttcaccaaccccagccaagccgaagcggccgcgcccgcaggtcatgaggctgaccgatgccgcggcggagcggatcaccgagctgaccaagcgcgccgattccgagatcgtcgggctgcgcgtcggcatcaagaatggcggctgcgccggacaatcctacaccgtcgaatatgcccacgagatccgtccgaccgacgaagtcgtcgaggacaagggcgtcaagatcctggtcgatccgaaggccgtgttgttcctgctcggcaccgagatggattacgtcgccgacaagatgcaggcccagttcgtgttcaacaacccgaatcaggtctctgcctgcggctgcggcgaatcggtgcagctgaagccggccacggtctgatcgctgccgcaccggcgagtgtgcaatcgcgctcgcgccctttgatcagatacaaccatcgttgcgtgtcgacgtcctcgtcgaccatactgcgtagccagcgggctgcggcaggcgtgtccggtcgcgctgcaatgagggtgggcacatggaccgtgaatttctcaccgacctgttcgtcgatttcggcccggtcacgctgcgccggatgttctccggctacggcatctcggccgacggcaccaatttcgcgctcgccttgcgggccgggctctacttccgtgccgacgaggtgaccatcccgcaattcgaggcggagggctgcgggccgttccagtaccagacgagttcgaagacggtcacggtgaactcctattggcagctgccggcgcggctgttcgacgatgccgaggggcttgcggtctgggcgcgctcggcgctcggcgccgcccagcgcgccgcgctgcacaagcggccacggaaacgaccggctgcgcgaaaggcgaaggcgccgacgaagaaggctgcaagcaagagggttgcggcgaagaagcccggcgcgagaaagctttcagtcaagaagacgcgtgtgcccgggaaacggtcgtcgtcctgagaggaggcgaactgatcacgccacgcgggtctggctctcggcgctgaattccgggtcggcttcgcagatcacgcggttgcggccggcgcgcttggcggcgtagaggcaggcgtcggcgcgctcgatcagcgaatccgtatcgtcggcaggcttcagcatggagacgccgaccgagatcgtgacccggccgaggatctcgccggtcgacttcttcttcaactccttggccatcacggcgcggcggatatggtcagcgaccgtcagcgcctggcgcagcgcggtgttgggcagcacgacagcgaattcctcgccgccgtagcgggcggtgatgtcctggcccttgatggtctgcttcagcgattgcgccaccagccgcagcacctgatcgccggtgagatggccgtaggaatcgttgaacgacttgaagtggtcgatgtcgaacatcagcagcgacagcggctcgctgctggccagcgcggcctgcaccgccatgtccatcgagcggtcgaaatatttccggttgcccaggccggtgagcggatcggtcaggctctcggcgcggatcgcctcgaggctgtgttgcagctcgttgatctccgactttgacagcgcgagccgattctccagcgcctgattggtctggcgcatctcttgcgtcgacttggcgacgccctcgacgatggtcttgatctgatcgcgggtcgtcgcggtcgagaggcggtcgctggcgccgacgaggctggcgtcgtaggtcgcggacacgccgagcgcgtcggtgatcagcttcatgacggcatcgatctcgccgatgacgcgcgccccgaccttgtcgatgcggtccgaggtcttgatgtgcgaaaggtaggtttcgtagatctgctcgagatcggattcgttgagcttgccgctgcgcgccagcgtctcgttgatgaccttgttgagcggcgcgttgtatccggtcgcgtagacgtaccagatctcataattgcggggaacggcggtctggcgaagcgagcggatctggccaagcgcgacttcagcgaaggccaacgtacgttcgtgctcgtccagcagcttgaccactgttacgtccccaatgcacgcaatgtcggctgtgtccgacagcaatgactaaactattgggcgagggtacgggacgagagtgaaggcaaggtaaacagtagaattacgggatttcggtcgcgaccatggttgaatgcgcctggcgccgccgggttcgcacgcagcgttggcttgcccgccaacgcgatgcgaaaactgcgcgcatttgcttcaaacgctggggatcaacgtccgcacgggccgtcgacggcgacatcgagtgcccggaataccgccgcgggcgcggcgtcagcacggcgagccctaagcgcgtgcgcgcacaggtcgcagcaggaaggccggcaggtgcgaatgatcggcgggctcgtggtcgacctcgtgctgcggccgtcgcggctcggcacggccgatcgacggcacatgcgacggcgcggcctgaggcgaggtgccgcgtccgtggcgcggttcgcgctccggcttggctgcgcgctcctggcggggctcctggtcgtgacgcggctcgcgctcaccgtgacgcggctcgcgttcacgccgcggcttgcggccgccacgggcgccgtcgcgcgaaccttcgcggctgcgagagcggcggggcgcggcgtcctcgtcggaggcctcgctgtgaacggtgtagtcgccttcagcgcgcgggatcggctggccgatcagcttctcgatcgcagccatcgacttgctatcgagcgaggtgacgatggagatcgcggtaccggtccgtccggcgcggccggtacggccgatgcggtggacgtagtcgtcggggtggtgcggcacgtcgaaattgaagacgtggctcaccgcgggaatgtcgagaccgcgggcggcgacgtcggaagcgacgagcagcggaatctcgcccttgcggaattggtcgagggccgcggtgcgagctgactgatccatgtcgccgtgcaaggcgccgacactgaagccgtgcttctggagtgatttgtgaaggacggcgacttcgcgcttgcgattgcagaagataatcgcgttgttgagatccttggcgtcgcgcagcaggcggcggaggatttcgcgcttgtcgtgggcttcgcgaccggccgggacctgcaattgcgtcacggtgacggcggtggttgcgggtttggagacttcgatccgggccgggttgtgcaggaaggcctcggtgatgcggctgatctccgggggcatcgtcgcggtgaaaaacagcgtttgccgcgtgaacgggacgagcttgcagatgcgttcgatgtcggggatgaagcccatgtcgagcatgcggtcggcttcgtcgatcaccaacagctcgacgccggtgagcagcaatccgccgcgttcggtgtggtcgagcaggcggccgggcgttgcgatcaggacgtcgacgccgcgcatcagcttggagtcctggtcgccgaacgagacgccgccgatcagcagcgccacgttcaatttctgaccagcgccgtatttgtcaaactgctccttcacctgcgcggcaagctcgcgggtcggctcgaggatcagcgtgcgcggcatccgtgcccgggcgcggcctttctcgaggagggtgagcatcggtagaacgaaggcagctgtcttgccggtgccggtctgggcaatgccgaggacgtcgcgccgggcgaggacgtgcgggattgcctgttcctggatgggagtgggggtggtgtaaccggtggccgcaactgcggcgaggaccttatcggacaggcctagattggaaaaagacattgagcctctggtcgaaaccgccgttcggcatcgcaggtaaaaggctgtcgcgttcggccccgaaacggctcgctttttgataaagctcgggggctctgactaacgctgacggacggcaaacctgacgaatcgcgtttcgatccgagggccgcgttgccccgcaacataggggcgaaaccggcaaagtcaatcttggaaccagccggatgaccgaaaaaccttaacgttttcgccaaaataaccgtcctttccgtcatttggcggtcaaatgaatcaccggttccggacccgatgacgaggcccccggcagaggctggtgccacctttgcgggggaggcgagctgccaaaatatcgaaaacaaccccatgcaaagcagccgcggtggcccgcgttcgacaggccagttgacacgtcgggcaactcacgagtacgattctaatattccgaaatcacgcagatgcacgcccaccgcaggtgcattaccatgcatagcggaccacgcccttgccggcataggagcgggtcacgttggagaactcgccttcgaagcttgcgagcgccgaccagccgttggcccatttcagttcggcggaggccgtcgtgagggcggagtcacgggcctgcgccgctccgttcacgacgaagctcgcgccgggcagggtctggaatgtcgcggcgatgctgcggtccgggttgaaatcatgcgcccaggcggcgcggccgcgcagcgtcagaactgaatccgagagcgcgaaggatttgtcggcgcgcaggccgagctcgctgcggctgtcggtgacgctcttggcgttggtggccagcgcaaaggtgttggcgccgacgatcgcctgctcggcatagctcggaagctggaacgtcgtgaactggccggcggcatagggcgtcaggccaatgccgccgatccatggcgcgacgaagcggtagccgccctcggcgcggcccgaccacgcattggccttgaactcggcacgcaggcgatcgatgctcccgaccgtcacggtgcgatccgtcgtgacgtcctgccagccataggccagcgcaccggcaaggtacgcagcgccgacattgtgcctgatgaaggcgcccgcctggaacaggtcggagcggccgccgccgctgttggcgacgctgaaattggtgccgccgccagcgagcgcaaagccggcgatcgtgttcggcgagaagcggtagtcggcgccaatggcggtgccgaacacctggctggtggtgttgttcgagccgagcgccgtgttgccgtcggtggactgtgagccgccgtaggccgctgcccacatgctccagcgcggatcgtagccctgcgcgatcggcgccttgtgataaatcgcagcggcggcgtcgctggtcggatgctttgctgcgtaggccagggaattgtcatctgcgtagggcgtggcgccggccggcatcgccgtcgcgccgcggccgtcgatgaagggatcgagcatcgtacccatgaactggttcatggcgttgaacgtggtctgctgcgatccggccgcgctctcgcccgagagctgggtcaggccgttcaggagattgtctcccgacaggttgaagatcgcgctgaaggcgttggagagattggcgccgccgagcaggccgttgtcgatcgcacccgcgacgctcctgtgattgatgccggcattggccggcaggatcggggagagcaggccgggatcgaccgacagcagcacgtcgttgccgacgtagctcagcaccggattgcgcgcgaggttgttggcgagcaacaggcttgccgagccgaacgtgccgctcagcgttcccgcattgacgatggtgtaggtggtcttcctggtgatccgttcgagcggctgcacgatgacgttgccagcgatgttagcggtgcccgtcacgatcgccttgtcgctgatcgtgttggtgacctgcaccagataagtcgccgccgcggtcatggtcaggctcgccatcgtgatggtccccggcgaattgccgggcgacagcgtgccgctgatcacagtgttgccgatggtggcgttgccgccgagcgtgccgttcgggccgaccgtgacgcttgcattcggcatcgcgccgttgaggatgaacacgctgtcgacgttgacagacccggcaaagttcgagttgccggtaaagctccagttcgagccggcgagaatcccgaaattggcgaagccgctgccaagtttcgacaggtcgaaactcgacgcggtggttccgccgaactgtacgatacttgtgccgctgccgacgatgttgccgttgaacacggcgccggactggacttgcagcacatcgttggtgccgccgaactggacggcggtgccgccggtgccggtgatgatgccgttcgcgatcaaggtggtggtgccgcccgacgtcgtgatgccggtggtgccggtgactgatgtcccggtcgtgatgaagatgttgcccggtgtcgagcgcgatgcggcaatgccgacacctgagctctgcacgccggcgagcgcatcgatcctgatatcgccgagaccgtcgcgctgggcgaagatgccgtagctgccggccgccgtgccgctcgcaatcacgttgccttcggcgcgcagcgccagcgtcgcggcgttgtcggcgccattcaccatgacgccgctgatgccgatcgccgccgcgcttgccgaggtggcgctcacggtccccttggtgtcgagatcgatgccgccgagtcccgcggtcaaggccgcgaatctggtgctgccgcggctcagcccgatgccggtcgcgccgccatccgaggtcgcgctcacatcgccattggcgtgaacggtgaggatgccggtgttgatgttgctcggagcaaagctgctgcctgaggcgttgatgccggtggcggtgctgccagcgccgatcgcggtcgccgtcacggcgccgtcggcggtcaaccggactgtgctcagattgttttgtcccacgctgacgccgacgactctcgacacggtgtcgctgatcgacgtggccgtcacggcgccgtgcaggttgaagtcgaccgggacctcgccgaaggccgacaaggcggcccccgtcacatttgcgacggagccggaccttgtcatgccggtgatcgcaatcgatccattggcgttcagtgtcgccgatccattgctggatgtactgcccagcgcggccgataggcctgcgacgctgccaccggccgatttggagggcgaagtcctggtgtcgaaggttccggaaatatcgccattgaaggtcgcggtgttggtgccgctggccgcagagaaagcgacggacgccagggcgccgtagtaggccgtatcggggccgcttcccctggcaatattgccgtccacgacaaggctgttgttggcgccgccggcggcggacaccgaaagtgtcccacccgtgatgccgtgcgttcggaccgtcgtggtcccagtgccgtagttctgcaagctcacggagccgctgacatcctggttgagcttcaccgtgaacgcgttggcattggccgaattgttgccctcgacggtgatgttgcccgagacgctcgcattggtggtgaggtcgacggtcccgacgccgccgttctggagatagatgccgccgacgatcgcgccgttggtggtgacggaaaggttgcgtgcagtattaaggctctgtcccatccggacgtagatcgcgccgccggcttgggttgtgataccggtgactgcgcctgtcgcgatcgtgacgtcggattggctgccgtcggtcacgacgaagattgcctgaccggccacgatccggctgccgatcgagttgatgttgacgctggcattcggtccgctgcccacggcctggatgccggtgccgcccctgatcgtgccggcggtctgcgtaatggaggtcagaccgttgccgatccgggcagtgatcgcgtacccgtcggcggtgacgtcggcagatcccgtgtaggtgatcgtgccgagggcggagagtccgatgccgttgtacagctggagcgccgtgatgccggcggggtcgttgtgattgacagtgaggtttccgctgctgctcgcggtcacgccgcgggtcgtgatcccggcgccggcgttgatgttgaccgtgagatcaccgcgcaaaaccgtgttgagcccgccgtccgacggatgggcggcgtcgcagagcacgttggcggtgccgacgcccgtgcagtagaccgcagcctcggccgcggagctcagcgcgatcaacgacgccgagccgagcagcgcgccgcgccacatcgtcagcctgccgccgatgccgatcatgaccttgcccccaagccccgatgtatctgtttgtttctcgcgcaatggtcgtgcggtgtcttctcagtgcgcgcatactgtcgatccaaagcgcgcctgccgcgaaaatgcagccaactgtggccgcagggcctcagcggagcgtcgccgcggctagagccccgcggcgcggtattcgccgggggtcagaccctcggacgcgctgaagatccggtagaaggttgcgaggctgccgaacccgcaggtgagggcgacatcggcgatcggccgcggcggcttttcggacagcagcctgcggctttcgctcaggcgctgggcggtgacggtctgcgagaagctcgccccggtcgtttcgaacaggacatgcaggtaacggaccgagacgccgagcatgtcggcgaccatgcccggcgacagcgccggcttcgcgaggtggcgggtgatcagacggcgcgcgaggctgagccggccgacgcgcagcgcctgttgcgcgcggcggctgcccggcctgatcgcgccgcgctcgatcagcgcaaggtcggcgatgatcttaaccagcgcaggaatgcttgcggtgtcaccggcctccgtcgcgtccttgaagtcggcgaggcaggcctcgagcaacggcgtccagccgcgattgcccgtcgccggcgaacctcgacgcgccagttctgtcgctgcggcctcgtccacggcatcggagctgcgcgcacgagtcgggcccgtggatggcgtgtgtgggctgtcctcaagctttgtgcgcatcgtgcatgacccctcgctctgcatcagagcgcgcgtcgccgggcatgaaatcggctgtgccgagaccgggcgaagcgccagcgcggttctggcgaactcgacggaaattatcttctcaatgcgcgcaggctgttcacttcggtccggagaatgccggatcgcgcgacgatcggccgcgtcgtccgtttgccccatgtcagccattcgagacgcctccaaaagcctttcgatgcaatatcgtatatttcacatagtcgcgtaaaatatgaaatagataacatgcgtcaaaacttgtcggtggacaggcggagatggcccggccggcgcctgacggtcgattgtcgggaggatttggggatcgacgacggctgccgcgcaggccgtcgcgtgaactacctgcgcttcggcatcacggcgcagccgtagagcaccatcgcgcacatctggcggtagcgggccgaaaagccgtcccgggcgatcggcggcagtgcctggttgaccgcgcgtccaccatcggcaagcgcctgcgcgatttgcgccgcggtgaattcgccgttcagcttcagcagccgtgcagcctgcaattcgatcaccagattttccagatcagcctggaacgagacggcggatttgatcatcagatcgcggcagcgcctgaaggcctcggcattgagctcgacggtgtgcggcgaagcggtgacgcggcgccgcgtctcgccgtagcggacgtcgagtatcgtcgcgaagatatccagcgcgccgccgccctttgcccgaaccgatcggccggcctccagtgcaagagcgacgtcctcgacgtggcgccaggcgatcacggcgcgaaacgcctcttccttgttgctgaaatagtaatacagcgcgcgctgcgtgaagccgcaggccttggccagcccgaccatcgacagcccgccatagccgtagtcgagaaaagcctggttgacctgcgtcagcaggtcgggtccaggcttgatcatcttcttcgacatcaggagtccggggaggacgaggggcgccgggtgacgccgggaaactcgattacgggcatcaacgcgctttagcaacccgcaaagagccaggtctacccagcgcgtccagaccgacgatcaggccaatcgggcccggtagtcgcccggcgtcatcgattcggaggcgctgaagaggcggtagaacgtcgcaaggctctcgaagccgcaggcgaaggcgacctcggcgatggtccgcccggactgctcgcggagcaggcggcggctttgtgcaagccggagcgcggtgacggtctccgagaagctcatctccgtctcctcgaacaggatgtgcaggtgacggaccgagatgccgagcaggccggcaatcagggttggcgccagcgccgcgtcgggcagatgccgccggatcaggcggcgcgccagcgacagatgggcggttcgcagcgcctgctgtgcgagccggctctttggccgcatgatgccgcgctcgatcagcgcgatatgggccagcgcctgcaccatcggggccgggtccggcgccgtcgtgtcgttgccttcgacaaggtcgcggaagcatgattccagcagcggctgcagcgcagtctcatcctgcaccggccgcgggacgagttcgccgagctcggcgcccggcggcacgatgttcgtcaccgggatcttgatgatgcgcaggtggaagccgtcgtcgtgcagcgggacggtgcgatagggcaggtccgaatagctggtcgcgaacatgccgtcgcgcaccgcgaattcatcaagccgtgcgccgccgaaccagccgccgccgccgagctgctggtagacgcacaggctgtcgctgcgggcgtcggcgatgtcgcccgcgccccgctcgacccggtagggcgaggcccgcagctcgaccaggccggcatcgccgagcttgcgcagcgagaactcgccgaagaagttgcggcggtgctcgggctcgagttccgcggtgacgccgaacaaccccttggcacgcacctcgcgccaatagtcgaagcgatcccggggatcgacttgctcagtggaccatgtgtacacggaagagcctttgggacctgtggagagctcgcgccggagtgaggccccgaatctatcacgcgggctgtaaaaagaaacttggcctggggcggacgggacgccccatggtggccgggacgggcgccaagaggcgctcacgacggccgtccatcgccggtcttgaaccggccaaacggctgacccgactattaggcgggcgcgcgagcggcgcactttcgtgcaggcgggaattgggatgaagagctggctttcgagactttcagcggccctgttggcggtcgtatgcgtcgcatcggcggcgcccgcccaggccgaaaagcgcattgcgctggtgatcggcaacaatgactaccggaacgtgcccaagctgcagaaggcggtcaacgacgcccgcaccatgggcgacacgctgaagcagctcggtttcaacgtcatgctggccgagaatttgaaccggcaggcgttttccgagacgctgctcgccttcgaccgcgccgtggaacccggcgataccgcattcttcttctacgccggtcacggcttcgagatcgcgggccagaatttcctgctgccgaccgacgtaccggcggcgaccgaagggcaggaggagctggtgcgcgacgcctcggttctcgccgaccgcatcatcgagcggttgcagaacaagaaggcgcgcacctcgatcctggtgttcgacgcctgccgcaacaatccgttcgagcgggccggcacgcgcgcggttgccggcggtggtggcctcgccccgatgacgcagctgccggaaggcgtgttctcggtgttttcggcggggccgcgccagaccgcgctcgaccggctgtcgaacgacgatgccaatcccaattcggtgttcacgcgaacctttgccggggagctgctgcagcccggcgagaacctcgtgcaggtcgcccagcgcacgcggcgcctggtcagcgagatggccgagaccgtgaagcacaagcagatcccggtctatttcgaccagatggtcgatgacgtcttcctgaacgggattgcgaaagcccaggccgaggcggccaagccggccacgcctgcgcagcaggtggccgcgctgccgccggtgtcggtgccgaagctgccgaaggaggactcgatcaacgcgccgatcgcgagcttctcgcgccacaatggcggctggacggtcgtgttctcgatcgccgatccgacgctcggcatctcctggcggatcggcgaccgcggcgacttccgcgaaaccggcttcatggacacgctcgatccgcgcacgcgcaagcggatgcctaatccgtcgatcgagctgccggccgatgcgccggcggcgacgatcgagcttcgctatgtcgatacccagggcgagatgcaggggccgttcccgatcaagttcgatcccgacgccgcgctgatccgcgaccagcgcaagatcctcgacatgacggcgacaagctggctgtcgttccgcgagttcaacgggctgctcgtctattatacccacctgatgtcgtatcgctgcgcgattcgcgaggtgcggatcggcatcgacaccgcggtgccggacaaggtgctgaagatgcccgcctgcaattcgcgcgatccgagcgcgatcccgtccgacgcgcagccctacctgaagctcgcgccgcagaccaaatcggtctcggtggaactgacctatcgcgacggcagcgtgtcggagatcaagaccttcaggcgatagtctgcatccttgtcgtccgacccgcgttaccaagggagcggcgagacaacggttaaggacggcatcatggatgcgggcaatccggcaggaccgaacacaggtcagatgaaggtgcgctgctgcgtggtcggcggcgggccggcgggcatgatgctcggctatctgcttggacgcgccgggatcgacgtcgtggtgctggagaagcacgccgacttcttccgcgactttcgcggcgataccgtgcatccctcgaccctgcaggtgatggacgagctcggtctgatcgacggcttcctgaagctgccgcaccaggacatccagaagctcgacggcatgttcggcggcacctcggtgcggatcgcggacctcagccgcctcagcgtcaaatatcccttcatcgcgatgatgccgcagtgggacttcctcaatttcctgcgcgacagcggcaagcgttttccctcgctgcaggtgctgatgagcgccgaggcgaccgacctgatccggcgcggcgatgcggttgccggcgtccgcgtgacgacgcccgacggcacgatcgacatcgaggcggatcttgtgatcggctgcgacggccgccgttcgatcgtgcgcgagcgcgcaggccttgccgtcgaggagatcggcgcgccgatcgacgtgctgtggtttcgcgtcgggcgccatccggacgagaccgagaatttgttcgcccgtgtcgaccacggcaagatgatggtgacgttcgatcgcggcgactattggcaatgcgcctatgtgatcgccaaggggcaatacgacgccgtgaaggcgaggggcttgccggcgctgctcgacgacgtgctgcggctggcgccgatcctcaaggccggcattggcgacgtgaagagcttcgacgacgtcaagctgctcacggtcgcgatcaatcggctgacgcgctggacgcttcccgggctgctctgcatcggcgatgcggcgcatgcgatgtcgccgatcggcggcgtcggcgtcaacctcgcggtgcaggacgcggtcgcgaccgccaacatcctggcggcgaagctcgcacaaggctgtccgtcggagcacgagctcgatgcggtgcggcgccgccgcgaattcccggtgcgcgtgacgcagcgcatgcaggtgatcgcgcaggacaacatcatcagcgcggcgctgaagggaggcgatcgaccggtgccgctcgcgctgcggttgatcacggcgatgccctggctgcagggcctgacggcgcgtctcgtcgcggtcggagtgcgcccggagcacgtgcattcgccggccgcaggctgaagcgtcacgcgtgccggcgaacttctcctgagcgagcaggatgcgaagggccccggccgctccagcagggcccctgtgtctcaggccatgaccgaatagccgccgtcgaccgggatcgcggtgccggtgacgaaatccgacgcgggcgaggccaggaatacggcgatgccggcgaagtcgtcgatggctccccagcgcgccgccggcgtgcgcgcgagcacgcgctcatgcagcccggcaacctgctggcgtgcgcccttggtcaggtcggtgtcgatccagccgggaaggatggcgttgacctggatgttgtcgggcgcccaggcgttggcgcaggcgcgggtgtactgcacgatgccgcccttgctcgcggcataggccgcagcgaagctcgcgccgaagatcgacatcatcgagccgatattgatgatcttgccgtggcccgacgccttgagcgcaggataggccgccttcgagcacaggaaggcgctggtgaggttggtgtcgatcaccttgctccactcgtcgagctcgagctcatgcggcggcttgcggatgctcatgccggcgttgttgacgaggatgtcgatccggccgagctcgccgatgacccgctcgaccatggccgcgacggccgccttgtcggtcacgtcggtcgccaccgcgatcgccttgacgccgcgcttgcccagatcctcgacggcagcagcagatttcgcctcgttgcggccgaccacggcaaccgccgcgccggcatcggcgaggccgcgcgccatgccgagcccgatgccgccattgccgccggtgacgatcgcgaccctgcccgagagatcaaactgtccgtttctcattgttgttgtccgctgtggtttgaatctggtcgcgagagtgcccgatcgccaccgcgctgaccagatcgggcgcggccggttggtcctgcgccgggaggcgtgcgcgagatcgctctcgaaggcgttcagcaacaaaaaaagccccggacgatgccggggcttttggtctgccttgtcagcagagatcagtacttcgcaacaaccggaccggtccagttgaaacggtagaccagcgaggtgctgatggtctgaacgaacggcttgaaggtgatgtctcggccgttcgagatgttggtgacgtcggcgagttccgagatgttcttcttgtcgtagtaagcggcacgatactcggtcttcatgaaccagcccggcgcggtgatgccgaagatgttcaggttgttctcgacgccgccgccgacgaaccagccgctgcggtcgaagccgttggtgtgcaggcccgacgggagagcgctcgcggtgttgaacagcgtggtgcccttccagtgcgagctggagtagccggcattgacgtaggacagaacgttcggagcgatcagataaccgaggcgcgcaccggcggcccagctgtagtcgttcttgatgttgcccgcgacgaacggaccctgatcctggatggtgcccttcaggctgccgaactgaccgtcggcgaacacgccgatgacccagctgttggcggtctgccagtcgtaaccggcaccgacggtgccgaaccagccgtcgccgccctggcgctggttgaagccgaggatcggcgcgcccgtgacggtcgactggacgccggtgtcagcgtcccagaggccaccgccgccgccgccgaagatgtagaagccggtccagctcggcgccaccgcgatcggggccggagccttggtgtaggggcgggcggccagatcggcagccgacgcggaacccgtcatcgcagcaaccgcggtcagagcgagcaaaatcttcttcatgtccaaatcctcgactagcgttcgatcgggtcgctgaccggggtgcgctggcaccgattcccgaaactcatgcttggactatacgtgcttccgccggaaaagctgttgcgggtgagacacaaccgctcgaaaacgaagccgctggcagccttcgacagggctcaatgaagaacggccgccccgttctggaggcggccgtaaaatcgtttgaaatcagccggttgggcctaaacgtcgagcaaatcgtcgctggcgaattcggccttgtcggagatgaaggcaaagcgcgcttccgccttggttcccatcagccgctcgaccgagtcggcggtgccctcgcgatcgtcggcgagcagcaccacgcgcagcagcgtgcgcttggccggatccatcgtggtttccttgagctgcgccggcatcatttcgccgaggcctttgaagcgattcacctcgaccttggcgttggcgttgaactcgttcttcagcaactcttccttgtgcgcgtcgtcgcgcgcgtagaccgacttggtgccgtgcttgagtttgtagagcggcggcaccgccagatagagatggccctcgtcgatcagccgcggcatctgccggtagaagaaggtgataaggagcgatgcgatgtgcgcgccgtcgacgtcggcgtcggtcatgatgatgatgcgctgatagcgcaggtcctcttcacggtagtgcgcgagcgtgccgcagccgatcgcctgcacgagatcggagagctgcgcgttggcggtcagcttgtccttgccggcggaggcgacgttgagaatcttgccgcgcagcggcagcacggcctgggtcttgcggtcgcgcgcctgcttggcgctgccgccggccgagtcgccttccacgatgaacagttcggagccctcggtgccggcgtcggagcaatcggcgagcttgccgggcagacgcagcttcttgccggcggtcttgcgcgcggtttccttttcctggcggcggcgcagccgctcctcggcgcggtcgatcacgaaatcgagcagccggttggcctggttcggattgcccgacagccagtgatcgaacggatccttcatcgcctgttcgacgatgcgctgcgcttcggcggtggcgaggcggtctttcgtctggccctggaattcaggttcgcgcacgaacaccgagagcatgacggctgcgcccaccatcacgtcttccgaggtgatggaggctgcgcgcttgccttggccggcgcgctcggcgtgatccttcaggccgcgcagcagcgcgctgcgcaggccggattcatgcgtgccgccgtcgggtgtcggcacggtgttggtgtaggacgacaggaacccgtcggcatcggcggtccaggcgaccgcccattcgcaggcgccatgcgcgccgctgcggccggatttgccggagaagatgtcctgatgcaccagcgtgtcggcgtggatcgccgcggcgaggtaatccttcaggccgccggggaagtggaatttggcttcggccgggacgtcttcgacgcccttcaggagttcctgatcgcagtgccagcgaatctcgacgccgccgaacagatacgccttcgagcgcgtcatcttgaacaggcgctgcggcttgaaggcggccttggcgccgaagatttcggtgtcaggcttgaagcggacccgggtgccgcggcgattgctgaccttgccgaggtcctcgagcttgcccttgggatggccgcgctcgaaggtcatgcgatgcaactgtccgctgcgcgcgacttcgacctcgagccgggaggagagggcgttgaccacggagacgccgacgccgtgcaggccgcccgaggtctcgtagacatcggaattgaatttgccgcccgagtgcagcgtgcacatgatgacttcgagcgccgacttcttcgggaatttcggatgcgggtcgatcggaatgccgcggccgttgtcgttcaccgacaggaagccgtcggccgtcagttcgacctcgatgaaggtggcgtggcccgccagggcctcgtccatggcgttgtcgatcacctcggcgaacaggtgatggagcgccttctcgtcggtgccgccgatatacatgccggggcgcttgcgcaccggttccaggccctccaggacctcgatgctcgccgccgtatagccggcttcggcgtccttcacgggcttggctgcagccttcgcgacggcgcggcccttcggttccggggctccgaacaggtcgtcagcagatttgcttttggcgttcgacttcaatgatttggccatgtttcttcaagtggcgcgccaatcatggcgcggcgaatcggttgctctgactatgccacggatgggctgccaatggggacgaccgcacctcgggcccggccgtccctctagataggagcctgcgattacgcccgcgaggtacggaatacaatgaccgtgaacagggccatggcgactgccaccatcagcggtccgacgatcggggcggccacgaacgagggtcccttcagcagcacggcggccacgccagccggaaacaggatgccgccgatgatatgcagccagccctggatcctggcgagcagcatcctgcccgcggccgtcatcagccggtagtagagcccgaacaggaacagcaacacaccgccgacgagattgagatgcgcgtgcgccggccccaacgtgaagccgtgctggatgcccatggcgatgcccgcgagcattccgaacagcagggcgagaacgcttacgcacatcaccagtggcccgatcatccagtgattcgtttttgcgagggaggtgccagccagcccggaccgcgggggctgatgggaaatcacgtttgatccccgcctttgtgacttgatgtcacgcaatgggctggcttacctgttcttaggctgcgtgccgctagaaaggttcattcgaggttcaacggagcggaaggcacacgacgagatggaagaccttacgcgggccctggccgaattcgttcgccatcaccaggtctgggccgctccgatcgtcatgttgctggcgttcgctgaatcgctcgccttcatctcgttgctggtgcccgcctggggtgcgctggttgcgatcggcgccctgatcggcgtcagcgggatcaatttctggccgatctggatcgcgggcggcatcggcgccgcactcggcgactgggtctcctactggttcggctaccgctacaaggagcaggtcgcgcagatgtggccgctgtcgcgctatccggagatcctgccgcgcggcgaagccttcgttaagaaatggggcgtgcccagcattttcatcggccgcttcttcggcccgctgcgcgcctcggtgccgcttgcggccggcattttcgagatgtcgtactggcaatttcagatcgccaatttcgtctccgcgctggtctggtccgcggcgctgctattgttcggcgacgtcattgcccaggccctcgaatggatatggcgggtggtgtagcgagtttcggaataaggccgcagttcagggggtaggcgggagaagcaggaccgcgcgcagccgtcatcgcgcgggcatcgaaacgctgatacaacctcgctcaccaagcacggactatcgggcgccgtctcactggaaggacaacacatggaattgacacgacgtcacgctcttgccggtgctgccggcattgccgccgcgccgctgctgccggcagtcccggccggcgccgcagcgcccgcggccgacaggcaggcgccgagcttctatcgctacaaggtcggcgacatcatggtcagcgtggtgtccgacggcaagaacgtgttcaagctggaggacgccttcatccccaatgcgaagcgggacgatgtcaacgcggcgctggacaaggcgttcatgccgcgcgacatggtgacgatctggttcgcgccgctggtgctcaacaccggcggcaagctggtcgtgatcgacaccggcaacggcgcattggccaaggccagctccaagggcgccaacggcctgttcgccgacaatttcgtcgccgccggcttcgatcccaagaacgtcgacatggtcgtgatctcgcatttccatggcgatcacgtgaacggcctgctcactgccgagggcacgccggcattcccgaatgccgaggtgctggtgccggcgaccgaatggaagttctggatggacgatggcgagatgagccgggcgccggctggccgcatgcagggcctgttcaagaacaaccgcaacatcttcgaggctgcgctgaagaagaaggtcacgccctacgaatggggcaaggagatcgcgccgggcctgacctcggtcgagaccgtcggccatacgccgggccacacctcctacgtgttggcctcgggatcggagaaggtgttcatccagtccgacgtcaccaacaacccggatctgttcgcgaccaatcccggctggcacgcgttcttcgaccaggacgccgacgtcgccgagcagacccgccgccgcgtctacgacatgatcgtcgcggagcggctgcaggtgcagggcttccactatccgttccccggcctcggcaatgtggtgaaggacggcagcggctaccgtgtcgtgccggcgccgtggaatccggtgatctgacggttttccttgacgcaaagggggcgcggccttatagccgcgcccatgatcaacgccgcgaccatcatcatcgcccgccgccgccgcattctcgcggtatgggcggtcgctcgcgtttaagaccatcgcctctgccgccggatctgatcccgcggcgctctcctcaaaaagacacgcggttcgatctggcggctccttcgtcaagcaggagtattcgaccatgtatacgccgcaaccattcaagcccgaccgcgccgcaagccttgccttcgccgaggcgcgcggcttcggccttgcctgcgcgtgggacggcggcaagccggtcgcttccgcgctgccgttctatctgtcgtacgccgccgacggcacgccgcgggcgctgtttcatgttgctcgtcacaatccgctggtaaagcttttgggtggagcgccctggctgctggccgtcaccggcgccgatgcctatgtgtcggccgactggtatgtgtcgcccgaccaggtgccgacctggctctatcaggccgtgcatctgaccgggccggtccggcccctgtcgggtgaggaactcgcggttcagatcgacgcactgacggccaagttcgaggatcggctgttgccgaaaaagccgtgggtgtcgggcaagatgacagcggcgcggctcgatgccatgaagaaggcgatcgtgggccttgagatgacggtggaagaggtggagggcagcttcaagctgaaccagcacaaatccgagaccgactttgcggcggtcgcgggtcaccttgccgcgcgagccgacgccggcgcgcaacagatcgcgcaattgatgcggcaggcgcggccggaagtctttgctatcaaaaccaatgagctcgaaaggaccgtgccatgaccttgactgacaccaaccagccgaaaaccaagagcggtgcgaccaaggccgtgttcgtcgatggggcgtcgggcaccaccggcctcggcatccaggagcggctgcattcgatcggcgacgtcaccgtgaagcacatcgccgaggacaagcggaaggatgccggcgccaagcgtgcgctgatggaggaggtcgatctcgtgatcctctgcctgcctgacgacgcggccaaggagaccgtcgcgctgatcgacaccatgggcaatgctgcgccaaaagtgctcgacgcctcgaccgcctatcgggtcgcgccggactgggcctatggctttgccgagctcgcgtccggccaggccgacaagatccgcaacgcgccgaaggtctccaatcccggctgctatccgaccggtgcgatcgcgttgctgcgcccgctggtcgatggagggctgctgcctgccgattatcccgtcaccatcaatgcggtgagcggatattcgggcggcggcaagtcgatgatcgcgagcttcgaggacggctcggcaccggccttccacctctacggcctcggcttcgagcacaagcacgtaccggagatgcagctgtattcgcatctgacgcggcggccgctgttcatcccgtcggtcggcaactaccggcagggcatgctggtgtcggtgcccctgcagctcgacgcgctgccgggcaagcccgatggagccgacctgcaggccgttctcgcgaagtggtatgccggcagcaaatacgtcaccgcgatgccgctgcagaacgaagccgccaagggcggcaagatcgagccggaagcgctcaacgagaccaaccagctcgagctctacgtgttcgccagcgacaaatatcgccaggcggtgctggtcgcccggctcgataatctgggcaagggcgcctcgggggccgcggttcagaacatgcggctgatgctcggtctggccgacagctgacggccaggcgcaccgtggacgacgccacgctgcaattctaccggcgcaatgccgaggcctatgccgggtgggcgaaagcaccgtccacccggctgatcggcttcctcaagctgttgccgccgggcggcgcgatcctcgaactcggctgcggcgccggcaatcacgctgcggtcatgcttgccgaaggcttcgtgctgcgcgcgaccgatggctccccggagatggccgaggtagcttcgcggcgcatcaatcatcccgtcgagccgatgctgttcgacgagctaagggatcgcgaggcctatgacggcgtctgggccagcgcctgcctgctgcatgtgccgcgcgacgaattagccggcatcatcggccgcatccaccgggcgctgaagcccgccggcatcttctacgcgagctacaagatcggccatggcgatggccgcgacagcatcggccgctattacaattatccggaggccgattggctggcggcgacctacgccgcctcgggggcgtggacgcaggtctcgtccgacaccagcgagatcaagagttttgacgaggcgcccgcgacgatgctgcatatcgtcgtgcgcaagggcgcgtagttggcgggcaccggcgctgacgccgcaaccggcggcaaaatctaaagcgggatgagttctggttgaatcggcttggcgcggtctcggttcacctctccccgctggggagaggtcggattgcgaagcgggtgagggctctcgctctctcgatagaccgtaatccctcacccgatatgctgcgcaaatcgacctctcccaagggagaggtgaaccgtcgacgccgttccagctcaacgtaacttcatcacgctttggttcagagcgccttgaagaccgcgagcgccagcaccgcctgggcgaggaagccgaccgtgaaggccagcgtgcggaacaccggcaggccgagcgtgtagacgatcagatgggcgacgcgggcccagaaatagacggcgcaggcgagcacggtccatttggtggagtagtcggctgcgttgaggatcaggaccagcggcgcgaagatcacgaggttctcgaccgcgttgtcatgcgcgaacatcagccggttggcccactcggcatgcggcttgtcggtgcgcgaggggttggccatagcgcccgagaggccgcgcacctggcagcggttgatggtgtaggggatccacaagatgccggtcaggatcaccgtcagcgacagccagaacagttcgcgcgtcatcgtctccccctcacgtcaatccgattcccgaccgccgggatcgtctgtttatagctgagcggaacagctcgcgctacgcgcggacgcggacatagctgcccggcgcgtcctcgagcaccggcgttccgttcgcgcctacgatacgcgccgggactgtttccggatcgtggctctccagccaggcgcgccagtccggccaccacgagcccttgtgctcctcggcgcccttcagccagtcggcgagcttgatgtccttgatgttgtcgttggtccaatattgatatttcttcgccgcgggcggattgaccacgccggcgatatggccggagcccgacagcacatacttcacggggccgccgaagaactgcgacccgtacagcaccgattccgccggtgcgatgtggtcctcgcgtgcggcgaggttgtagatcggaactttcaccttcgacagatcgagcagcgtgttgtcgagcaccatggtgccggtcgacagccggttctccagatagcagttgcgcaggtagtaggagtggttcgacgacggcatccgcgtcgcatccgaattccagtgcagcaggtcgaacgaggagggcggccggcccttcaggtaattgttgacgacatacgaccagatcaggtcgttggagcgcagcatgttgaaggccatcgccatcttgctgccttcgagcacaccggattcctgcatgtcgcgctcgagcgccgagatctggtcctcgtcgacgaacaccaggaggtcacccgcctgggtgaaatcgacctgcgcggcaaagaacgtcgccgacgtcacgcgctggcggcgcttctcggcgagataggcaagcgtcgaggcgagcatggtgccgccgacgcaatagccggcggtgtgcaccttcatctcgccggtgaccttctcgatcacgtccatcgccgtgagcgggccctcggtcatgtagtcggcccaggtcttcttgccgagctccttgtccggattgacccaggagatcacgaacaccgtgatgccctggtcgacgcaccatttgatgtaggatttctcagggcgcagatcgaggatgtagaatttgttgatccagggcggcacgatcaggagcggcgtgcgcagcacgttctccgtcgacggcgaatactggatcagctgcatcagctcgttctggtagatcaccttgcccggcgtcgtcgccatgttgacgccgacctcgagattgctcgaatcggactggcggatcttcagcgtgccgtggccggcctcgatatcctcggccagcatcttcatgccgcggaccagattgtcgccgttggtctcgacggtggcgcgcagcacttccggattggtcaggacgaaattcgacggcgccagcgcgttggtgatctgctggacgtagaattcagccttcttgcgcgtgtgcgggtcgatgccgtcggcgtcgttgaccagctgctgcgcccatttcgaggtcaagaggtaaagctgcaggatgaagtcgaagaactgattcgacttccactccggatcctggaagcgcttgtcgcgcggcgccggcgcgatcgcgggcttggcatcggcttcgccggccatgcggcgcacggccgagccccacagatcgaggtagtccttgccgagctgcatctgcagcgaggaggcgcgctccttgtcggacagccagtattcggcgatcacgctgaaggtcttgatcacctcgccgagctcgttcggcggcttgtcgcggacctctccggtctggcgcggcttgagataggctgccagcgcctggccgctgctctccatcgcccgcgcgatgttcatggcaaaggcttcgctgttgaatttcggggcggcttgggtgtcggtgctgacgttgctcatctgagggacaatatcgagtcgtttggggggcgtcatcgcgcggtgcggcaacgaaaatcagtgaaaatcagatgtttcgttctgttgcggtgcgacaaaagatctttgttccgtcatattgaagcctcaggggtcgctattgttcttcacgctttaagcgtttcgggcgacaatggtttgaaacgactgaagccaggattaacgcagcggggacgctgcaaggctcgtaccagtgcgacccgtgtcggcaaccgtgccacgtgcgcgctagcttgttggggacaattcggcgcatgccgatcgatcgaatgaacagggggctcgcggccgcagtgctgctcgcgtcgttgctggcgctgggcggctgctcgagcacgatcgccgatatggcgatgcccgccgacgcgccggcgcggcaaaaggatgccaacggttacctcccggtccatgaccttccgcccgaccgcgccgatccgacgatcaagccggcggatcaggccaagatcgagcaggagctgatcgcggcgcgcgcgcgccaggcctcgacggcggcccaggccggcaagtaaggccgcaacctggcggccgatcagcgctggcgccgcccggcgtccgtgctaaaagaaatccagttcaaccgcagatccggccacagcccccagatcgtgtccctgaattcgctctaagtcattgatttggtgtgatttctggaagaggccgttgaggcttccgtaaagccaataaagggggcgattctggcattgcggttgtcggagcaagggtcccatggaagatttttaccgcattcgccgtctgccgccttacgtctttgaaaaggtaaaccaggccaaggcggccgcgcgcaacgccggggccgatatcatcgatatgggcatgggcaatccggacctgccgaccccggcgcatgtcatcgaaaagctcaaggagacgctgggcaagccgcgcaccgatcgctattcggcctcgcgcggcatcaacggcctgcgcaaggcccaggccgcctattacgcccgccgcttcggcgtcaagctcaaccccgacacccaggtcgtggccaccctcggctccaaggaagggtttgccaacgtcgcgcaggcgatcaccgcacccggtgatgtcgtgctgtgcccgaatccgagctatccgatccatgcgttcggcttcctgatggccggcggcatgatccgctcggtgccctcggagccgacgccgcaattcttcgaggcggtcgaacgggccatcatccactcgatcccgaagccgatcgcgctgatcgtctgctatccgtcgaacccgaccgcctatgtcgccgatctcgacttctacaaggatctggtcgccttcgcgaagaagcacgacatcttcatcctgtccgatctcgcttacgccgaagtctatttcgacgaggataagccgccgccgtcggtgctgcaggtgcccggcgcgctcgacgtcaccgtcgaattcacctcgatgtcgaagacgttctcgatggccggctggcgcatgggctttgcggtcggcaatgagcgcatcatcgcagcgctggcacgggtcaaatcctacctcgattacggcgccttcacgccggtgcaggtggcggcgaccgcggcgctgaacggtcccgacgattgcatccgcgagatgcgcgacacctaccgcaagcggcgcgatgcgctggttgagtcatttggccgcgccggctgggacattccgccgccgcaggcctcgatgttcgcctgggcaccgctgcccaaggcgttcgaggcggtcggcagcatgcagttcgcaaccctgatggtggagaaatccggcgtcgtggtgtcgccaggcgtcgcgttcggcgagcacggcgagggctttgtccgcatcgcgatggtggagaacgagcagcgcatccggcaggctgcgcgcggcgtgcgccgcttccttgaaagcggcatcgaaacgttgcacaacgtcgttcctctcgccaaccgacgctgatccttccaggttgcttaatctcatgatcgcacccctgaacgtgggcatagcggggctcggcaccgtcggtgccgatgtcgtccgcctcatcgaaacgcaaggacgcgcgctggccgagcgcagcggccggcccgtccgtgtcgtcgccgtcacggcgcgctcgaaagccaagaagcgcggcctcgatttgcgcggcatcgcctgggcgaagagcccgcaggcgctggctgaggatcccaatatcgattgcttcgtcgaactgatgggcggcgccggagatcccgcgctgtcggcgatcgagacggcgctgaaggcgggcaagtcggtcgtgacggccaacaaggcgctgatcgccaagcatggcctgcggcttgccgcggccgccgagaagcatggcggcgcgctgaacttcgaggcggcggtcggtgcggcgatcccggtgatcaagacgctgcgtgagggcttggccggcaccagcgtcaaccgcgtctacggcatcctcaacggcacctgcaattacatcctgacccggatggagcaggagggcttgtcgttcgaggaatgcctgaaggacgcccagcgcctcggctatgccgaagccaacccgtcgttcgacgtcgatggtcacgacaccgcgcagaagctcgcgatcctggcgagcctcgccttcggaaccaaggtcgcggaaagcgccgtctatgtcgaaggcatctcctcgatcacgcccgaagacctcaaggccgcctcggaactcggctaccgcgtcaagctgctcggcgttgccgtccgcacggcgaagggcatcgagcagcgcgtgcacccgaccatggtgccgaaatcatcctcgatcgcccaggtgatgggtgtgaccaacgcggtcgccatcgacggcgagggcattccgccgatcacgctggtgggccccggcgccggcggcgatgcgaccgcctcggccgtggtcgccgacatcgccgacgtcgcccgcggcatccgcgccaagccgttcgggcgtccggtcgagcggttgcgcgacaccaccaaggcgccgatggaacgccatgagggtggctactatatccgcctgatggcgcgcgatcttgcaggcactgccgcaacaatcgccacccggctcgcggaacagaagatatctctggaatccatcgtgcagcggcatccggatggcgtcgatgttaacggtgcggccaaaaaaccttcaccggttccggtcattctgattacctatgcgaccagcgaggatgccgtgcatcgggcgttggccgcagtgcagcgcgataaggtcatcagcggcaggccgcaggtgatccggatcgagaaaaactaacgcatggcctgaacgggtcgggcgtgagacgattcatgcgggcaggctggcctgtccccgaggcttaaggagtacgccgatgtcgacccatatttccgtgccgccgcagatgctgctcgagcgcatcctgacgctcgaaatcgtgcgcgtgacggagcgcgcggcggtgtcggccgcgcggctgcgcggccacggccaggagaaggccgccgacaaggctgcggtcgacgcaatgcggcgcgagctcaacaagctgccgatcgaggggacggtcgtgatcggcgagggcgagcgcgacgaggcgccgatgctgttcatcggcgagaaggtcggcctcaacgccggtcccaaggtcgacatcgccgtcgacccgctcgagggcaccacgctgtgcgccaagaacatgccgggctcgatcgccaccatggcgatggccgacggcggcacgctgctgcacgcgcccgacgtctacatgcagaagatcgcgatcggtcctggctacgctcggaacgtgatcgagctcgatgcgccgccggccgacaacgtccgccggctcgccaaggccaagggcgtcgacccgaccgccatcaacgtgctggtgctcgaccgtccgcgccacgccgacatcatcaacagcgtgcgttcgaccggcgctgccgtgcagctgatcaccgacggtgacgtcgccggcgtcatccactgtgccaagcccgacgagaccggcgtcgacatgtatatcggcaccggcggcgcgcccgagggcgtgctcgcggcggtcgcgctgcgctgcatcggcggccagatgcagtgccgcctgatcctcgacaccgaggaaaagcgcgagcgcgcccacaagatgggggtcaccgatccgaagatgatctacggcatcgaggacatggcgaagggcgattgcctgttcgctgccaccggcgtcaccaccggctcgctgctgaccggcgtcaagttcaagaaggacgtgatcgagaccgagacggtcgtgatgcgatcggtcaccggcaccgtgcgctacatcaaggccgagcaccgccagctcgagaagttccacctggattgagaacgggcccagcagtggttgtcattccggggcgcgcgaagcgcgagcccggaatccataaccacgacaatgaatatggattccgggcctgcgccaggaggcgcatcccggaatgacgaagagagagtgtgacgcaagcaagaataacaaagcgggaggcaacccatgtccgatctgtccggtgtcaaggccctgatcttcgacgtgttcggcacggtggtcgattggcgcaccagcctgatcaacgacttcaccaagtggggcgagacgcggggcatcaaggccgactggaccgcgttggtcgacggctggcgtgcggtctatacggcctcgatggatgaggtgcgcaagaacccgcagaacggctacgtcatcctcgacgtcctgcaccgccgctcgctggagaagctggtcgcgcagctcggcatcaacgggctgaccgaagccgacctgaatcatctgacgctgggctggcatcgcctgcacgggtggccggacagcgtcgccggcctgacccggctgaagaccaagtatatcatctcgccgctctccaacggcaatgtcgcgctgctgaccaacatggcgaagttcgcaggccttccctgggacctcgtgatgtcggccgagctgttcgagcattacaagcccgatccggaaacctatctcggcgccgcgaagctgctgtgcctgccgccggagcaggtgatgatggttgccgcccacaattacgacctcaagcacgcgcagaagcatggcctgaagaccgccttcgtggcgcggccgaccgaatacggtccgttgcagaaggtcgatttcgaggccaccggcagctgggacatcgtggccaaggatttcggggaaatcgccggccggatgggctgctagaactggcctgggattcactgaagcgctacgattcctggtgattggatagggaatcatgacgctccacgcatccgcactgccgatcgaggcgccgcaggcgttccttggcgtgacgcggtcgttgaccggaaagctctggcgcgaccggctcgatgcacgcggggcggcgcgggcgctcgcgatcgtgcagcgacacaatttgccggaaatgctggcgcgcgtgctggcggggcgcgatgtcgcgatcgacgaggtcacggacttcctcgacccgaccatccgcaagctgatgccggatccgcacacgatcaccgagatggagcaggccgccaggcgcatcgcggatgccgctgttcgtggcgagaaggtcgcgatcttcggcgactatgacgtcgacggcgcgacctcggcggcactgctgacctggcatctgcgccattgcgggctcgacccgctgatccacattccggaccgcattttcgagggttacgggccgaacgtcgacgccgtccgcgcgctggcgaccaagggcgcgacgctgctcgtgacggtcgattgcggcaccaccagcatcgagccgctggcggaggcgaagaagctcggcatgtcggtcgtcgtgatcgatcaccaccagaccggcgatgaactgcccgaggtcgatgcgctggtgaatccgaaccggcccgacgatctctccgggcttggccatctcgccgccgtcggcctggtgttcgtcaccctggtcgccgtcaatcgcgagctgcgccagcgcggcttctggagccgcgagatgccggagccggacctgctcagcgtgctgcatcacgtcgcgctcggcaccgtcgccgacgtcgcgccgctgatcgggctcaaccgcgccttcgtcgcaaaaggcctgatcgcgatgcgccgccgcgatcatgtcggccacaccgcgctgatggacgtggcgcggctcaacggcccgccggaggcctggcatctcggcttcatgctggggccgcgcatcaatgccggcgggcggatcgggcgcgccgatctcggcgtgcggctgttgctcgaaggcgatgtctcggaggcggcgcggatcgcggccgagctcgaccgcctcaacaccgaacggcgcgtgatcgagcaggcggctgaagcccaggccgaagcggaggcattggcttcgctcgggctcgaggacaagggcgctgtcatcgtcactgcggcggaaggctggcatcccggcgtggtcgggctggtcgcggcgcgtctgaaggagaagttcgcgcggccggcgtttgcgatcgcgctcgagccgggcggcatcggcaccggatcgggccgctcgatcggcggcgtcgacctcggcaaggcggtgcgccaggcggtgcacgatggcttgttgatgaagggcggcgggcacgcgatggcggccggcgtgacgctgcgcaaggagaagcttgccgaattccgcgcctacatggaaagcgcgctggcggccgacgtcgccaactcgcgccacgagaacgagctgttcatcgatggtgccgtgaccgcgcgcgcggtgacgccggaattcgccgcgacgctcaaccgcgcagggccgttcggcagcgccaatccggagccggtgatcgcgctgccgtcgcaccagctggtctatgccgacgaggtcgggcaggcgcatttgcggctgcgcttcaagtccggcgacggctccatcgtcaacggtatcgcattccgctcggtcggacagaagctcggcagcgccttgacgcaaaatcgcggtcagcaattgcacgtggcgggctctcttgcagtcgaccgttggcaaggcaacgaacgtgtgcaattccgtgtcctggacgtcgcggcaccggatcagggcccgacggtgatccgataagaaacgtttggagaggacatggcaggacaggttgaaggcaaggtcgcgctggtgaccggcggcgcatcggggatcggcgaggcgatcgtcgaattgctggcgcaggaaggcgcgacggtggttgcgaccgatatcgacgaattgaggggacccgaactcgcagcgcggctgagcaaggccgggcgcaaggtgagcttcctgccgcaggacgtcaccagcgaggagcgctggatcgaggtcgtcgccgagatcggcaagcgccatggccgcctggatatcatggtctccaacgccggcatcggcatcggggcgccttcgatcgtcgagatgtcgctggcggattggcgccggcagacggccatcaacatcgatggcgtgttcctgtcggtgaagcattcgctgccgctgatgcgcaagcatggcggcggttcgatcatcatgatgtcgtcgctggccggcctgcgcggcgcggcgacgctctccggctatagcgcgaccaagggcgcggtccggctgttcgccaagtcgatcgcgatggaatgcgcgcaggtcggcgacggcatccgcgtcaactccgtgcatcccggcatcatcgacacgccgatctggggcaagattccgaccggcccgtccggcgccggccagaacgcgccgatcgatccggaggagcgggctaggttcgcgacgccgctcggccgcgccggccaggcgatcgagatcgcccagggcgtgctctatctcgcctcggatgcctcgcgctacgtcaccggcagcgagctcgtgatcgacggcggcatgaacgccggcggcgtggtgcggcagccgagctgatttccgttattgcgaggagatgagcggcgcatttgcatcccaaccgcggtcgtctctgcgagctacccgccttgccgcaatcgcgccagcaccttgagcccgccgtaaccatcggcgggcagcaggccggccttgatctgaaaatccttgatcgccttcatggtgtcgttgccgacgcggccgtcggtgccgccggtgtcgaagccggccttggtcagccgcgtctgcatctcctgcacctcggcgagcgtcagcgcgcgctccgagcccgggaagggctggatgaagggcggtccgccgagacagcggtcgccgagatggcagatcgccagcgcgtaattcatcgagggattgtagctcttcaccgagttgaagttcgggccgagcaggaaagccgggccgccggcgaccgggatccagagctgcgccgacgcgttcggctgcgagaacggctggccatcggctctgacgacgccggcgctggcccaggccgcataggtgcggctgccgctggcgctgccgccgggcgcgcggacctcgtagccccaatgctcgccacggtgccacttgccgcgattgacgagatacttcgccgtcgagccgagcgcatcgtcgggccggccgaacggcgagaccttgccgtcgccgtcatagtcgaagccgacattgagccagacttccggcatccactgcgaatggcccatcgcgccggcccaggagccgttcatctcctcgggcgtgctccagccgcgctgcacgatcttcatcgcgttgatcagctcggtctcccaataggccttgcggcgcggctcgttccaggcgagcgctgcgagcgaaggaaacaccggcgtcatgtggttctgctgcaccagcggatcgccataggctgattcaacgccccacagcgcgagcagcgtgccgcgctcgacgccgaagtcgcgctcgatcctggcgaacagcgcctgattgttcttcagcgcttccttgccatgaatgatgcgccagtcggagacgcggcggttgatgtactgccagatctgctcgtggaattccggctggttgcgcatctgcttgaacacgctcatgtcgggctcgatccgccccatgcagcgattccaggtcgcctccgatatgcctttcgccagcgcgcgggcgcgaaaattgtcgcgccattgatcgaagcccggaggcgccgccgccagcacgccgagcgggttggtcagtgtcacgcctgcggcgagcgctgccttcaggacagcgcggcgcgcgggggaattcggagaatcaggctgtttcatacgtccagtctagcggcgccgatcgagcgagccaaaagccacgccgccgcaggatcattgtttgagcatgcccttctcggaaaaccggttcccacttttccggggcatgctctagctatcctgcaaatctgtggcgatttttgacagccattgccggaccacctgttccgatctggcatcgaggccggccgcgagccggcgctcctgggcctgggcgatatgccggcatttctccagcagcgtggttccatggctggtcagggtccattgcagcacccgaccatggaccggatgcggcgacttgcggatcgcgccgtcgcgctcaaggttgcggatgatcacgctgacggtctgcggcgtcagcagcgccacccgggccagatcggcccctgagagccccggataggccttcagcatcgtgagcacgacgaattgcggcgaggtgacgccgagctgcgccagcgcacgctccatcgacaggcgtgaagcggcatgtgcctggcgcaacagatacgcgagataaccctgttcgccgcgcttgcctttgccgggcggcgggacggcggaggcgggcagggcgtctgcggccggtcctgccccgatcgccgccttgcgcgccaccgcgttccccgccgggcgccgctcggcgctgcccgatttccctcgtttctgcatccccgccatgttgccttcgcgaatgtctgcgtcttgctcaatatcagagctctgataatatgtcagtacactgataacatgaggccaagccgatgtcacatgcccgcaaggaatacaccgacttcgagaagctcgcccccgatgtcttcgccgtcgtgcgtgacctcggccagttcgcggcgaaggccggtctcgacaagcagttgctggaactggtcaagctgcgcgcctcgcagatcaatggctgcgccttctgcgtgcagtatcacatcctgcagggcgagagcctcggcgtgcccatcgacaagctcaatctcgtcgtggtgtggcgcgaggtgccgcagttctcggcgcgcgagcgcgcggcgctggcctggaccgaggcgctgacgaccttgccgaacggcgtctgcgacgaggtctacgccgaagccgccgccgaattctccgagaaggagctgacctacctgacctcggcgatcgcttcgatcaatgtctggaaccggttcggcgcagcctatcgctggacgccgccaccgcgccggcagcgggtcgcagccgcgacatcgtgagaagaattcaacagcaatcgacaggggagaacgaccgatgacctcgatggcgatgacagaatccttttcattcgtgcggccgccgcggccagtcttgcttgccgcgatcgcgggattggcttcggccttcgtgatcggcaaggcgctgccgcccccgctcgacgcgatttcctcgatgatcgcgccgctatgcgccagcgcgaatgcggcgtcgccgctcgacaaggtcgaggtcatcacctcgcatgcgttgccgaacgtacagggcaagcgcgtcaccgtggtgcgcgtgttctacggtcccggcggcttcacgccgccgcatcgtcactccggttcggtgacggcctacatcaccaagggcgaaatccgctcccagctcggcggtgggccggtcgaaaccttccatgtcggccagtccttcttcgagccgccgggctcgacccacatggtgtcggccaatgcgagcaccacggagccagcggagttgatcgcggtgttcgtcgcggacgaaggcgcgcagctgacgacaatgctcgaatagtcgcaccccacgcaatttccagggatcgcgagatctgtggcgcgctggaccagtttgctgtgaagtctgcagcaaactggaccttgcaacgggtactgcgcacggcgattgatggcgtggcggccacggccggaatgcgatttcgccgttcgcgcggcggcaccgaacaggagcaatcaatggtcaatctcaaggggctttccgcgttcccgatcacgccctcgtcacgggatgggcaagtcgatgccggcgcgcttcgtgccttgctggagcccttgctcgccgcgaaggtggattcgatcgggctgctcggaagcaccggttcatatccgtatttcagccgtgaagagcggcgccgcgcgatgcaggcggctgcagcgctggcggatggcagaacgccgatcctggtcggcgtcggcgcactccgcaccgacgatgcggtgaagctggcgcaagatgcacgtgacgccggcgctgcggccggcctgctggcggcggtttcctacacgcccctgaccgatgatgaagtcttcgagcactttcaaacggtggcgcgtgaaagcagattgccgatctgcatctacgacaatccgggcaccacgcattttcggtttacgccggccttgatcggccgcttgagtcgagtggacgggattattgcggtgaaaagtcctgcgctggatgcgtcgaccttgtcgggccatgtcgcggaattgcgggctgtcgtgccgggcggtttctcgctcggttacagcgccgactggaattgcaccgaggcgctgctggcgggcggcgagacctggtacagcgtcctcgccggaatcttccccaaggtctgcctcgacatcgtccgcgccgtggcaagtggcgatgccgccagggcgcggcagctcgatgcgcggctgcaaccggtctggcagttgctcaagacattctcgagcctgcgcgtcgtctacgcgatcgccaatctcaggggaatctgcgcggccgagccgccgcgtccgatcctgccgttgccgccggacgcccaggcgaaggtgggcgaggtgttggccgcaatggacatcggttgatcgctctgaggtcgccgagcttccatccgcgcataaaatcggcataacaatcgctgggcgtgcgcgctgactgggaggcgttcgatgcgattgccggtggctctattgacgattctgattcccgcggtggcgtgggccgaggagcctgcaaccgatgcgccggcactgtggggcaatcccaccgtcgacaacggcgcctgctgcaggacgcttggcgaggtgcgcggcaacatcgaccggctcgaccgcgagatcgtgcgcctgatggccgagcgcggccgctacgtccatgaggccgcccgcttcaaggccaaccccgcgcaggtcgaggcgcccgagcgcgccgaggccgtcgtgaagaaggcgatggcgctcgccgatgcagacgggctgtcgcccaaggttgcggaagccgcttaccgcgccatgatacgcgccttcatcgattacgagcagggcgtcttcgcggacgccgcggcgcggggcgacgcgccctggaagaagtagtcgaatgccggtggcgccgcaggcgctaaagcgggatgagttttggttgaataggcttggcgcggtcttgcttcacctctccccggcggggagaggtcggattgcgcagcaatccgggtgagggctcttgctctctcggtagaccgcaacccctcacccgatttgctgcgcaaatcgacctctcccaagggagaggtgaactttcgacgccgtgccagctcaacctaatctcattatgctttaattgccgccgccttcctgggtgtcgatgcgacgcacgacatcgtcggacaatgcgtgcgccacggccgctgcggggccgggctccggtccgatctcgcggccgcggccgtggatcagccgctcataggccgacaccagcgtggtgtagggattgacccagagccagccgtcgcgcgtgaacacctgcacgtcgaaatgcaggtgccgtgacgtgccgttgggatggtcgagatagttcgacaccacgccgatcttctcgccctcgctgaggcggcgtccgttgagcaggccgtcggcgtccatcacggacgggttcatgtgcatgtagcggaagcggacatgttcggtgcgggtgttgacctgcaacgtcgcggcctgctgctgcgccgagcggatcacgatgctgtcgcgcaccgcgaccaccacctgctgcctggggtcgcaaccgtccttgccgtcgcccggacacgcgccgggcctgatatcctggccctgatggccgaagccgctggcgcattggccgacctcgaaactgcgcgcctcgcagaaattgtcctgccagggatattcgtcgacccgcccgcgcttcggaaacgactgcgaatgggcgaaggccggcgccttctccagcggaaagcggatctgcgaatagaccgtgaagtccggatggccgccctgctgccggcgtccgccgctgcccgcgatgatgtcgccgctcgggcggtaggtgaagtcggccgattgcacgatcggccgctcggcggagtcggcagccgtatcgttgcgcggccgcgacggctgcccgccggcgatgcgcaacgccttcaaaaatcgttcggccaccgggtaggtctcgcggcacgccagccgcttcgatctcggcgcgctgtcgaggcactggatcgagacgacataggggatcccgaaacgcgtgaaggcgtagcggacatagccttcgcggatgaagcggcgcaggtccggaaactgcgtgaccagagccttgaccggttcgcccttgccgccgagccggtcggcgaggtcgtagaccaggatcgagcccgagatctgcacctcgaccggcttagcaaacgtccgcaacggcatgccgtcgcccgcgccgggatcgagcgagaacacggcgtcatagccggacgcgccggcatggaagacgtcggccgcgcggaaatcggcctggtagcgcgcgaccggcaggccgtctggcgcgctgccttgccgggcttcgagatagcttgcgggatcgaatggcagcagcaccgggatcgggctctgcgcaatgccggggaatagcggcgaggtcagagcgttcagctgcaccagcgcgggcatggtgcgaggatcggaggccgggacgcggcgctgtgccgcgaagctgaagctggagacgatggccggacgggtggcgatctcctgccggagctgatccagcaccgagcgccattcgacccgcatggccgagatcgaaggcgtccggaattcgtcggcatgagcgccgggaggaggcgagaccagggctgccagccagcaagtaatgaagctgaccaccttcctgttcactgcaccccccggttcgagtctccagagagactagcgcctaatccttgcgcctaatccttggcgcgttcaacgtaggaaccgtcctcggtcatgacaacgatgcgggtgccggtggaaacatgcggcggcacgccggtgcggatgccgttcgacagcacggcgggcttgtacgacgacgaggcggtctggcccttggtcacgggctcggtctccaccacttccagcgtcacgcgctgcggcagctggatcgcgaccggattgccgtcgtgcatcgacagcttgacggtcatgttctcctgcagatacggcgccgacgagccgacgatctccttggagacctggacctggtcgtaattgtcgttgttcatgaagtggaagccgtcggcgtcttcatagaggtagttgtaattgtggtcctcgacggtggccttctcgacctggtcggtggtcttgtagcgctccgacaccttcacgccgtcgccaatgcggcgcatttcgatctggctgacgggggtgcccttgccgggatgaatgttttcggcggagaggaccacatagagcttgccatcctgctcgatgatgttgcccttgcggatggaactggcgatgactttcaaaggtgttttcctgaatttgagaacgtgagggtgccaaccggttcggcagcgcctcggccgtggcgacgatttcgggctgcaacatactgatttgtccctgagatgccagtcttttgcggccgaattcggcaggttgccaaccgttccggccacgcgggatcggctccgctttcgggccggatcgggccatccgcttcggtccggccgcggtggcgcatggacaaggccggcatctttcgacaagaagggatcagctttgccgcgttcccggtgaccaaggccataccgaccatgaatctgcttcgaatcaactggttatgtccgactcctgagccggggtgggggcttgttgatgtcgattccatgcggacccgctggcgatgacgggtcaggaccagccctcgccctggtggacgccgcggcgctacgccgaccgcaggccgttcctgcaggcgcggaccgcgatcacgcgggcgctccgggcgtggttcgaggagcagggctttgccgaggtcgagactgcgatcctgcagatatcgccgggcaacgagacgcatctgcacgcgccgcggaccgagctcagacaggccgatggctctgccgcgacgcgctatctgcgcacctcgccggaattcgcatgcaagaagctgctcgcggccggcgagccgaagatctacgagttcgcgcgggtgttccgcgatcgcgagcgcggcgacctgcatctgcccgaattcaccatgctggaatggtatcgggccgccgccggctatgacgccatcatggccgataccatcgtggtgatcgcccatgccgcgcaggcgaccgggatcgggcggttttcgttccgcggcaagacggccgatccgtttgccgagccggagctgctgacggtcgcggcagctttcgagcgcttggccggcattgaccttttggcgacgatcgcgggcggcgagggcgaccgcacagcgctggcggcggccgcgggcgcgcgggtgcggatcgccgatgacgacacctggtcggacatcttcagcaaggtgctggtcgagcatgtcgagcccaatctgggacaggaccgtctgacggtgctgttcgaatacccgtcgccggaggcggcgctggcgcgcaccaaggcgggcgacccgcgcgtcgccgagcgcttcgaggtctatgcctgcggggtcgaactcgccaacggctttggcgagttgaccgatgcggccgagcagcgccatcgtttcaccgcagcgatggacgagaaggcccgccgttacggcgagcgctatccgctcgacgacgatttccttgccgcggtcggccggatgccggaggcgagcggtgtcgcactcggcttcgaccggctggtgatgctggcgagcggcgcgccgcgaattgatcaggtggtctggacgccgcctgcgggagagccatgaacaggatcgatccgaaactggcggcgacgctgcgccagccgcgcgagctgatcgatgccggcctcgcgccggtcgacgccgttgccgagctcgaacaggtggcggcgcgctatgcggtcgcggtgacgccggagctcgtcgcgttgatcgacccggccgatccagccgacccgatcgcgcggcagttcatcccgagcgccgacgagctcgtcgagcagcccggcgagaacgccgatccgatcggcgacgacgctcgttcgccggtcggtgggatcgtgcatcgctatccggaccgggtcctgttcaagctcgtccatgtctgcgcagtctattgccggttctgtttccgccgcgaaatggtcgggccgggaaaggcctcggcattgtcggacgatgcctaccgcgcggggctcgactacatccgcagccatccggagatctgggaggtcatcctgaccggcggcgatccgttgatgctgtcgccgcgccggctcgccgagatcatggccgatctcgccgccatcgatcatgtgaagatcatccgcatccacagccgcgttccgatcgccgatcccgaacgtatcaatcccgagatgatcgcggcgctgcgggtggaaggggcaaccacctggattgcgatccacgccaatcatccgcgcgaattcggtgccaatgcccgcgcggcctgcgcacgcctcgccgacgccggcattccattggtgagccagtcggtcctgctgcgcggcgtcaacgacgatgcggcgacgctcacggcgctgatgcgcgctttcgtcgagtgccggatcaagccctattatctgcaccatggcgaccttgcgcccggcaccgcgcatttgcgcaccacgatcgaagccgggcaggagctgatgcgggccctgcgcgggcgcgtctccggactttgtcagccggattacgtgctcgacattcccggcggtcacggcaaggcgccgatcggcccgacctatttgtcgcagccggtttcccgcgaacgtgaagatggcgcggaacggcggtaccgtatcgtcgattattgcggtgacgttcattcctacccgccgcaatcctgaggcggcaatgggcggggccgcggcatcgaaaatgctgtgatgttcggcttctttgcggtgctggtcgccgcaggaatctggctccttggcaccatggccgatataccgaagggacaggattgcgcagcgcaagggcggcgcaactgtgctaccgtcgaggtgccggaacgggcgcgatagggttgagaagcggagacgcgagatgcggaagacagttttgttgatggctctgatgacggttggcctcggaacgccccaactgggaacgtcgctggcctgggcgcagcagcagggcggatcgtcctccatgcagaaaaattcgggggtgccggacgcgccggtcggacatcgtcagccgcgccgcggcgacgttggcaacgagaagaacatcagcgatccgaacagccaggccaacaaggaagacgcggcgctcgacaagaagatcaagagcatctgccgcggctgctaaaccacggaagagaccggcggagcgcggtatccgccccgccggcaacgctcaatccgtccggccgcgtcaggccgaacgctcttgcaagccgtcacgccgcacgccgcgccgtgcgtcgacggcatcggccagctgcttcaagacgtcagccgtcgtcgcgaggtcgatgcagccgtcggtgatgctctggccgtaggtcagtggcttgcccggcacgacgtcctggcgtcccgcgacaaggttgctctcgatcatcacgccgatgatgcgctgttcgcctgccgcgacctgctttgcgatgtcggcggcaaccagcggctggttctccggcttcttgctgctgttggcgtggctggtgtcgatcatcagccgcgccgcgaccccggcgcggccgagctcggttgcggcggcatcgacgctcgcggcatcatagttcggcacccggccgccgcgcaggatgacgtggcagtcctcgttgccgctggtggcggcgatcgccgagcggccgcccttggtgaccgccatgaagtggtgcgggtgcgacgccgacttcaccgcatccgccgcgatccgcacgccaccgtcggtgctgttcttgaagccgaccgggcacgacaggccggacgccagctcgcgatggatctggctctcggtggtgcgggcgccgatcgcggcccaggagaccagatcggcgatgtattgcggcgttgtcatgtcgaggaattcggtgccggccggcaggccgagattgttcaccgccgacagcacgttgcgggcgagccgcaggcccttgttgatgtcgaagctgttgtcgaggtcgggatcgttgatcagccccttccagccgacggtggtgcgcggcttctcgaaatagacccgcatcacgatctcgaggcggtcggcgagctgttcgcgcaggccggcgaggcgctcggcataatcgacggccgccgcgggatcgtggatggagcaggggccgacgacgaccagcaggcggtcatcgctgccgttgaggatcgcgtggatggcattgcgggcgcccatcacgacgcgtgtcgccgtcagggtgcgcgggacctcccgcatcacctcttcaggcgtactcagttctttcaattccttgatgcgaagatcgtctgtcgtactcaacacggctggctcctttggagttttgggacctgccggcaacaaaaaagccgccaggtctggcggcttgttttggacgtctgctgcaattcttcagattgagcgcgatcctcctgccgccagcgagctgtcgtagctaaagtaccaaaaatagctggtggcgacggtgatcatgggcggctctatagcgcagggatttggggctgtcactaccccaaatcaagacccccggcagttcgccgtcaggtgttgcgcgccgccaacgccatgccgatcagggtcgccccgccgaacatcaggttgagaccgacgaggaggccgatggcccatcccgccgactccggcagccccgcgatgatgaagaaggcgaccagaatatccatcaggcccgcgatcaaaagccacgaccagcgtcccgacagttcgcggcgatgctccagcgcgtacatgatggtggcgatgccctcggcgacgaaataggcgccagtgacgatggtcagcgtcagcacgccctgcatcgggcgcgccagcagcaccatgccggccagcacggcgagcgtggccgagatcagcgaccaccagaagcccggcatgctgcgcgcccagaacgtcacgatcagcccgccgattccggagatcaggaacatccagccgaggaagatggtgacggcgaggctcgcgaatgtgggcacgatcagcgctgcgatgccgaggatcacgagcaggatgccttcgaacaggaaagctttccagtgcgccttgacggcggccttcatctcggatcgcagcttgtcgaggtcgttggacagggtcatcgcggctctcccaatctgcgaacgtaggtatcctaaccctggcccggcgcggacggaaagccttccgaggcggtccgcatccggttgcggccgaagaagtagacggcggtggtcgcgaccaacagcgccagtccgatcaggatcgaggtgaagccgatcgggatcaggatgaaggacgcattgcgctcgggattgacgtaccaatgatgcagcgaggtgagcaggaaggcgaccccggcaaagccggtgccgccgccgatcagcagcagcgcccacatccgtcgcaactggctcagccgctcgcgcgcgacatctgtgcgcggggcatgatgcctgccgaggcggcgcaccaggcggaccgcaaagccgatcgaggagaagccgatcagcacgctggccgtgccgagcagcaggtgtgtggtcgagctgaggtcggggatccgctgcagcgcgagcagcgggaagtcgaacgccgcatgcagcaggaccggtgcgaccagcaccagcgcccaattggtgatgcgcgcccagtcgcggtgaccgcggtaggcgccgagcgcgccgccggagcgcgcgatcgcaaggtaggcgccggcgatgatgccgagtgcgccgtggaacggtacggtgagcacgctgcgcaacgccgcgagcgcgcgccacatgtccttgtgctggaccagataggcgaggttttcataggcggcgaagccgaggccggcagccgcgccgtacaccacggtatccatcgggtcggcaaaggcgcggcgccgcgtcgagatggcgacgatgacgaaaaccttgacgatctcctccggcgccgcgacgccgaacagggcgcgcaccgcctgcgtcgcccagggattgtcgggaatagcgagcagcgcattgaagggaatgcgtgccaggccgagcagcgagatgctggccgcgccgagcacgaaggcgagccatacctgcaccggcggtccggggcgctcgtcagcggcgatcaccagccacagcaccagcagtgctggtgcgatggcggcggcgccgatcacagtcggaagcgactcaagcaacaacatgagccgaacgggccccttcaatggcaccacagcggtgcgctccgaagaaatggcagcaagttcagcggattgcaaatggacgattggaggaatcggttcggctggcgccgttctcgtgtccaatatgtcacggtgcctgcgaaagcgcggccgaaacgcgtcgatcagatcaagaaagagcggtcgccggaaggtgcctgacggcggaaggggaccgggcaccgcgccacgactgcagcaccgatccgccgattgcggcgaatttgcacggcaggtggcgtcggcctctgccgggcaaaacgaagtgctacgctgtcgcggcgcgctcagggcgcttcgcaaggccttcgcaagtttcgggcactgcgtgcccttcgttgagttatagtacagcggggagtgactgatccggtaaaagccagagatgccttcgattgattctgctgtgatcgttcttgccgcgagcgctctgtttgcggcctttgtaaacggtgcgctgggttacgggttctcgtcgctgacggtgccggtcgcactcgtcttctacaccaatcgcgtcctcaatcccgcgattgtcatcgtcgaagtcgtcgtcaatctatgcgtcctttgcatcaacctgaaaggcgttccggcggtgtggcggcgcatcctgccgatcctcatcggcatgctgcccggcatcgcagtcggcgcctttgcgctgacgtcgctgcagcccagctggatcaaattcgccacctattcgatcattctgccgctgatcctgctgcaggccgccggctggcggaggccgatccagtcgaaatggctggtcggcttgccttttggaacgatgctgggcgtcctgtactcggtcacgaccatttccgggccgccgctggcgatcctcttcaacaaccagggcctcgtcaaagatgaatttcgggccggcctcgcgctggtccgggtgacggagtccggcctgaccgcgatcgcgtactacaacctcggtctgttcatcgaagagagccggagcatcttgttcgtgctcgttccttgcgtcgtcgtcggcataccgctcggcgcctttctgatccggcggctggatgccgaaacgtttcgccggatctgcatgagttttgatgcgtgggtcgtggggtttggcctgtcacgcgtgttgatcgaagtgaagctgatggaaagcccgtgggcctacggcgtcatggtcgccacgatcctgatcgacgtctgcttgctgtacgtcttcttcacggcgaggcgagggacggtacaaagttcgcacgcgctggcctcgctgagatccggcaaccggggcggttcgacctgatcgcggcgtcgcgatgaagcggctagccggccagcagccgccggcaggtgtcgacgaacacctcggcgccggtgacgatgtcggcgtcgtcggtgttctcgctccagtgatggctgatgccaccgatcgacggcacgaacagcatcgccgccggcatgagggtggcgaggacctgggcatcatggccagcgccgctcggcatgcggatggatttgccgccggcgcaggccgcgctcgcggcctcgatcgcgtcctggaaagcgggtgtcatcatcgcgggcaccccggtgcggatgcgctcgaccttgacgctgcaacggccctgcgccgtcgcctcgtcggccatccggtgcaactgcgcctcgagacgcgcgatcacctccggattgtcgtcgcggatctggaacagcatctcggcgccgcccgggatgatgctcggtgcgccggggtcgagcgtgatgcgtccggtggtccacaccgtgcgcggtccgcacagggcagggaagctgtcgtcgatcgcgacgcagaaccgcgccagtgccaggcccgcatccttgcgaacggccatccgtgtggtgccggcatggttctgctcgccgatgaagctgatgcgatattgccagatgcctacgatcgaggtgacgacgccgatcttgagccggctcgcttccagcgtgtcgccttgctcgatatgtgcctcgagatagccgatatggcggccggcttcggcggtgaggcgcgggcgcccggcaaagccggcgtcgcgcagcgcctcacgcatggtgcggccgctggagcgatcgcgcgctgcatcgatatcggcttcggtcacggcgcctgcgtaggagcggctgccgaggaaactgccgaaatgaccttcctcgtcgcaccatgcggcgacttcgaccgcgccgttgatgccgggatcgccgttgatgacgcgcgcggcttccagcgcatagaccacgccgagcggcccatcgagccagcctgcatggttctggctttcgagatgcgagcccgctagcagcttcggccccgctttcgcactgctgccgagcacgttgccgatgccatcgatcgtggcgacaagatcagcatcgggcaggcgggacgcgagccagccgagcgagcgcagatgcggctccgagaatgtcggcttgtgcacgccggtcttgtaggcaccgatcgcgcgcagcgcattgagatcggcgagcacgcgcttgccgtcgaagcgaccgttgatgcctggcatggatggactccggatttgcgtcttttgatttgcgtctggattttgcggcttggcgccgcaatcccgtcttgatgccgtcgtggttgaatgcgacggaacaatcagggtgaacgatttcttagcggttctgctcttaggtcgcggtactggtgtcgcggtacgaatagcgtgtgagtgtgatcatgtctgcattccggaactgggctcgcaaggccgctgtgctgtttcttccgatcgcgctcggcgcctgcgcgcaatattcgcagcaatacagcatgaccaccccgccgtccggaaccgggccattggcctgggacggcgccggacaggatcccaacgccccgcagccgcgccgccatgcgcgcaatgtgtcaccggcggcggagacgcaattgtcggatgcagatgccgacgaccggctggcgcgcaagctcgtgatctgcagcacctgcatcaagcaggcgccggcggtggcggcggcgcagcagaccaatcgtcaggacgtcgccagcaatcactagccgccggcgcggtgtgtgttgccgccggcctgaggccttagttaggccacgatgtcggccgatgcgcacccccatgtcgttccgaagattcattgttcccgccgtcgtcgtcgcgctagccaccgtcatcctgattcatgtgggcggttcgcgggcccacgcgcatgtgccgtcgcattgcggcttctggacctcgatcgaggccggattgtcttgcagatgacctcctagaggtgatccggcggcaatccgggaaaagcgttctggacgcttgcccggccggccaatcgccactatacgttcgcccgtcgcggccgttcgccggtagcggccagtccggcctatctcacgtttaacgtattgatttgccgggagttttgctcccttcgtctatcggttaggacgccaccctttcacggtggagagagcggttcgattccgctagggagcgccagcttgatgtaagctgttgttattcctgcaaccccttgctaggcaacgatttcttggccgcctctggcacagcgaggtggtacagaatggtagttctacgcatgtcccgaccgtggaagcatccagacagcgatgtctactacttccgcaaggccgttcccgacgatttgcgcgaggaaatcggctgggaagtgaagcgctccctcaagaccaaggacccggctgaggcgcgccgcaggcacaccgaggaagcagaccgcgttcagcaagagtgggccgagctgcgccggcgcaaggccgcccctctgctcgacagtctcgaccccgccaccatcaagcgcgctggcgacgcctgggtatcttccgcgagggcttaaggctcaacgcgagcagcttcagcttgccgccgaaaaccgcaagcgccacgacgctccatcgatctcgccatacattgctcccgcagtcctggatccgttcgctgacgacatcgaccccgacgagcttgaagatcaagcgctcgcagaaggcaggacagccggcgagcttgaaggacacgcagcgcgccggtatagagcacgcgaaggccaccaacgagaaagcctagaggggacggaagccgacctttgatcgcgctcagttcaccgcagtgatggatatggccgcgcagggcatcaacgttgccgagattggcagggctagcgggctgcagcggatggctgtgtcccggatcaagaccgaccccgcaagcgcggagcgcatgttgcagacttggggcgagtgagggccgccgcgtaaatctaagcccgtgagagtgcccctgtctaagttttttcggcacctctagctgcacgctgggtgcacgttcggttgcgcgctagtctgccggctgttgaaggggaaagggcgagtgatggtggttcggtacactgatgagaggcaggacaaactaagcgactttttgggggaaacatacgatcaagccctcgcccaggcggagcgacccgagtccaccgaacaaacaacggcggtggtgcgtatgatgcacgggcagggcgtcgcgctagagcacgtcatcagcagactccgcgacgtggctgacatgatcgatgagacacaagcgaaggccgcgcggcagactgcgcaagagatcagacggcttggcactatcgtggcaatgagcagtttcctcatcattttggtgttggtgtcccaacgctggcactaagtgcacgttcaagtgcggcccgagctgcaatgccaaattggaggcgcaaggggaatgctcgactagctcaaagcgtgctctacaacccacgtatctaggtcggacgcttggcaggccatcgcggtgtagactgcaatctgcgcaggcgaagtgacgatacggcactttttcgcgaaggcaatggaagccgtgaaaagctcgacgctgtcgtcgtaagctcctcgtgggaagccagagtttaatttgtccgcgatgcgggcggcgccaacatagtatgctcgtttcattattatccgagtggaaacaaaggacttcaacgcttccgcttcatagggataaagctcctcaaactccttccaagcacacgccggcaccccaatgagaccgctttggagatggctgagaaggacggtcttcaggttgcccgacgcagcagcaataccgtgcagtccatcggtatcggcgatgcacaagtattccgcatcgccttcactcatcatcaagctccagcgtgtggagctggtcaggcgtgagagacttaacgtagtcgaagtactgcctctgatacttcggctttaaacccgttgagcgataaaggtttacctcgctaatgaggccttggcgaagcaacgagtcgaatgcgcgagcgaaagagaagccgtacttcgacagcttgattttttcttgtgggggcggttcgcctcccggtggtccgccgcgcttctcgaagtaatccgggttgcggccatgcaccagcgccttccatcggtcgtagctaccggctgtgtaaatgccgagctgctctagtctgaagacggtagcctcttggcttatcttcaatcgacgggaggcccatttgacgtcttcgtcgtcaggctgagttgtggtcggccccttcaggagtgcctgaacatacaatttgggtacgaggaagcttcctgcgaagcgattgcatatccgctcgactgagttccttgtgatgaacgggtcggagatgccggtcgaccgcatgaggacatgcgcaagttcgtggatgagagtgaaaagacgtcgccccttcgtctgctttcgggtgttgaccacgatcactggatggcgagggtgcgagagacaaaaaccgctaccatcctgttcaggaaagctgtcgtggaggacaaaaatcccggcgtcttcaatcttctttctgcagacaagatagaacgcgtttgcgtcctttgcgtcgagctgatcttgaagcgaaatgctcagtagctcgcgcgccgccagagcgaacgcgtcgacctcggcgttgccctttgctgagaactgaggcaggtcaagtttcacccagaactgttcgagagcgcgctggacaccttcagcaaattgaatggattggaccgtttctttcatcttggccgctggcttcgcggtcgaggagcgaaagtcaggcaatacatcatggagcgcgggtgctttctccatgaagaaagagtagggcggtaccccaagctcctttgcaatgcgattgaggatgccttgtcccggctcaggttctcggtcaagctcgcgagaaagttcagcgggtgcaatttgaaggcgatcagagagttgctcggtactaagaaaccgagtgctcaaaatctttgaaagaatatttggattgtaagccacgaaaagtccttggggagtcggacttatgaagtatggggatttttctagcgtcgtgcaactaggggtaggcctccatgtagggactgtcgttctccagctttacggggacatcggccttcagcctctaaaccgcgccttggctagactgcgaagcctgttcctggctccagagcacgagcgtcccccaaaagagtttgaggatgagcttttgggtattgagggcaggtacgaaatcttcagaattcgcctgtcgagggagttcgagaagtacgttctaggaaactcgcttgttgcagctgcgctggcgatcatactgaccgtcattgcgttcaaggccgatgacccaataaccgagggttgggagatggtccccatgttgctcgttggactttcgctcctgcctgcaccggtcagcctcggggtgctttggttcgacgcggatcgccaagtaaagccgctccgacaagaggcggatgcattggaaagaagggcgcagggcgagttcccaaaagcgtagtaagccaccgcattcagccgcgcacctctgtccacttcaggaacacgttaagggcgccccttgccgagggtacagtgaattgggtgaccaagaaattctactgtgaaatcaagggtaggtagcgttcctcacgccctccgctagggagcgccagcctcgttgcatctcaacgtgacgctgtgcgtgtccggcgccgattgacctttcgcccccgattgacgattgccgatgctgcgaccgcggtgaagcaacgcaatctggtcatttatggcggatggttccggccatctcaccgcctccacaggcaagcggcggggcggtgctcgtcatgtctcccatcggagtctaagccgctgccgttctcgacgaagtaccaggggcttggttcatcgctcccggaggtcgggattcgacctcctcaaagggtaccaattcccgatccttcaggctgccagccggccgtggccgagagggcgcgagcatgggcgagcaaggctctcgccgtcgcgcccttcagatcgtcgtcgaggataccgatcggtcccatcatcgtgatcgccgcgatcataaatccggtctgatcgaagatcggtgccgacaaagatgtgaagttcggcagcagcgcgtcgcggcaccggctgatgccgtcgtgccggatcgttgcgaccatgtcttccacttcggccttggttgccggcgcgtcgtcgatcctggcgtgccgtgagcgctcttccttgagctcctggtcgagcatctgctccgtgatggagcgcggcagatgcgcgaggaagttgcggccgagcgccgagcgcagcaggctgagcacactgccgacgcgcagttcgatgatcggccggctggcgccgccttcgacgcgatagatgatggtgggtccgcggttgccccagacgccgagaaagaccgtgtggccgatggtcgtcgccagttcggtcatcgcggggcgggcggcggtgaagacatcgaattgctcgatcgcggccatgccgagcttcagcgcgtagggtccgagcgcatagcagccggtgtcggtttcctgccggacgatgcctacggcttgaaagcttacgagatagtagtgggcattggccgccgacattccggtgttggcggcgatcatcttgagcggaaccggacgcagctcggtgcgcagataatcaaggatccggaagccgatttcgatcgactggatgccgcgccgcccggtgcgttccgccttggccgctccttcagattgggaccttgctgccgcaggcagcggctcaggctgcggggctccgcgcgtccttttcactgaaagtccttgtgaatcatagtgttaatggattcgctcctgagccgcattattgggcgcgtcccgccggacattcaagcttgccatatttgataatatcatatctatctgactaaataagaaatgtcgcttcgaggctgctgtcagagcgggggctcgcgggccgtaaaacaggggaatggcgatggatgcagtaacggcgacggcagcagtcgatcacgatctgacgcgcagcgaggagcggcaggtcgtcctggcctcgacgctgggcacggtgttcgagtggtacgacttcttcatctacggctcgctggccgtgttcatgagctcggtgctgttcccgccggacaatccgacggctgccgtgcttgcgtcgctcggcgcgcttgccgccggattcgtcatccgcccgatcggcgcggtggtgttcggacgcatcggcgacctggtgggccgcaaatatacgttcctcatcaccatcgtgatgatgggcggcagcacggcgctgatcggcttcctgccgacctatgcgacggtggggcacgcggcatggattgcgctggtggtgctgcgcctgatccagggtcttgcggtcggcggagagtatggcggggctgtcgtctatgtcgccgagcattcgcgtcccaaccggcgcgggcttctgaccggctggattcaaatcacctcgtcgattggtctggcgctctcgatcgccgtcatcatcggcactcagagcctcatgagcgacgccgacttcaaggcctggggctggcgtgttccgtttatcatctcgatcgtgatgctggcgttctcgatctatgtccgcgccaggctgcacgagtcgccggtgttcgctcgtctcaaggccgagcggcgcctgtccaagaacccgatccgcgacacgttcggccgctggtcgagcctgcgtctcgtactgatcgcgttgttcggtgcaaccgccggcatgggctcgacctacttcacggggcagttctacgtgatgatcttcatgcagcaggtggcgaagatcgatctgcagacctcatacattttgatggcagttggtctcatcatcggcgcgccagccttcatattcttcggctggctgtccgaccggatcggccgcaagtggctgatgatagcgggcctgttgctctcggcactgtgctatcggccgatgtttgcctcgcttctggaagcgggcaatccgcaactcgtggccgcaacccggactgcgcccgtcaaggtgcatgcggacagttccagcgaagcctgcaggttcggtcttgcggccgcattgctgagcacccacagcgatcacggcaagccctgcgttcaggccaagaagctgctgatctcgggcggtatcaacttcagctacgctgcgccgatcggcggccaggctgtggcgatcacggtgaaggggacgacgattcccggctacgacccggcagcctatcgcaaagctctggtggacgtggggtacccggttaaggccgatccggccaaggtatcgtccggtcacatcatcttcctgctggtggtcatgaccatcatcgtggcgatgatctacgggccggtcgcctcgttcctggtcgaggtcttccctgcgaacatccggtacacggcgctctcgtttccgtaccacatcggtgcgggtatcttcggcggtttcctgccgttcttcgcgacctacctgtcgctggcggtcggcgatgtgttcgcaggactttggtatccggtcgtcatctgcgccgcagtcgcggtgatcggttcgatcgtgctgccgaaccggccgaagctcgagaccgatgactaaacccacgacactattcacgggcagcccgagagcagcccgtgtttccttgcatcgtcatattccggatcggcgtcatgacttcccgaaaaatcagcagctacaaggcggccgtcattcaggcgggggcatttccgaacgacaccctcgcgtcagctcggaaggccgcaagcctgatcgagcaagcgtgcagggccggcgcgcggctgacggtttttcccgaggcctttctcggcggctatccgaaaggtagttcgttcggtgcgccggtcggtctgcgcaagcaggaagggcgcgaagccttccggctgtattgggaccaggcgattgatctcgacggtcccgaggtcgagacgattgcggcggcaactgcggccactggggtcttcgcagtcatcggctgcatcgagcgcgagcatggcacgctgtactgcaccgtgctgttcttcgatggcgcgaacggcctggtcggcaagcaccgcaagctgatgccgaccgccggcgagcggctgatctggggctttggcgatggctccaccatgccggctttcaagaccgcgctgggcatcattggcgccgtgatctgttgggaaaactacatgccgatgctgcgcatgcacatgtacagccagggcgtcagcatttactgcgcgcccacggctgacgatcgtgacacctggttgccgacgatgcagcacgttgcgcttgagggccgctgctttgtgctgaccgcctgccagtacctcaagcgcggcgcatttcccgagaactacgaatgtgcgctcagcgacgatcccgagaccgtgctgatgcgcggcggcagcgccatcatcgacccgcttggcaaggtgctggcggggccgcacttcgacggcgaaaccattctctacgccgacgtcgatctcgacgacgtagcgcgcggcaaatacgacttcgatgcgaccggtcattattcgcgccccgacgtattccagctcatcgtcgacgatcggccgaaggccgcggtgtcgacggtcagcagtgcgcagacaaggacttgaggccaggatgttcttcgatatgggccagcttgctgcggacatccgctacaagatccttactgcgaccgttaccccgcgaccgatcgcatgggtgacgacacggtccgctgacggtgtcgtcaacgcggcgccgttcagtttcttcaacgtgctggggcacgagccgccgacggttgcgctcggtttgcttcgccatcccgagaagggattgaaggacaccgccgagaacatcctcgcgaccggcgagttcgtcgcgcatctggtgccgcggggcatggccgatgccatgaatgccacctgtgtcgatgcgccgcgcgaggtcgatgagctcgcgctcgccggcttgcggacggtgccctcgcagatggtttcgccgccacgcatcgccgacagcccggtggcgttcgaatgccgcagcctctcgactcatgagacgggtccgcggcaggttgccgtgatcggcgaggtcgtatgcgcccacgtctcggacgagttcgtcctcgatgccggcaagggctacatcgacacgcttgccctcgatctcatcgcccgcatgcatgggagcgggtggtatgcgcgtccaaccaacctgttccagctggagcggccggcgccgatcggccgaggggaccatggtcggcccgggccgaaatgagttagtcggggcgaagggcgtgtgcacaatttccggattatcaaataatgctcctgctttgcccgacgtgtcacgtcgcgtcgtcgagtgccggcagccggcggctcctttgcatggggttgttttcgatattttggcagtgcgtgcgcgatgccgtcagcgccaaataggaaatccagtaaactcaatgcattatcccgcgcgaccaagccctgccgcgccgctgcggggatgtgcacaatctccgggatcgcgacagtccgctaatatctcgtaaccctttgtaaagcgaccggcgatacccgtgatcccggggatgatgtgatggctctagggtccaagaagcgcgaaacgcgcaaatcgctgcgtcagtccggctggatcacgctcgacggcggattcgccgcgcggccgtgcgtggtcgaggacatttcctcgtcgggcgcaaaaatcacggtccaggacaacaactcgctgccggccaagctgcggctggcgttttcgcgcgacgcccgcaccgggcgcgcctgcgaggtggtctggcgcgagggcaagacgttcggcgtcaaattcgtgcgctagcctctttttgctgcgcgcgatacaaggggcggatgcgcaagacctgttttgccgtcatcgccgtcctgctccccgccaccgcgttcgcgcaaaccggcgatcgccgcaatttccagacgccacccgatgccggcaagatgttgccgtcaaaatccgcgacgcggagcaatccctgcgcgtcgtacggagcgggcttcgtcaaggtcgaaggcaccgacacctgcgtgaagctcggcggcggcatcagtgtcggtgcggggatgtccagcggacgttgaagcatgatccggaaaagtgcgaagcggttttccgaaaagatcatgctctaacgccttgccgctcaggacatcggcggtgcgacgatgcgcacgaaggccggccgctgcgcgatctcgccgaaccagcgttcgagatggggcagcttcggcttggtgacaccctcgacgccgaaccagcgccgcgcgaaggcgccgagcgcgatgtcggcgatggtgaactgttcgccctcgatgaagcgacggctcgccagctgcgcctcggcaacgcgccacaccacgcccccggcgtcggcgtccttctggatctgaaccatgtcgcgctgctccggcggcgtgcgcaccagcccccagaacaccgggcggtcgaccggctgcagcgtcgacagtgtccagtcgagccagcggtcgacggcagcgcgcgccttcggcgcctgaggatagaccggcgagctctggccgtaggccatgcagagatagcgcatcaccgaattggattcccacagcacatagtcgccgtcgaccagcgtcgggatgcggccgttcggattcatcccgagatagtcgggctgatcgttcttgccgaactgcatgccggcgtcgatgcgctgatagggcaggtcgagctcggcgagacaccagagcaccttctgcacattgaccgaattggcccggccccagatcgtcagttgcggcttgctgtccatcacgcgattcttcccgctgtcgtgctttgcggcgttcttagccgaaacgccgtggaaaagcgcggtgtgaattgtatcgagagcaaaaaagaaggccccgccgcattgcggcggagcctcgtcgaatcgcacgcgtcaaaacgcagtcagtgaccgaacagcaaccacagcacgatgatcaccgggatcggcacacccaacagccaaagcaaaattccttttcccatctcgttgcctcctcgggttcaatgcatgaggaggcaacttcaacggttgcgaggggttcctaacgatcgctccgcgcctgaccgaccgcgaaagacggacaggaacttgcgcgtgggcgcggcgtttactttcgcgtcttaccagtgaccggtgttgggcatcgaggcccacggttcggccggcggcttcggatcacccttctgcaggatctcgatcgagtgcaggtcgggcgaacgcacgaacgccatgttgccgtcgcgcggcgggcgattgatggtgacgcccatcttcatcagcttctcgcaggtcgcgtagatgtcgtcgacctcgtaggcgagatgaccgaaatggcggtcctcgccgtatttctcctcgtcccaattataggtcagctcgaccagcggcgcgccgcggctctgcggcagcgacttgagcagatggaggtcttcttccgcgcagagaaacaccagcgtgaagcggcccttgtcattgtcgatgcggcgcacttccttcagcccgagcgcgtcctgatagaatttcattgcgacgtcgagattgcggacgcgcagcatggtgtgcagatagcgcattttttcctcctggcagattcagagagtcttgcagagatgcttggcgggatggtccgggagggaaaatagcagcaaatcgcatcaaggggcagctctaacctgcggatctgccctgcgggcgttcgcgctttcccgccactcattcgcgattgtgtgaaggccttatccctaggtcagcgtcggccggtgggccttaccgagcctcggcgcgctgagcgatgttccggatcacgcaggcgatgaaccagatgacgagagcgaacagcagtccggcgtacaggccgaagaaggggcggtaggtgttgccgctcagatatcgcgcgatctcggcgaactgaaagaatgcgatgctgccgaaccagatcagccgcaccaaccatttccacatgatcggcgcgagatcggctgaccagtggtcttctgacatgcgctgcccctgttgcgacaccttgctagcactcaagtggttgccgcccgattggcgcggtagctaaagctttatgcgccgccggcatcgccgcaagcatatgccgcaagcgatacgagaaagccccgcccgggaaaattccggaacggggctttcgtggtcgagccttggaggcactcgcttctatcccatcgaatggccacgactgccaatcaaggacgcgcgaggttggacatcctctagaaagcaaaaaccccgcgagcgggctcgcggggtctgatgccgaccggccttggggtgatcatgccggcaacgggacacccaacggtgctcgtggcgaaaggttccggcatccgaaaatagaaagccccgcaggctggatgcggggctttcccagttgacggactggggatctctcagggcgtgagccgtcaactgttggggaccaaacttaaggttgaatttgtaaaatgcaacagcgccgcgtagacggaatatcctcgtcccacagcgctgcgccaaacgctgggccctgaaatcccccagcgcaattgtgtcttcgcacggcgcgaaaggttcaaaggaaagaccgggcgagcggacgtcgttgcccgcttgcgacctcacaccttgatgtcgagcatggcctcgacggcgtcgcggtcggccttgttcttggccgcgaagacgtcaagcacatcggcgctgatgatacgcggctgctccttcgccgtctgatcgacgacgagctgcaccctggcgtgtgtcacttcggcaggtacggggtaaatgagcatggctcgctccctccggcggtcgaaccttgtcagggctttcttaacggattcttgacgtccggttccgcgctttcggcccgaatcggcggccggacggtatcggcgtgctcgtgcgccgcccggcttggcgtcatactgcggactttcgcgaccagacgacgcgatcggtgcggaacgggccctattcgatccatatccatatgaccgacggcgtgcgtggccgtgatagcggcatcctgaacctgcgggacggtcttctgatcggcggggggccgtatttctggtcaatcggtccctacagggccggcgagggcacctggaagggacacctcaggaccaaccagcattcgacgttttctgatccgttcacccggctgctgttcgccgggcaggaggtgacgagcggcttctccggcactttcagcggcgaccgggcagaggtgttcgggccggtgccggttggaatccgcagcctgagcttccaggcgaccccgaagcacctggcggacgtttgatcgggctggctgtggacgagtgcgcagcaagagccggggtccgttgaggaaacgggccctgcgcccctgtgaatttgctgcggacaagcgtgggatatgttgtggattccacggcaggccggcgctgcagggcatatcgcccgcggcgccgtatcggaccaccgctaaccctaccgagttaggttaagagtggcatggcgttgccaccacctgcgattgcagttgagatggctgcaggtgacagccatgatgccatcgttccatagcgctgatcgaccgacccaccggcgcgtgatgatggtgggcttgctcttctgttccgtctttgtggtgatcagcttctggcttaggccgcagcccgagagcggcaaggtgctcgcgaaggcggaccggctcgtccggacggcgggagaggcgcgcaaggcaaattgaggctgccaacggagaggtccggcggtcagtctggcagcttcccgttcggatgcttgtgatacatcgcaatgccgatgaagccggcaaaggccatcacgttcagcagcagttccatccacgccggcatcgatgccaacctcgctcacatcagagctaatcactgaggttgtgtttttgttccggcgctaaccgatggtagctttgcgctatcgcatggctggggtaccggaacagacttttgcagcaaccatccccgtccggccgcgttggtgcacatcaccacgtgaggaggttgcgcatgaaaaagacattggcagttctggcgaccgttgcgacggttggcgcaacgatggtcaccgcgccggcgcaggcgcgcggcatcggtcccggcctggctttcggtctggccgccggtgcactcgcggcaggcgcggccggcgcgtactacggcccacgctattatgggcccggctacggttattacggcccgcgttacggttactacgacgacggttacgcctactatcgcccgtattaccggcaccactactatcgccattattggtaacggcggcgagcccggagcacatcgctccgggctttctcaattgcgcgtcacgacgtgatcgcgggcgaacgatcgtatcgtcgcggtggtcggcgcggcatcaggcgctcctgcgctgaaatccactccagacattgccgagcgtgttgtcgtaatactcctggcggtcgcgctcgaacctctgctgcgtcgccctgaagctggcaacgcgtgcgacgatctcctcgcgctcgcgcgcggcactgtcttcccgatcggtcattgcccatcctcgtcgtattggtcctatcccacgcgcattggcatcattgaattgggcgtcaatgcggagcaggcagtgcaggaatgtgatgatgctggggcggaagcgaccgcgccggtgccatcgccctcgagctcgcaatcggtcaagccgtgctataatcgcggccgccaaccggaatatttccagtgatcgcaaaagactcgattgcaaaagacttgcgcagcggcgtcgagcggcttggcgacatgatcgccgaggcatcgtcgatcgtccccttcaccggtgcgggtatctccaccgagtgcggcattccagacttccgctcgcccggcgggctgtggacgcgcaaccggccgatcccgttcgacgagttcgtcgccagtcaggaggcgcgcgacgagtcatggcggcgccgctttgcgatggagccgacatttgcggcagccaagcccgggcgcgggcatcgtgcgctcgcctcgctgtaccgggcaggcaagattcccggcatcatcacccagaacatcgacaatctgcaccaggcgtcgggcttcaaggccgatgacgtcatcgagctgcacggcaacaccacctacgcccgctgcatcggttgcggcaaagcctacgagctctcgtgggtgaaactgcacttcgacaagactggcgctgcacccgactgctccgagtgcggcgatccggtgaagaccgcgacgatctcgttcggacagtcgatgccggaggatgcgatgcgccgcgcggcggaactcgccagggattgcgacctgttgctggcgatcgggtcgtcgctggtggtgtggcccgccgcgggttttccgatgatggccaaggagagcggcgctcggctcgtgatcatcaacaacgagccgaccgatcaggacgacatcgccgacctggtgatccgccacgacatcggcgacacgcttggtcctttcgtaggcaattgatgcccgattgattcgcggctgtgcaagcctgttcatagttcccgatagaatcgttttttagctatgccccgcaagcgggagtgttatcttttggttgagagattcgcgcagcgtccaaacgagttggtgatggagagcagcgtgtacagggtgcgccgcaatgtcggcgctccgcatttgatgtgtggggtccggggtcatggggtcggacggatttgagtccaagaagctcggcggaccgccgatcggcggagttgggcaaagcaggattggacagggcgagttcggcagcgcgccgcgcgatccggcgatggatgccttctccggtctcggcgatgtggcggccaacctcgtcgaagtctccggcgtcatcaaatggttcgacgcttcgaagggatacggcttcatcgtccctgacaatggctggccggacatcctgctgcatgtgacggtgctccggcgcgacggccatcagaccgcctacgagggcgcgcgcctcgtcgtcgaatgcgtgcagcgtgcgaagggctatcaggccttccgcatcgtctcgatggacgagtcgaccgcgattcatccggcgcagatgctgccgccgcggacccacgtcacggtgaccgcgaccagcgggctcgagcgcgcgcaggtcaagtggttcaaccggctgcgcggcttcggcttcgtgacctgcggcgagggcacgccggacatcttcgtgcacatggaaacgctgcgccgcttcggcatgaccgagctgcgtcccggccagtatgtgctggtgcggttcgggcccggctccaagggcatgatggccgccgagatccatccggagaccggcccgtcggcgctgtcgtcgcactgagcatgatccggacccggagggccgcgttagcgcaaagtgcgaagcggttttccgaacagatcatgctcaaacaagacctccggttgtcgtcctgacggaaacgtgaggcgccggcgagcctccagggctctggcatttgccgcaatcatcgggttagggtccgccggaaaaatcttccccggtgtgagtatttgtcgatgaatttcgatcgcatggttgggcggcttcgcccgtggctggtggcctccctcgtcatgatgttcggcgcgctggcgccggccgcgcaggctgccagcgtccagccgctcgaaatcgtcaccaaatcaggggtgcacgtcttctccgtcgaaatggcgaccaccgagcaggagaaggagaccggcctgatgtaccggaaggaactcgcggacggcaaaggcatgctgttcgacttcactccggaacaggaagtgtcgatgtggatgaagaacacctacatctcgctcgacatgatcttcatccgggccgacgggcgcatcctgcggatcgccgagaataccgagccgatgtcgaccaagatcatttcgtcgcgcgggctcgccaggggcgtcctcgaggtgattgccggcacggcacagaaatacggcatccagcccggcgaccgggtcggccatccgctgtttgccggccactaaagcgttttcaagcgaggtggataccggttcgcgtgaagaaaacgcgtcaaaacaagaatccagagccccgttccgattcaatcggaacggaataggctcaaggttcttcgaggcgattccggcgcagaaatggctgccaatttcgccgcgggaagcccggcaccggtgccttgctggcgctggctgaagcgtgtatccacggggcttctcggaaatgtcggggtatagcgcagcctggtagcgcggcagttttgggtactgcaggtcgttggttcgaatccagctgccccgaccatcccatcccatcgcatagcttcgtcgagagaaccaaccgggcgggccgtagcccggtcgcgcggaactgcaacaaacttcgatcgagatcgtcttgcctgacgcaacaacgccgcctggacggaatatgttcgtccagacggcgccgtcgaatactgggccctgaaatccccagtgcccatgggtcgccccggcggcaaataggttcaacattgcgccgccttgccgcagcccagccctgacgtcgtcagccgcgatcccgagcggatgtggcttgccgatcacgcgcgcgggctggcaggttagtcccgcctgacaagaccaatccgtgaggaggcaccatggcgcgcagactgatcgatatctccgttcccctgcagaacgacgttccggccgatccgcccggcaaccacccgaccatccagtacatcgaccatcagcaggggctgccgcgcatgctgcagttcttcgatggattgaaggcttcggatctgccggacggacagggctgggccgtcgagcaggtctcgctctcgacgcacaacggcacgcatctcgatgcgccctggcatttccatccgaccatgaaccgcggcgagcgatcatggaccatcgacgaggtgccgctggaatggtgcttccaaccaggggtgaagctcgacttccggcatctgcctgacggctatgttgcgaccgccggcgacgtcgaggccgagctgaagcgtatcggccattcgctgtcaccgctcgagatcgtcgtcgtcaacaccagcgccggcgcgaagtatggtcagcctgactacgtcaattcgggctgcggcatgggctatgaggcgacgatgtatctgctcgagcgcggcgtgcggctgaccggcatcgacggctggagctgggatgcgccgttcgttttcaccgcgaagaaatatgccgagaccagagacgccagtctgatctgggaaggccacaaggccgggcggcacatcggctactgccacatcgagaagctgcacaatctcgagcagctgccgtcgaccgggttcatggtgtcttgcttcccggtgaagattgagcgtgcctcggcggggtggacgagggcagttgccatcctcgacgattagagcgtgaccgcagcggtttttcgacgggcgatggaaccggtggaaaggcgttcattccggtgggttgttgcggcacggctacagcctgaggcagcagaatctgctttcatgcacgcagtagatgcacttgggtgatcgggccgacggctcggcctcgcgtccgatttctgaaggttctctcccgtgactggagccccggcgtctcccggggctctttcttgcgtgccgcgggttgctgcgtgtcaggtccttgcgtggcgcaggtccgtgcgcggcccaaaagacaatacccaaaaagaaaatcaggtgcgccggaaccgacgcacccgatctatgtcttcaatatcgcttgtgtcggccgcttggttgttaccaccggcaaacgcgaacaccacgcggggtccaccagcaacggggaccgacgtaaccgccgtagtagccatagccacggccatagccccatccgcggccgcgaccccagccgccgcgatagccatagccgcgcccgcgccattgcgcttgcgcagacgatgtggtcgcgccaaccaggatggcagaggtgcttgcgacatagacgaacaacaaagcgactgctgcaaggcaacgagtcaggatattgtagcgtttagtcattctgaagatctccagtcacttccaaacatctgaactgatgctggctgtctcgcttagacgcgcgacaccgacatccggttcgagcatgcctaagacaatattttcactaaggttcttgcgagctttagcgactctattgagaccaacaggtaaggtcaagttacagtcccgcccgcaaaggatgatgtggttgctacactcatcttgtcgttcatccgccgttcattctgttcatcttgcattgcatcgacttcgtgccgatttgatttgtgcatcgcagaagcgatgatttgcgagtcgcgaaaaatgccgtcgagaacttgaagtcgacacgatcatgttctctgagcgtttcagaatcctccctgaagagtgcccatgccgaaacaacacacctacgtccttggtctcaacgcctacgaccatgacgtgagcgcctgcctgctgcgtgacggcgcgatcgcctacgcgatctccaaggagcgcatcacccgcgagaagcacgcctccggcttctacaaggaagtcgtcgactactgcctgtccgccgagggcatcacgctcgacgatgtcgatctcgtggtgcgcaacagctacatccttccggtgcccgagatggaggagcggatgctccaccaggacatgcccggcttcctgccgattgccgagcgcaacgcggccatcaagcatccgctgtttcgttcgaaatccgacaaggtggtgtcgatctcacatcacctcgcgcatgcctacagcgccttcgcggtgtcgcccttcaaggatggcgtcgtgatgatcgtcgacggcgtcggcagctaccaggccgacgcgatggaggcctatccccaggaaggagcctcgccgctcgcccgcgagtccgagagctactacaggttcgacgataccaggctcgaatgcctgaagaaggtcttcatggagccggcgcgcgggttgttgtcggacgagttctacaacatgccgggcttgggtgcgctgtacagccgggtctcgacctatgtgttcggcgactggaacaagtgcggcgagctgatggggcttgcgccctatggccgccacgggcaggtcggcagtctcctcgagatgaaggacggccggctgcacgtgccgttctggggcgacgacaacaagcagcccttcgtgctcgacagcggcagctgggacaagagcccgaccatgcggcactgggaggacatcgcctggcgggtgcaggacgacaccgagaacgtgctgctcgagcgggcgcgctggctgcgcgagagcaccggcgcgaagaacctgtgcatcgccggcggcgtcgcgttgaactgcgtggcgaacgggcggatcgcacgcgaggccggcttcgagaacgtctggatccagcccgccgccggtgacgacggcatcgccatcggctgtgcctattacggctggctggagattctgaaacagcgccgctccttcgtgatggagcacgcctatgtcggccgacgctacagcgacgcggaggtggcggccgcgctgcagggcttcctggtgcgcatccaggtcgatgcgaagcgcagcgacaacatctgccgcgacaccgccaggctgctcgccgagcagcgcgtgatcggctggtttcagggcccgtccgaattcggtccgcgcgcgctcggcaaccgcagcctgatcgccgatccgcgcagggccgagatgaaggacatcctcaacagccgcgtcaagcaccgccaggcgttccggccgttcgcgccgatcgtgctggccgagcgcatgaaggagatcttcgagggcgaggaggactcgccctacatgctgatcgcaaagccggtgcggccggattggcgcgacaggatcccggcgatcgtgcatgtcgacggttcggcgcgggtgcagagcgtgcgggaagaaaccaacccggtgctctatcgcctgctcaaagagttcgaggcgctgaccggcgtgccggtgctgatcaacacttcattcaacgtcaagggcgagccgatcatcgagacgccgcaggatgcggtgagctgcttcctcaccacgggtatcgaccacctcgtgctgcacgacacgctggtgtcgaagaccgccatgcacaaggtcgttacgcccgtgatgacgacgttcggagacgtcgccaccatcgtgtcctcgaccacccaggacggcagccgcggtggaagttaaggcatggcccggaaaaccgcgaagcggttttccgacaaggccatactcagatattgagcgtcaggccgccttggccggtgccgcgggtttcggcgctggcggcttgatcggcttgtcctgccgcttcgaccacgagatgtaataggccacgatcgtcatgatcgcgatgccggagatgctgacgaagatctgcgcgaacagcgagcccgagctcatcgagagctcgaaatgtccgacaaaggacaggaatacgccgacgcagaacaccgcgagcgactgctggccgcagacgatcaggggatcgaacaccttccattccagcgccgaccagtccttcggcacaaagcggatcaccagcaccgtgatcaccacgaagtgcaggaagcgatagggcgcgaggttggtcttgtcgttcggattgaaggtcgaatacagccaatccgggaacatcgcgccgaattccgggaagcggccggccatcgtcatgatcagcgcgaagaccagataggcaatacagaaccacagcgtgtagcgcgagttgatgatgtgcatgttggcgcgcgcgccgcccatcgcgcaccacgagccgaacacgaacagcacctgccaggcgaacggattgaagtaccaggtcccggccgggtaggcgggcaggttccagccgaaatggcgcgagaccagccacagcgcgagcgaggccagcatggtccagttcggctgccgcagcatgaaccacagcaccggcggaaacaggcccatcagtacgatgtagagcggcagcacgtcgagattgaccggcttgaatttcaggaacaggccctggcgcagcgtctcggtggcgttgtcgacgaggccggcgacattgaactcgttgatgatctcggagtcgccgaagcgcagcgccaggtagctgatcgaggcgatgtagatcacgaacaggatgatgtgggcgacatagagctgccagacccgcttggtcaacctcgtggcgccaacgatgaagccgcgctccagcatcatccgggcgtagacgaaggaggcggtgtagccggagatgaagacgaacaggtccgcggcgtcgctgaagccgtagttccgcgtcgtgatccagttcacgatgttgtcggggatgtggtcgaggtagatcgcccagttcgcgatcccgcggaacaggtcgagccggaggtcacgtcctttttcgggcaaatgagcgtggatttccatgggacgccgtttcctcgaggtgatgctgtcgagaagaccgcaccttggcaatctggccgcgccccgagggactgcaaagggaagcctcccggggccagattgtcacagcgcggtagaatgactataccggtccggcgaaggctgcctccgagatcgaggaatcaccgatcagttcgttgaacggtgtctctatactatcccgacggtttccttcaaatcgcttccatgttgcacatcccacggggccgaccatccatgaccgcacgcatttttaagcccgccaaaaacgcgatgcaatcgggacgtgccaagaccaaggcgtggcagctggattatgagccggagcagccgcgcaccgtggagcccctgatgggctggacctcgtcgtcggacatgaagcagcagctcacgctgcacttcgagaccaaggaggaggcggtggcctattgcgagcgcaagggcatcgcctaccaggtgatcgagccgaaggattcggcgcaccgccagatcgcctatgccgacaatttcgccttccggcgctgggagccgtggacccactagggtctacgatcaactcgcggggcttgggacgagggccgctggaatcggcagcggcgcgtccttggagaccccgagcaccggaaaactcctgatcctgcgcacgttgggcaggccggcgaattgtagcagctgccggcgcatgtcgtcgacgctgggcgcgacacaccgaagcatgaaatcggcgtcgcccgagatccgccagcactgcaggaagcgcggcaccgccgccactgcggcctcgaacgcctcgatcgcgaccaggttctggctgtcgagctggatcagcacgaaagtcgtcacctcgtagccgagcagccgctcgtcgagtgtggcacggatcgcctgcaccacgccgcggctgcgcagcgcgcggacccggcgcaggcagggcggggcggtgatgccgacccgctcggcaagctcgttgatcctgatccggccgtcgcgttgcaactcggtgaggatccgcaggtcgatgtcatcgagctgtgggcgctctgtcacagtcacgaacccgccaccgcggttcgcgggcctttaccgccgttctggacccgaccgatcgcagcctgcggtgcgacgcccgacagcaccagcttctcgtgcgctgcgatgatggcgtcgcgggtcagccggccgccggggcggtaccaggtacagagcccggtcagcagagcgatgatcgcaaaggtcgcgacctggatgtcgactacctcgaacacgccgtccgacaccccgtcggtgaggatctgtgccagccgctgctcgtaggcaccgcgcagcgacacgacggcgtcgtagtttttggcatcgaggctgcgcagctcggaattggcgatgaagacctcgcgcttgcgggtcatgtgataggtgacgtggaaggcgacgaaggcgcgcagctgttcgaccggatcggccttgccctccagcgccagatcaagctcgcgcagcaaatcgttgatatggtcctgcaccagatcgaacagcaggtcctgcttggttgagatatggttgtagagtgagcccgcctggatgccgacttcggcggcgagctggcgcaagctcatggcctcgtagccgtgctcgaagatcaggcgcacgccagccttgcggatcgcctccagagttgtggggccatgtgaaccgatcgtgcgtgccatcggggcctcggagggggtgtcggcttgccaggaaagttaggaaacaagcgaacgaccgtatgtttatcgcatgaaatcccagtgaattcaatgaactgccgatttcatgcacgaaccatagcacagtcgcttgcgaagccaagaaaaaaacgtatgatcgtttaattgcaagatgaatctcatgggagggatcatggcctcgaaccgggcggcaatcttcaatttcgaccttggcgagaccgcggatgcgatccgcgagacggtgcatgatttctcgaccaacgagatcgcaccgcgcgccgccgagatcgatcgctccaatacctttccgcgcgacctctggcccaagatcggtgcgctcggcctgcacggcatcacggtcgaagaggagtatggcggctcgggcctcggctatctcgagcattgcatcgcggtcgaggagatctcgcgggcgtcggcctcggtcggattggcctatggcgctcattccaacctctgcgtcaaccagatccgccgcaacggcaacgaggcgcagaagcgcaaatatctgccgaagctgatctcgggcgagcatgtcggctcgctggcgatgtcggagcccggcgccggctcggatgtggtctcgatgaagacccgcgccgagaagaagggcgaccgctacgtgctcaacggcaacaagatgtggatcaccaacggcccgcacgccgagacgctggtggtctacgccaagaccgacgtcaacgccggcccgcgcggtatgaccgccttcatcatcgaaaagggcatgaagggattctccaccgcgcagaagctcgacaagctcggcatgcgcggctccgacacctgcgaactggtgttcgaggattgcgaggtgccggaggagaacgtgctctccgaagtcggccgcggcgtcaacgtgctgatgtctggtctcgactacgagcgcgcggtgctcgcagccgggccgatcgggatcatgcaggcctgcatggacgtcgtgctgccttacgtgcacgagcgcaagcagttcggcgagccgatcggctcgttccagctggtgcagggcaagatcgccgacatgtacaccacgatgaacgcctcgcgcgcctatgtctacgcggtggcaaaggcctgcgaccgcggcgagaccacacgcgaggacgcagccggcgccatcctctatgccgccgagaaggccacccaatgcgcgctggatgcgatccagctgctgggcggcaacggctacatcaacgagtatccgaccggccgtctgctgcgcgacgcaaagctctacgagatcggcgccggcaccagcgagatccgccgcatgctgattggccgcgagctgttcgccaagacggcttgagcttcgcgccggcggtcgcgccatggcgcgatcgcctgacgtccccgatcctgtcagctcctccaacgaaacgtgcaacacagatgccgcttcattcgaccatcgatccgacatcttccgaattcgcccgcaacgccgacgtgatgcgcggcctggtcgcggagctccgcgacaagctcaaccaggtggctggcggcgggggggagacctcgcgcaagcgccacacctcgcgcggcaagatgctggcgcgcgaccgcgtcgatctgctggtcgacccgggcaccgcgttcctcgaattgtcgccgctcgctgccaacggcctctatggcggtgacgtgcattcggcgagcgtcattaccggcgtcggccacattgcgggccgcgaatgcatcatcgttgccaatgacgccaccatcaagggcggcacgtactatccgatgacggtgaagaagcacctgcgcgcccaggacatcgcgcggcagaacaatctgccctgtgtctacatggtggattccggcggcgccttcctgccgttgcaggacgagatatttcccgacgagcggcatttcgggcgcatcttctacaatcaggcccagatgtcgtcgcagggcatcccgcagatcgcgatcgtgatgggctcgtgcacggcgggcggcgcctatgtgccggcgatgtcggacgagagcatcatcgtgcgcaatcagggcaccatcttcctcggcggcccgccgctggtgaaggccgcgaccggcgaggtcgtcaccgccgaagagctcggcggcgccgatgtgcattcccgccagtccggcgtgaccgatcactacgcccagaacgatgcgcatgcgatcggcatcgcgcgacgcatcgtcggcacgttgaagcagccggcgaaggcaacgctcaacatgcgcgccgtccaggagccgctgtttcccgccgaggagatctatggtgtggtctccgccgacgggcgcaagccgttcgacgtccacgacatcatcgcgcggatcgtcgacggctccgaattcgacgaattcaagaagctttacggcaccacgctgatctgcggcttcgcccatatctggggctatccggtcggcatcatcgccaacaacggcatcctgttcagcgagagttcgctgaagggcgcgcatttcatcgagctgtgctgccagcgcggcattcccctggtgttcctgcaaaacatcaccggcttcatggtcggcaagaaatacgaggccggcggcatcgcgcgcgacggcgccaagctggtgacagcggttgcgaccgccggcgtgccgaaattcaccgtggtgatcggcggctcctacggcgccggcaactatggcatgtgcggccgcgcctacagcccgcgcttcctctggctgtggccgaacgcccgcatctcggtgatgggcggcgagcaggcctcgatggtgctgagccaggtcaagcgcgacggcatcgaggccaagggcgagagctggtcggcggaagaggaagacaagttccgcgagccgatccgggcgcagtacgagaaacagggtaatccctattacgccaccgcgcggctgtgggacgacggcgtgatcgatcccgccgacacgcgtttggtgctcgggctcggcctgtcggcagcggccaatgcgccgatcgaacccaccaagttcggcctgttcaggatgtgagccaaggatctgatcatggaccgctcaaaactctaccggcgtttccgcacgctgctgatcgccaaccgcggcgagatcgcctgccgcgtcatccgctcggcgcgcgccatggggctgcgcaccgtcgccgtctattccgaggccgaccgcgaggcgatgcatgtcgcgctcgccgacgaggcggtgctgctcgggccggcgcgggcgcgtgacagctatctcaacatcgagcgcgtcatcgcggcggcgaagcagaccggcgcggaggcggtgcatcccggctacggcttcctgtcggagaatgccgaattcggcgaggcccaggacgaagcgattttggcggaagccgccaaccggatcggcttcccggtgctggtgaaggcgtcggccggcggcggcggccgcggaatgcgcgtggtcaattcggcggccgagctcgcggccgcgatcaccagcgccaagcgcgaggccaaggcggcgttcggcgacgaccgcatgctgatcgagaaatacgtgcagaatccgcgccacatcgaggtgcagatcatcggcgacagccatggcaatctgctctcgctgtgggagcgcgaatgcacgctgcaacgccgccatcagaaggtgatcgaggaggcgccgtcgccgaccctgaacgctgcgcagcgcgagacggtctgcgaggccgcccgcaaggctgccggtgcagtcaactatgtcggcgccggcactatcgagttcgtctccgacggcaaggacgtgttcttcatcgagatgaacacccgattgcaggtcgagcatccggtcacggagctgatcaccggcgtcgatctcgtggaatggcagcttcgcgtcgcgttcggcgaagcgctgccgctgaagcagaatgagatcaggttgaacggccacgccatcgaagcgcgcgtctacgcggagaatccgcagaagaacttcatgccttcggtgggccgcatcaagacctggcggactccgccggacggcgacggactgcggatcgatgccggctatcgcagcggcgacaatgtctcgccgtattacgacgcgatgctcgccaaggtgatcgcctgggcgccgacgcgtgaaggcgcgatcgagaagctcaaccgtgggcttgagcagaccgacgtccgcggcatcgtcaccaacatcccgttcctgtcggcgctggtgacgcatcaggcgaccaggaccaatgctatcgataccggcttcatcgagcgcgagctgaaaaacctgacagcggggcagggcgcggccggcgatttcgaactgtgcgcggcggtggcggcgatcgtcgacgacgagcagaaggcggcgcggcgcgaggccaactcgccctggcaggccttcggctggatgccggtcggccgccgccagcgggtgttctcgttcaagcaaggccatgaaccgccgcagaccatcacgctgcactatggcaacggtccgtcgacgctgtcggtcggcggccacgagcttgccttcgcgatctcgtcatccggcgaggatggcttcgacctgacgctcaacggcctcaagtcgcgcgttgcatcggtcatcgagggccacgagctttatctgcgtacccgcaacggccgcttcgacctgcattgggtcgatccgttcggcggcgaaagcgaggagcaggtcggcgaggacaagatcgtcgcgcccttgcccggcaccgtggtggcgctgctggccgaggagggcgcgacgctggagaagggcgcgccgatcctgacgctggaagtgatgaagatggagcagaccctgcgcgcgccctacgccggcgtgctgaagaagctcaaatgcaaggtcggcgatatcgtcggcgagggtgtcgagcttgcggaagtggagcctgcggctgcgtcatgagcgatcaggtcaagatcatcgagatggggccgcgcgacggcctgcagaatgagaagacgccggtcagcgtcgcggcgcgcatcgccttcgtcgaggcgctggtggcggcggggctcaataccgttgaggtcggcgccttcgtgtcgccgaaggcgatcccgcagatggcgagctccgaccaggtgctgtgcggcgtcagccatatcagggatgccgaattccacgtgctggtgccgaacgagaagggctatgacgccgcgcgcgcggccggcgcccgggtggtctcggtgttcgcggcggcctccgagggcttctcacgcgccaacatcaattgctcgatcgcggaatcgatcgagcgcttcaagccggtgctggcgcgtgccaaggccgacggcgtcaaggtgcgtggctacgtctcctgcgtgctcggctgcccgttcgacggcgagatcaagccgaaggcggtcgccgacctcgcggtgaccctgtgggagctcggctgctatgagatctcgctcggcgacaccatcggtgtcggcacgccgctcaaggccagggagatgctgcgcgcggtcggcgccgagcttccggtcgccaaccttgcgatgcatttccacgacacctacggccaggcgctcgccaatctctatgccggcatggaggagggcgtccgcgtcatcgatgccgccgccggcggcctcggcggctgcccctacgcgcccggcgccaccggcaacgtcgcgaccgaggatgtcgcctacatgctggaaggcatgggcgtgacaaccggcatcgacatggacaagctgctggccacgacgaacgaagttgccaccttgctcggccgtccgccggtgggccgtgtcgcctccgcgctgaacgcgaaacggaagcggctcggcggctcgtgagcctacgagcgacgtccgtccgtcgccattgcgggcatgcgccaaggcacgctccggaatgacggaaatcggacgggctgcgacttgacgcggggccgcccaatggaacccgcattgcggcgcacacgccttgtcatggggttcccgaccaaaatgctcgaaaagcattcatggcttggtgactcaaaggtgctgaggtgagcgagctcgcaattgctccaggtggctcgccatgtccggacaggtgtcagcttctcgtggccgaacgttcttggccggaaagatcgttttcaacttcggtcggtcagcgttcgattgcacggtccggcagctcaccgatgccggggcgaccgtggaactcgaaaccacgatcggcattcccgaccacgttcagttgttgctcgtcggcaccaaccaggtgaggccgtgcaaacgattgtggcaatcggaccggcagctcggcctcgcgtttgaggagcagcgggcgagcgctgcagcttcggcagccgcgccggcttccgcacctgcgggtcccgcaccgttcaccattccggagcgacgcagcggcgacattctgcgcgggcacatgctggcgctgcgcgcggcgctcgatctgatcccggtcggcatcctgctgctggatgccgaactgaaagccctgttcatcaaccgcgcgtttcggaacatgtgggtgcttccggacgcggttgcggaccgcacccccagcttcaccgatctgatgcgtcacggttgcaagaccatggcctatgatctgccggccgagcagctcgaagcctaccttgccgaacgcgtccgcctcgtgagcataggggacacaaacccgatcgatctcaggcgcagcaatggtgatgtcatccgatgtcagtgcacgccgctgcccgacggcggccggatggtgagctacacgcccgtaaccgacatcgtgcgcgcgtcggacaagctgaaggtgctgaccggggcgctcgagaacgtggaggacggcgtcgtgctgctcgatcgcgatctcaatgcggtgttcctcaatcgcaggatgcgggaattctgggaggtgagcgaggaggaggtcgcgcggcatcccgcctatgtcacgctgatcgcgcgcaatcgccgggcagtcccgacgggcgcaacggcggagcagatcaaggcctttccggcgaagcggatcgcggagatcaaggcgggcgaccacaagcgcgacttgcagacgccggacggccgcaatatccgggtccattgctcgacgatggcaaatggcggccggatgctgacctttgtcgacgtcaccgatcttgtccgcaatgcgcgacagctggaggtgctcgcgaccaccgatccactcactggactgttcaaccgcaggcacttcctcatgacgttggatgcggagtggagccggttccagcgctactatcgttcggtctccgtcctgatggtcgatatcgatcacttcaagagcatcaacgaccggttcggccacgcgatcggtgacgaggcgatcaaggcggtcgccgagatctgcacgcgcggcaagcgcaagtcggacattgtcggccgcatcggaggcgaggagttcacggttctgttgccggaaacgacattgtcgcgcgcccgaactgttgccgagcggattcgcaggcgggtcgaaggactgacgttgacggcggacggccgtccggtgtccgtcacggtgagcatcggcgttgccgaagccctcacgagcatgtccgggatagacgccctgatgaaggccgccgacgccgcgctctaccaggccaaggaaggcggccgcaatcggacgcagtgctggctgccgccggcgccgccgaagctggcggcggagtaggcctgagttgcagcttgaacgagcttagtaacatgactgcaactaaacagctacttggtcaggcgcccgtcaggttcccataaggactgataatacatggttgccttacggacacgattgttgcgtcgttgcaacggtgtcggaacatttaaccctaaaagcagcccatccgtagtcgcgccgctttttggccacaccctgacatgaaaggatattcacctagctgaatagccagcgctccgacgacgggacattttatcggttccagcgttgatggaggaagggcgcaggaaaaagagcgccggaacagggtcgcgatggacgtcaagacgaacatcaagagcaggctgcccagccgtcacgtgacggagggcccccagcgcgcgccgcatcgttcctatctctatgcgatggggctgacgacagcccagattcatcaaccctttgtcggcgttgcttcatgttggaatgaagcggccccctgcaacatttcgctgatgcgccaggcgcaggcggtgaagaagggcgtggcttcggccggcggtacaccgcgcgaattctgcaccatcaccgtgaccgatggcatcgccatgggccatgacggcatgcgctcgtcgctgccgtcgcgcgaatgcatcgccgattcggtcgagctgaccgtccgcggccacgcctatgacgcgctggtcgggctcgccggctgcgacaaatcgctgccgggcatgatgatggcgatggtccgtctcaacgtgccctcgatcttcatctatggcggctcgatcctgccgggcaacttccgtggccagccggtgaccgtgcaggacatgttcgaggcggtcggcaagcactcggtcggcgccatgtcggacgaggacctcgacgagatcgagcgggtggcgtgcccctcggccggcgcctgcggcgcccagttcaccgccaataccatggcgactgtgtccgaggcgatcggcctcgcgctgccgtattcggccggggctccggcgccgtatgagatccgcgactccttctgcgccgccgccggcgagaaggtgatggagctgatcgagaaaaacatccggccccgtgacatcgtcacccgcgaagcccttgaaaatgctgcggccgtggttgcagcctcaggtggttcgaccaatgctgcgctgcacctgccggcgatcgcccatgagtgcggcatcaaattcaatttgttcgacgttgccgaaatcttcaaaaagactccttacgtcgcggatttgaagccgggcggccgttatgttgccaaagacatgtttgaagtaggtggcattccgctgctgatgaagacgctgctcgaccatggccacctgcacgggaattgcctcaccgtcactggccgaacgatcgccgaaaacctcaaaagcgtgaaatggaatccgcaccaggatgtggtgcggcccgccgacaatccgatcaccgtcacaggtggcgttgtcgggctgaagggtaatctcgctccggagggtgcgatcgtgaaggtcgcgggaatgtccaacctgaagttcaccggtccggcccggtgcttcgaccgcgaggaagacgctttcgaggcggtgcagaagcgcacctacaaggaaggcgaagtgattgtgatccgctacgaggggccgaagggcggtcccgggatgcgggagatgctggcgaccacggcggcgctgaccgggcaggggatggggggcaaggttgccctgatcaccgatggccggttctccggcgccacccgtggcttctgcatcggacatattggacctgaagcggccgtcggcgggccgatcgggttattgcaggacggcgacatcatcgagatcgatgcggtcgccggcacacttgacgtaaaattgagcgacgccgagctcgcaaatcgtaagaccaaatgggcccctcgggcgactaaccacacatctggtgcgctgtggaagtacgccgagcaagtggggccggcggtggatggcgcagtcacccatccgggtggcgcgcacgagaaacagtgttatgcggacgtttaggcgtacgatttttgcgtttgcgttaggggccattccggtggcgggccctggattcggattcgacggagccccggtcaacccccaggataccgttctgccggtggtcgcgccgcagccgggctcggcggctgcgttgaagcgggccacgacgccggttgccccgacggcgaccgcgccgacctcgtccttcagcacgctgcagtatcaggccgagggcggccaccccgtggcgcagtggaagctcggcaagatgtacgccgagggcgacggcgtgatccaggacgacatgcgcgccttcgaatatttcagccggatcgccaatgcgcatgccgaggattcaccgtcggcgccgcaagcctcgatcgtggccaacgcctttgtcgcgctcggccgctactatctgaacggcattcccaattccaaggtgaaggcggacaccgagcgcgcgcgggagatgttctcctatgcggcgtcctatttcggcaatgccgacgcccagtacgaccttgcccggctgtatttgaagacgccggatgcatcgcgggatgatttccgctatggcgcgcgctggctgggccttgccgcccagaagggccagcatcaggcgcaggcgctgcttggccagatgctgttcaacggcgaccggctgccgccgcagcgggcgcgcggcctgatgtggctgaccctggcgcgcgacagcgccacgcccgacgaggcctggatcaaggaaagctacaaccgggcgatcgccaaggcgtcggaagacgaccgtgcgatggcactgcagatgctcgagcactgggtgcaaggtcgtcgcgattagaggccgccgcgactgagatcgcgggcggcccttggaactcgctcggggctcaggcggtctcgaaatcgagatcggcccagaccgggacatggtcggacggcttctcccaggcgcggacatagctgtcgatgccgacatcgatcagccggtcgctggcctgcggcgacatcaggagatggtcgatccgcagcccccagttcttctgccaggcgccggcctggtaatcccagaaggtgtactggccgggctcgtcattgactgcccgcagcgcatccgtgaggccgaggccgagcagggactggaaggcctcgcgggtcgccgggcggaacagcgcgtcgtcggcccatgcggccggattgtagacgtcgcgggccgccgggatgacattgtagtcgccggccaggatcagcggctcctcggccttaagccgttccttcgtgtactcaagaagccgcgacatccatttgagcttgtagggatatttgtcggtgttcgcgggattgccgttgggcaggtaaaggcatgcgacccgtaccacgccctgtttcagcgtcacgacgccttcgaggaagcgggcatgggcgtcctcgtcgtcgccggcgaggcccgatttggtctcgtcgaacggcagcttggagagcagcgcgacgccgttgaaggtcttctgcccgtgggtgacgacattatacccgagcgcctcgacctcgagccgagggaaagcgtcatcgacgcatttgatctcctgcaggcaaacgatgtccggagagcactccttcagccaggcgaccagcagttcgatccgttgccggaccgagttgacgttccaggtggcgatgcgaactgtcatcggaagtcccttatttcatgacgctttcgcgtcacttgatgcctagaccaagcgtttgcgcatctcgatgtgtgggatgccggcttcctcgaactcgtcgccgcaccgttcgaacccggcgcgcgcatagaacggctccgcgtgcgtctgagcgttgaggatcagttcgggatagccgagttctgccgccttggccatcagcgcgtccagtactcgggcgccaacgcccgtgccacgtgccgtttcgagcacggccatgcggccgatatggccgtcggggagcagccggccggtggcaacgggtgtgccgtcatcggtaaacgccagcgcatgccaactcgacgcgtccatctcgtcccattccagttcgaccggcacgccctgttcttcgacaaagactttgtaacggatggcgccggagcgttcgcgggcgtcttcccaagtgcagatcaggacggaggtggacatagggcggcgattggcgggcgcccgaggaggcgcagtatttcactttcgtggcataccatatgcggtccggctgtgctaaccctctccggaaacaaggcgtaacaattgccgatgggggagtcgcgaagcgtcccgccttcaagggaaggggcggcgcacgtgcaaaattatgaaaaaacgcagtttggttctgactgtcgcggtcctcggcattgcggccggggcggcctacatgatccgctcttcgtggatgggcggcggttccgcaaccacgcaagggcccccgcggccgcgggtagtctcggtggatctggccaaggcggaacgcagatcggtgccggtcgatgtcgatgcgatcggaacggtcacgccgatctccagcgtggcgctgaaatcgcggctggagaccaccatcgtctcggtgcatttcgaggacggcgccagggtcaatgagggcgacctgctgttcatgctcgacgcgcgacagatcgacgcccagatcgagcaggccgagggtgtcctagcccgcgaccaggcccagctcgagggcgcacagcgcgaccagcgccgctacaccgaactggtcggcaagggcgcgaccacccaggtcaacctcgacaacgccaagacccagtccgacgtcctgatcggcaccatcaaggccgaccagttcgcgctggaaaatctccgcgtccagaagagctacaccgtgatccgggcgccgtttgcgggccggatcagcgccgccaacgtcaaggtcgggaacttcgtccgtcccgccgatacgcaaccgctcgcgatcatcaaccagatggcgccggtttatgtcaccttcgcaatcccgcagcgggcgctggtcgatctgcgcgacgccatgggaaagggtgatcccaaggtgatcgcgaccattcccggccaccagcgctccgaaagcggcaaggtcgccatggtcgagaacgccgtcgatgcaaccaccggcatggtgaccgtgcgcggcgtcatgaacaatgccagcgagacgctgtggccgggcaccatcgtgcagaccaagctgatcatccgcagcgaggacgccgtcgtggtgcccacggtcgcggtgcagcgcagccagaacggcaatttcgtcttcgtggtcagggacggcgtcgccaaggtccagcccgtcaaggtcgatcgcacgttccagggctcgtcggtgatctctgacggactggcgggcgatgaaagcgtcgtcgtcgacggccagctgctgctgtcggagggatcgcgggtcgagttgcgggcgcgcaaggccggagcctgacctatgacgctgtccgagctctgcatccgccgcccggtcatgacgacgctgatcactgcgtcgatcatcgccttcggcctgttcggtttccgcctgctgccggtctcggcgctgcccaaggtggacttcccgaccatcgcagtcaccgcgaccctgccgggcgccagcgccgacaccatggcggcctcggttgcagggatcatcgagcgtcagctctcgacgattgccggcatctcctcgatgtcctcgaactcgtcgcagggcaccagcgtcatcaccatccagttcgacctcaaccgcagcatcgatgccgcggcgctcgacgtgcagacggcattgacgatcgcgcagcgccggctgccgatcgagatgacgatcccgccgagcttccggaaggtgaacccggccgatttcccggtgctgttcgtctcgctggggtcggcgacgctgccgctgtcggcggtcaacgaatacggcgacatcacgatcgggcaggcgctgtcgcagctgccgggggtcgcgcaggtcctgatctacggcgcgcagaaattcgcgatccgggtccaggccgatccggaggccgcggccgcccggggcgtctcgatggaggacatccgcgcagcggtgtcgcgcgccaattcctccaccccggtcggcacgctgaacggtcccaagcaggacgtcgcgctgcaggcctccggccagatggacaaggcggccgactaccgccagatctatgtcgcttggcgcaacggttcgccggtccgactcgacgagatcgccaaggtctatgacagcgtcgagaacgacaagatcgcgacctggatgaacgacgagcgcgcgatcgtgctcgcgatccagaaacagcccgacgccaacaccgtcgccgtcgtcgacgccgttctcgcaaagctgccgtcgctgcgcgccgcgatcccgccctcggtaacgatgcaggtgatgatggaccgctcggtctcgatccggcaggcggtcagcgacgtcgaggagaccctgctgatcgcgatcgggctcgtcatcctggtgattttcctgtttctgcgctcggcgtcggcgactttcattccggcgctcgcggtgccgatctcgctgttcggcacctgcgctgcgatgtacgcgctggattactccatcaacaacatgacgctgctggcgctgacgctctcggtcggcttcgtggtcgatgacgccatcgtgatgctggagaacatcgtccgccatatcgagcatggcatgaagccgttcgaggcggcactgaagggcgcccgcgagatcggcttcaccatcatctcgatcacgttctcgctgattgccgtgttcatcccggtgctgctgatgggcggcatcgtcggccgcgtgttccgcgaattcgcggtcacgatctcggtcgcgatcatcgtctccggcttcgtgtcgctgaccctgacgccgatgctgtgcgcccgcgtgctgcgcgcgcatgatgcgaccaggcggccgaacatcgcgctgcgggcgttcgaggcgatgttcgaggcctggctgcgcgcctatgaatgggcactggactgggtgctggccaagaaggccttgatgctggtggtgacgctcgcgacgctcggcggcacagtctatctctacatgatcgtgccgaagggcttcttcccgcaggaggataccggcttcctgatcggcgtgacggaagccgcgaccgacacctcgttcgaggcgatgaaggtgcgccagcaggcactggtcgacgtgctcaggaccgatccggcgatcgactatgtcaattccaccgtcggctccggcggtcccaattcgaccaccaattacggccggctgttcattgcgctgaagccgcagaacacccgcgacaacgccgctgtcgtgatcgggcggctgcgccagaaggcgcgcgagatcccgggcatgcaggcgttcttccagagcgtccagaacctcaacatcggcggccgcatctccaagagccagtatcaatacgtgatgcagagcggcgataccgaggcgctgtaccggctggcgcctgagatgcgcgacaagatcgagaagatcccgggcctgctcgacgtcaccaccgacctctacatcaagaacccgcagatgacagtcgacatcgaccgcgagaaggcggcggtgtacggcatcaccgtcgaccaggtccgcaaccagctctacaacgcctatggttcgcggcaggtcggcactatctacatgccgtcgaacgactaccagatcattctcgaggtgcagccgcagtttcgggtcgatccgtcagacctctcgaagctctacatgaagaccgcgagcggccagaccattccgctggatgcggtggcccggctggtgccgacggtcggaccgctgcagatcaaccaccagggccagcagccggcggtgacgatctcgttcaatctcgcgccgggcaattcgctcggctacgcagtcgacaagatcaccgagctcgagcagaattcaagcccgccgccaacgattgcgaccggcttctccggcaccgcgcaggtgttccaggattcgctgcgcgggcagggcgtcctgatcctcgccgcggtgttcgcggctttcgtcatccttggcattctctacgaaagcttcatccatccgatcaccatcatctcgggcttgccgtcggccggtatcggcgcgatcctgacgttgacgctgttcgggatggagctgtcggtgatcgcaatgatcggcatcgtgatgctggtcggcatcgtcaagaagaacgcgatcatgatggtcgacttcgcgctggagcgccgccgcgtggggttgagtgccgagcatgcgatccgcgaggccgctctgctgcgcttccgcccgatcatgatgacgacgttcgcggcgatcttcggcacgctgccgatcgcgctcggtgccggcgccggtgcggagctgcgtcagccgctcggcgtcgccgtggtcggcggcctctgcgtctcacaactgctgacgctgttcatcacgcctgtcatctacatctatctcgaccgcatcgaccgcggcctgcggcgcaagctcgacccgcaggcggacggtgacatcgaacggccgcaggtggtcgcggccgagtagcaggcggcggttagatcgagaagctggtgccgcagccgcaggaggcggtggcgttcggattgacgacgcggaacgaggcgccgatcaaatcgtcgacgaagtcgacctccgaacccgcgaggaacgggaccgaggcgggatcgatcagcaccacggcgctgtcgcgctcgatcacgaggtcgtcatcggcctgggtgcgctcgacgtcgaacttgtactggaaaccggagcagccgccgccctcgaccgaaatgcgcagcttggcgccgtcgccttccttgctgaggatctgcccgatccggcgggcggcccgttcgctgacggtgatggcagcagtcatatcggtctccgaaaccttgattcgaggcatggtcggatcggatcatgcccggcgtcatagccaattcatttggtcagccgcctcaggcatagttaagtgcgtcggaccatggaatcaaatggataaggactaaaatactgtgtcggtcggaatggctgccccccgcgcgccttatgcctgcgaccccgaccacagccgcggccggctggtcgcggagccgccgagccggacccggagcccgttccggcgcgactgcgaccgggtcatccattccaccgcgttccgccgcctgaagcacaagacccaggtcttcgtcttccacgagggcgaccattaccgcacccggctgactcattcgctggaggtggcgcagatcgcccgcgcactggcgcgccagctcggggtcgacgaggatctgaccgagacgctggcgctcgcgcatgacctcggccatccgccgttcgggcatgccggggagcgcgcgctcgatgactgcctcaaggatgatggcggcttcgaccacaatgcacaggcgctgcgggtcgtcaccttgctggaacaccgctatcccgagttcggggggctgaacctgacctgggaatcgctcgaggggatcgtcaagcacaacggcccgctgaccgaacgcaacggtgcgccggccggccgctacctggacagcggccttccggtcgggatcgccgactacaacaggacctacgacctcgagctctggagctacgcctcgctcgaggcgcagatcgccgccttcgccgacgacatcgcctatgacgcgcacgacatcgacgacggcctgcgcgccggcctgttcgcggtcgacgacctcaaggagatgccgctgaccgctgaaatcatcgccgagatcgatcgccattaccccgggctcgatgaggtccggcgcggtgccgagctggtacgtgagctgatctcacatttcatcaatgccgtcttcaacgaggcgagccggcgccttgcggccgcccggccgcaatcggccaaggacgtgcgccatcacaatgcgccgcttatcgcgtttccggccgaggtggcggagcaggaggcggcgatcaaggcgttcctgttccggcggatgtatcgccaccagcgggtgatgatcgtgatgcgggaggcggagcaggtggtccgcaatctgttcgagcgctaccggcaatcgcccggcgacctgccggcggaatggatcgagggcagcgtgcaggagaccacgaacgcgcggaacaggcggatcggcaatttcattgccgggatgaccgaccgtttcgccctgatcgagcaccaaaggctttttgactcgaccccggatttgcgttagcgccctgccatggccgacaccactgcttcaccacacctttttgccgacatgctgacgcgcgtgcacgcgatctgtgccgcggtcggagccgaggataactggcccgcgggcatcgacctcacacgcgtcgtggtggagccgccgcgcgatgccagccatggcgacatggcgaccaatgccgcgatggtgctcgccaaggacgccaaggccaagccgcgcgagctcgccgacaagatcgccgcgcggctgcgcgccgacgcgctggtggcctcggtcgatgtcgctgggcccggcttcatcaacctgaccctgaagccgcaggtctgggcagacgggctgcgcgccgtgctggccgccggctccgcttacggacgcagcgacatcggcaaggccgagaaggtcaatgtcgaatacgtctcggccaatccgaccggaccgatgcatgtcggccattgccgcggtgccgtgttcggcgacgcgctgtgcagcctgctgcaattcgccggcttcgacgtttgccgcgaatattacatcaatgatgccggtgcccaggtcgacgtgctcgcgcgctcggcgttcctgcgttaccgcgaggcgctggggcaggacatcggcgcgatcccggaagggctctatcccggtgattacctcgtgccggtcggcgaggcgctcgtcaaggaatacggcgagaagctgctcgacatgaccgaagccgcgtggctgccgatcgtgcgcgacaaggcgatcgccatgatgatggagatgatcaagggcgatctagccgcgctcaatatccatcacgacgtgttcttctccgagcgttcgctgatcacctcgggcaacaacaaggtcgccgagaccatcgatttcctgcgcgccaagggcgacatctatgagggccggctgccgccgccgaagggcaagccggtcgaggattacgaggaccgcgagcagtcgctgttccgcgccaccgcgtatggcgacgacgtcgatcgtccgctgatcaagtcggacggctcgtacacgtacttcgcgtccgatatcgccaaccaccgcaacaagttcgagcgcgggttcaccaaccttatcgacgtgttcggcgccgatcacggcggctacatcaagcgcatgcaggcggccgtgaaagcggtgaccgcgggcaaggcgacactcgacgtcaagatcgtgcagcttgtgaagctgctgcgcgacggcgagccggtgaagatgtcgaagcggtcaggcgaattcgtcacgctgcgcgaagtcgtcgacgaggtcggctccgacgccgtgcggttcatgatgctgttccgcaagaacgacgcggtgctcgatttcgacctcgccaaggtgatcgagcagaccaaggacaatgccgtcttctacgtccagtacggccacgcccgcggccattcgatcttccgcaatgcgcgggaagaagcggttccggacctgccgacgtccgacgaggcccggctcgcctatctgcggagcgctgcggtcgaacggttgaccgacccggccgagctcgatttgctcaagcggctggcgctttatccccggatgatcgaggccgcggcggtggcacatgagccgcaccgaatcgctttttatctatatgatttggccagtgaatttcatgcgctttggaccaaggggcgcgatttgccctatttacgcttcattatcaataatgatgcagagatcacgagggcgcgactggcaatggttcagggcgtcgtctcggttctggcatcgggcttagctgttctaggcgtccacgctccgaccgagatgcggtaggcaggggcatttggccctcacgagtggggatttgtgagggcatctggcaggggccaactcgttcggaccggctgtgccggcgatcttggcgctgtcccgaaggggatgcatcatcacgatggctgatcgatatcaggaccgaaatttttccgccgacacggcctcgagggccgacagcgatccgcttgctgaactggcccggctgatcggccagacggatccattcggcaccgccaacaagccgccgccgcgtccgctgcagtcgcgcgccaatgcgcggccgcaacagtatgagccgcaggcggaagaggacgagaccccgcccgcaggcccgccgccctggatgcagcgcgcgcggcaggaggcggccccgccgccgcccgtgcagcacaccgaatacgaagagccggagcaggactatcaaccgaagccggtgcatccgctgcaccgctatgcggcccagcaggcacagccgcctgcgcccgcgccggtcgcgacctatcggccggtcgagcccccccggcagcctgaggccttcgacgaggagccgcattatcaggccaacgatcaggggcacgatacgtcgcgctatgacgacgcgctctacggccaactggaggccggtgaacaggatctgcagcgcgatccgtcctatccggacgatccctacgcctatgatgcctatgaggaagaacccgaaccgcgcaagcggagcagcggcctgatgacggtcgccgcggtcgtggcactcgcggtggtcggcactggtggcgcgctcgcctatcgcaactatgtcggctcgccccgaacgggcgaaccgccgatcatcaaggctgacaatacgccgaccaaggtgttgccggcccaggccgatgcgccggccaagacgccggaccgcatggcgacgggggacggcaccgagaagatcgtgtcgcgcgaggagaccccggtcgacgtcaattcgaagaccgccggtccgcgcgtggtgtttccggcgctgaacgccaatgcgaatccgccgcccgccgccagcgtgcagacggcgcagcccgcgccggcgccgatcgccgcgaacgggaccctgccgaacaatgagccgcgcaaggtccggacgttgtcggtcaagggcgattcgcctgacggcgcacaggctgcggccgccgcgccggccaagccggccgcagcgaagcctccagtgtcgcgcggcaacccgtcggcagccaatgccagtgtgaacgcgccgatgtcgctgactccgggcggccagcccgaccctgcgcccgccgcacctccgacccgaatcgcgtcgacctcgacggcctcggtcggtggtggcggatacctggtgcaggtgtcgtcgcagaagaacgaggccgacgcgcagtcgtcctatcgaacgctgcagggcaaatatcgcagcgtgctcggttcgcagcctttggtggtcaaacgcgtcgatctcggtgagaagggcgtctattaccgcgccttcgcgggcccgttcgcgtcgtcggaagaggcgagccagctgtgcaaaagcctgatgtcggccggtgggccgcagtgcctcatccaaagaaattaacggccgtttccttgacccgtgagccgcatacggcctaatcggccgaatgacgaaccgcggattcatcacgggcgtatccggcctgatcctcaacgacgctgaacgcgaatttattcgcgccgagcggccatggggcttcatcctgttcaagcgcaacatcgagagtccggcccaagtggcggctcttattggggaactccggaaagcggctggcatggccgaagccccggttctgatcgaccaggaaggcgggcgggtgcaacggctcggccctccgcattggccggtctatccgcccggcgcgagcttcggcgcgctctacgacatcgacccgaagctcggccttgccgcggcgcggctcagctcgcggctgatcgcggccgacctgatcgacctcggaatatcagtcgattgcctgcctttggccgacgttcccgtcgccggggcggacgcagtgatcggcaaccgagcctatggaaccgaaccgggcaaggtcgcggcgatcgcgcgtgcggtcacggatgggctggaacagggcggcgtgctgccggttctcaagcacatccccggccatggccgggccacggcggacagccatttccggcttccaacggtcgatacagccagagatgagctggaacggaccgatttcgccgcgttccagccgctggcggacttgccgatggccatgactgcacatgttgtgtttagcgcgctggaccccgtccatccggcgacgacttctgcgacaatcatcgaacaggtgattcgcggcctgatcgggtttcagggtttgttgatgagtgatgacgtgtcgatgaatgcgctggccggatcgattgccgagcggacccgcgccatcgtcagcgccggttgcgacatgatcctgcactgcaacggcaatctcgacgagatgcgcgaagtcgcgcgggaaacgccggaactgaccggcaaggcgcttgagcgcgccaaggctgcgctcgctgtgcggaagcagccggagccgctggaccggcaggcggcgcgggctgaactggatgcgttgttggatcgggtagggacggcatgaccgctgaaattctatcgttcgataccgggcggccggccgaccttgctgatggcgaaccggcgctggtggtcgacgtcgagggctacgagggcccgctcgacctgctgctgacgctggctcggcagcagaaggtcgacctgtcgaagatctcgatcctggcgctcgccgaccagtatctctcgttcatcgaggcagcgcgcaagatccgcctcgaactcgccgccgactatctggtgatggcagcctggctcgccttcctgaagtcgcggctgctgctgccggaaccgccgaccgctgaggggccgagcgccgaggaaatggcgaccgcgcttgccaaccagttgcgtcgtctcgaggcgatccgtgaggcggcgaaccggctgatgaaccggccgcagttccagcgcgatatcttcccgcgcggcaatccggaatcgatcgccgagatcaagcatccgaagttcaccgcgacgctgtacgacctgctgtcggcctatgccacgcagcgcgcgtcgcgggtgctgacgtcggtgcatctggccaagcggacggtgtggtcgcttgcggaagcgcgcgcctcgctggagcggctggtcggcatcgccgaggactggagctgcctcgacgagtacctgatgagctacgtcgccgatcccacccagaaggcgacggtgttcgcatcgagcttcgccgccgccctcgaactggttcgcgagggtgagatggaaatcaaccagaagcaggcgttcgcgccgatctatttccgaaagcgtccagcgcaagccgcaatggctgcgcccgacctgtcggttgagtaagtggaagaaggagagcaggccgatggcaagcttggcggaagtgcgcagagacgagcccgaggaggaggtttctccgatggatcatccggtggcgcggcctgaggaattgcggctccttgaagccctgttgttcgcatcggccgagccgatcgatcaggcaacgctggccaagcgcatgcctgacggcgtcgacatcaagcaggcgctggcacagttgcaggcggaatatgcgccgcgcggcgtcaacctggtgaaggtggcgaacaagtggacgttccgtaccgcgggcgatctgtcgtggctgatgacgcgcgagagcaccgagacccgcaagctgtcgcgcgcggcgatcgaggtgctggcgatcatcgcctaccaccagccggtgacccgcgccgagatcgaagagattcgcggcgtggtgacgtcgaagggaaccatcgacgtgctgctggaaaccggctggattcgcccgcgcggccgccgcaagacgccgggccggccgctgaccttcggaaccaccgacggcttcctgtcgcagttcagcctggaagcgctcggcgacctgccggggctcgaggaactcaagggcaccggcctgctcgattcgcggctgccgaccggattctccgttccgtcgccatctgacgatgcgacgctgcgcgaggatgaggagccgctcgagcccggcgatacactggaactgctgttggccccggccgtcgagccggaggccaaggaaccgacggctgaggtcgaggccgaaaccgaggccgctaccgaggttgaagcgacggccgagaccgaagccgaggtggtcagtgaggcagaggcaggcgagcttgacactgccgagcccgatgccgatgaacccgacgccgacgagccggacgatcgcgctgacgacgcgggcgatcacgacggcgccgagaagggcgaatagggcggaatattcccggttaagcctagcaatattacgtagccgcgacagcgatttgccgcggcagaggtccttgtttttgacaccccgcgggcctaacttccggccatgttcaggccggtccgccggccatttctggagggttgcaggatgggttcgcttagcatttggcactggatcgtcgtgatcgcagtggtcctgctgctgttcggacgcggcaagatttcggacctgatgggtgacgtcgcccagggcatcaaggccttcaagaagggcatgcaggacgacgacaaggtcgcagacaagaccgagcccaccaaggcgatcgatcacaatgcggcgccgtcggcagcgcgccaggacgtcggcagcaaggccgtctaaggcgcttgtactgacgtgtattttcgacgtttttcttcgcgcgaaacggtgacgccgtcgcacagacgcgctatggacgccgattgagaaaaggcgccggcggccccacatcctgttgggagcgatggggccgatggcggcgcgcttaggcggaacaattcatgttcgatatcgggtggagtgaactggtcgtcatcgcggtcgtcgcgctgatcgccatcggcccgaaagaacttccgggcgtgctgcgcatggtcggacaatggatgggcaaggcgcgcaagatggccgccgaattccagggccagttccaggaagccatgcgcgaggccgagatggccgacctcaagaagagttttgatgaggtcagggaagccgcaaccggcatcaccagcggcaacatcatgacctcgctgcagaaggacgtcaccgacgccctgcagatcgacaagccggtcgatgcgcaggtcgcttccgcaatcgacgcaccggtgacgtcaagcgacgcaccggtgacgcccacaacgccggccgagccgacgccggaaaccttcgtcgaggccgagacgcacgcggccgccggcgaaccgctcgcgatcaccaatgaagtgaagcccgagcctgcgccgcacgacgtcaccccggcacagcccgacgtgctcaaggacgcgagggcgtcatgagcgccgaagacatcgaggcctccaaggcccccttgatggatcacctgatcgagctgcgctcgcggctgatcaaggcgctgctcggctttgccgtggccttcatcatctgcttcttctttgccaagcagattttcaatgtcctggtctggccgttcatctgggtggcgggaccggagaattcgaaattcatctacacggcgctgctggagtattttctcacccagctcaagctcgcaatgttcggggccgccttcatctcgttcccgatcgtcgccggacaggtctacatgttcgtggcgcctgggctctacaagcacgagcgcaatgccttcctgccgtatctgatcgccacgccgattttcttcgtgatgggcgcgatgctggtctacttcgtggttttcccgatgttgacgcgtttttcgctcggcatgcagcagaccgccggcgcggagaccgcgcagatccagctgctgcccaaggtcggcgagtatctctcgctgatgatgtcgctgatcttcgccttcgggatcgccttccagcttccggtgatcctgaccttgctcggtcgcatcggcatcgtcacctcgaagatgctgaaggagaagcggcgctacttcatcgtgatcgcgttcatcatcgctgcggtgctgacgccgcccgacgtgttgagccaggcctcgctggcgatcccgctgctcgcgctctatgagggcgccatcgtcgcggtccggatcgtggagaagaaggcagcgaccacctcgtcgactgcgccgtcggcgaccaaccccgccgagtagggcggttcaggccgcacatccgctgtcataccccgcgaaagcggggtatccagtacgctggcgccgctcggtgacgcactgacgtctctggaatactggatcgcccgccttcgcgggcgatgacagttgtgctagttgaggcacgctgcaaaacgttgacatacaacggtatctgcaagtgcgacgttaggaccccgactcccatgcacgacatcaaagcgatccgcgacaacccgacagccttcgacgccggcctgaagcgccgcggacttggggcgctgtcgccgtcgctgctggcgatcgacgagaggcggcgtgcggcgatcctggcctccgagcaggcccaggcgcgacgcaatgcggcctccaaggagatcggcgacgcgaagaaggccaaagacgaggcgcgtgcggcgaagctgatggccgaggtcgccgagctgaagaccacgatgccggagctcgaggcggcggcaaagacggccgatgacgagctgaccagagagctctcgtcgattcccaacctgccgctcgatgaggtgcccgacggcaccgatgaacacggcaacgttcagcaccacgtgttcggcaaagcgcgcgactacggctttgcaccgaagctgcatgacgatctcggcaccgcgctcggcaccatggatttcgaggcggcggccaaactgtccggcgcgcgcttcgtcgtgctgaagaagggactggcgcggctcgaacgcgcgatcgggcagttcatgctcgacctgcacaccggcgagcacggctacaccgagatcaacccgccgctgctggtgcgcgacgccgtgatgttcggtaccggccagttgccgaaattcgaggacgaccagttctgggcgatcaagggcgaattgctcgcgacgccgaatgccgatctgcgcagcgagcggctcggcctgattccaaccgccgaagtgtcgctcaccaacctcgcgcgcgaatccatcctcgacgagaaggagctgccgatgcggctcaccgcgctgacgccgtgcttccgagccgaggcgggtgcagccggccgtgacacccgcggcatgatccggcagcaccagttcaccaaggtcgagctggtgtcgatcacgacgccggaagccagcaaggacgagctagagcgcatgctgtcctgcgccgaggaagtgctgcgccgtctcgacctgcactatcgcgtgatgacgctgtgcgccggcgacatgggcttctccgcgcagaagacctacgacatcgaggtctggatgccggggcagggcgacggtggcgcgtatcgcgagatctcgagctgctcagtgtgcggcgacttccaggcccgccgcatggatgcgcgctaccgcggtcccgacggcaagccgcgcttcgtgcatacgctgaacggctccggcacggcggtcggccgcgccttgatcgcggtcatggagacctaccagcagcaggatggctcgatcgcggtacccgatgtgctgcagccctatatgggcgggctcaaggtcatcgagcacggcatgtagagcgagggccagtgcgatgccgctccaccgtgacatccactggcttggtcgacaatgggccgtcaccggccatggtctgcaactgatcaatcagaagcagatgggctactacgacatcgaggccgcgcgcttgtgggaagcccgcgtcagcgaggtgcaatcgaaggcgtggatcgaccggcccgacttcgacaaggcgctggagatcgcgcgcggcaaattcgcccaattggcgccggccgattggccgccgccggcagcggttgccgcaccgccgtctccggtccgtccggcggcgccgcgcactcaccttgacgcagcgtcggtgccctcgatcgaggaattgctggcgcggctgaaatcgaaatcggctgcgccgccgccggtcgctgggccggccgaggtggcacccgcgccgccgcagcaacctgtgtcgcccaagcttgaaacgaccaggcctgacacgcgcatgcctgagacgccgacgcttgagcctcgcaatgtcgaacccgtcggatccgagcccctcaaatcggagcttccgaagccgccccggcctgaagcgcgcagggtcgaaacgcccaaggttgaagctgaacccgccgaagctgaacctgccaagacggagcctgcctacgctgagcctgcgcaacgggaggctcccaagcttgaatctccggagcccgagccggtcaggccagaagctctcaagggcgatctgcctcaggcgccggcgagaaagcttgagctgccgccgctggtacccgtgataaagagcattcggaagccggcctggccggtattcgaccgcaagattgccggcagcggcaagtttctgcagccgtggcgcgtgacgtcggcgagttggcgcgggccttcgtcgggtttgcctcggcggccctagccggttaagacggcagtcaacgcaagaagccgcaactcaagaaaccggcgtcgaatcagaacaagaggcactttgacggatgcgaattctctgcaccaatgatgacggcatcaacgctccgggcttgaaagtcattgagcagatcgcacgtgccctgtccgacgacgtctggatcgttgcccccgagctcgatcaatccggcgtttcccactcgttgtcgctcaacgatccgttgcggctgcgcgaagtcagcccgcgccatttcgcggtgcgtggcacgccgaccgattgcgtcatcatgggcgcgcgtcacatcctcggtgacaagctgcccgatctcgtgctgagcggcgtcaacaagggccgcaacgtcgccgaggacgtggtctattccggcaccatcgccggcgcgctggaaggcaccatcctgggttttccgtcattcgcgttgtcgcaggaattctcgatcgagacgcgcaacgcgccgctgtgggacaccgggctgaagttcggacccgacatcatccgcaaggtgatcggcgccggcgtgcccaggaacacggtgatcaacgtcaacttcccgtcctgcatgcctgatgatgtcaagggcatccggatcacgcggcagggcaagcgcaatcagggctttctgaagatcgatcgccgtcacgacggacgcggcaatccatatttctggatcggcttcgagcgcgccgcgatgatggatacgccggccgagggcaccgaccttgccgcgcttgctgcgcgctacgtttcggtgacgccgttgcggctcgatcgcaccgatgaggtgttttcggaaacgctggtcgatacgctgaagtgatctcgtgacctagaccggcgcgctgcgcatcgcgctggagatcgcctgggccagtgtttccagctggaagggcttttgcagcgccggccggtcgcgatattccgggggcaggccggatgagccgtagccggtcgcgaagataaacgggcggttgcgggcgttgatcaactcggcgaccggcgtgatgaccttgccattgacgttgacgtcgaggatcgcgaggtcgaattcggtcgattgcgcgagcttgaccgcctcgccgatttcgccggcctcggccgcgacactatggccgagctcttccagcatatcggcgaccatcatccggatcatgacctcgtcctccacgaggaaaactgaacagcccgccggccgtatcgctgtcatgatggaatccttgcccgtccctgaaataggctcgcaaataacactacagggcgcaatgcaaacgtttgaggattagtcggtttccggcacgcgccgctgcgtcgcctgatcgtcctgactgactcgttgcgcgagattcgtccagactttgggcggggacaacggctcaaccgccgcccgcgcatcgtggtgctatcagcgcgtcgctaccgattatatgggaagcttgcggatcggcgccaagacgaatcggagcgccggttcctgaccgggaacaaaaggtgacgggaaatttttccttaacgcggtatttcggaattcaatgtcatctagcaggagcaagattccgcgctgctgcccagagacgctgatgaacatggccctgaagcccgaccccaccgagaagatgatgtttcagctcaccctacggcggcgaggggtcagcgatcaggcggtgctgcgtaccatggaggaggtgccgcgcgagatgttcgtcgatccgcgcgatcgcaacgaggcctatcgcgacagcgcgcttgcgatcgcctgcgggcagaccatcagccaacccttcgtcgtggcctacatgaccgagcagctgcagttgcagaaggaccaccgcgtgctcgagatcggcaccggctccgggtatcaggcggcggtcctgtcccggctctgcaagcaggtgctgaccatcgagcgctaccggacactggcggatagcgcgcgcgagcgccttgaaaagctcggctattacaacatcgaggtgctgctcggcgacggcttcgacgttcccccgggcgcgggcgatttcgaccgcatcatcataaccgcggcaatggagcagatcccggagaagctgctggagcggctcgatccgggcggcatcctgatcgccccggtcgggccgcatcaaggcacccagaccctgatccgcgtggtgcggaccgagaacggcttcgatcgcaaggagctggtcgacgtccgctttgtgccggcgctgccgggaatcgcgcgcgaattgtgaattcggcgatttgctgcttggcaccaacgccttattcgcagggttaagcggttatttactcgcgacgtgtttactcaaaacagtcttttgttgcgtacgagtgagtaaccatgtctggggtagttgagttgcttcgctcgcgtcgcgtaccgcaggttgcggtgctggcgctgatgtccatggcttttgccggttgcagcgccgatatgtcgtcgcgcttctcgcaaaactcctattcacaaaatccgtttgcgttcgatccgcagccgaccggcactgtgcagcaggcgccgcgcgaactgccgcaatacgcgcggccgcggacccaaccgcaatattcgcagtatcagtcgcagccgttgccgccgcccgttgcggcgccgcaatcctatccggtcgccggaggcggcgtctccggcggaggccgtgggctttcgtcctacaccccgccgcctgcacgcccgcagatcgaagccaccggaagcgtgccgcattcggtcgccgcagcgcatggcggcaccaccatcatcgtcggcaccagcgacacgctcgacgtccttgcgcgccgctacaatgtctcgaccgccgagatcctgcgtgccaacggctacaagggaccgcgcgcgctgtcgcccggccagcagctgatcattccgcgtccaggagcggttgccgcggcacctgcaatggccgcgcctgccacgcggcccgtcgcggtggcggccgcgcctgccggcgtccactatgtcaatcgcggcgatacgctgcacagcatcgcgcgccagcaccatatcccggtggccgagctcgcccgtgccaacaacctcgatcagtcggccaggctcggcctcggcatgaagctcgtggtgcccggcgccaagaccgcgatggcggctcccgcgccggttgcgcaacctattgccgctgcaccggtggctacggcggttccggccccggccgtggccgccccgcgggtggtcgccagtgcgttgccgcagcagagtgcccggctggttcagccgaccgccagtgtcgagcagcccgcagccgtcgcggagacgccggcggccaagccggccgagaccaccagtgcgctgccgaccttccgctggccggtgcgcggcaaggtgatcaccgcctatggctcgaagaccaacggcaaggtcaacgatggcatcaacgtcgcggtgcccgagggcacgccggtgaaggccgccgaagacggcgtcgtcgcctattcgggcaacgaactgaaggggtacggcaacctcgtgctggttcgccattccaatggctacgtcaccgcctacgcccatgcgagcgaggtcctggtcaagcgcggcgacaccatcaagcgcggtcaggtaatcgccaagtcgggccagaccggcgaggccggctcgccgcagctccatttcgaaattcgcaagggatcgtctccggtcgatccgctccagttcctcaacggcgcgtaagcgacgcgccgggacttccaagtctcacaacaaagacaacgggggaagcgcaagcttcccccgttttgttttgggctaaagcatgatccggaaaagtgcgaagcggttttccgaaaagatcatgctcaaacaaggagctaaagcgcgatgacgattcaacccaatctcatcgcgctttagaagtcgaaggtcatgccggtcgtgaccgcacttgccttgttgccggcgaccacgttgttgttggcgtcgcgaccgcacacgccatagccgtgaccgctcacgccgaggcagtaatgcgcgccggggccgttgcgcagatagctgccgacgagataccaggttgcgaacgggctgaagtggtacttgacgcctgccgcatactgatcggcgctgctgtccacgctgttgagcgcaaagtccgccgagccggccgccggcgtgacggtgtagttgttgaacacgccggtccccggcgagccgggcgaggcgttggcgtgggcccaggacgcgctgacgtcccaggcgccgaccgattgcgtggcgctgatgaaatagccgtcgcgcgatcgctcgttgaagtcggcaacggtgtgctcgcggcgcatgacctcatagatgccgtagagttgcagcttgccgatgccgtcgttgaacccatagccggcgccgagcttcgcggcccattcgttggcgatgccgaccgccccgggcggcacgatcagcacgccgccggtgctgagcggcgtcaccgcctcgtcgccggtgcggttggtgccctcatgcagctcataggctgcgactgcggtgaacggtccctgattgtaggtcagcgacgcgctgtagaggttgccgtacgagccgtccgtgcagccctcaggcgccgcggtcagcgggaagccgctgccgctgccgcgggaggacgtggcgggacagttgaagtcgccgagcgcgaaatcgctgttgtcgcgcgccgtgttctgtcccggcgaagccatcaaggttgcctggaagccgttccagatcggcgactcgtaccagactgcgtgcgccgcgcgccaatcgaactcggcgcgcaggtcgccgccggtgttgcccatgatcgaattgtagtcagcaagcgtggccgagaacggatcgaacttcgcggtcgatttcttgtacggcgtatcggccttgccggccttgatggcgccccacggcgtttccatgccgatgaagctgtcgcgggtgccgaacgcggcgcgctcggtcggcgttgcggcgacctcgaccagcgattcgaactgggccacggcggcccatcctgcgaagccgtacggctcgagattgtgccgggcgcgaacgccgaagtaagtgaggttgctcgcaacgccgaacttgttgccctgatcgaacacaccggcgttgaagaagtcgcccgagaggtcgacgtggccgtagagcgtgacggtggtgttgtcgacgaaggcattggtgcctgtcgccttggtatagagcggtgcgccaccgatgctgacgactgcatgttcgggagcaggtggcgtcggggagggggccacggccgcgtgctggaccggattgcccttgggcgttgctgccgcggttgcgggaggaacggggtggctcgtgatgtggttcacgcggtccctgagttgagcgttctccttggcgagtttcgcattgtttcgttcgagtgcatcaagacgcgccatgacgtcgtcgagcgtcgccgcttgcatcggaccttgcatgagcgccaggcacaccgctgcggatgctgttcctgcgagaagtcttttcttcattcattcccccatttgccaattgcctcggcggggtgccgaggctgcaaacggtcggaaagcctaaggtatacgaaatgccagatacacgggtgtggagtggcctgaagatgataaacacgtcgtgtgacataatgggtactataatactgttgcagtgcatcaattgtcgcacagcagttttgggaataaaatttcacttacttgcttggagctgaagttattgatgcaattactctttgcaaactgtgtcagtgttgctgacaagttatgaccgcaacgcaacatcacgcagtgaaattgggataatgaatgccaatttcgggcaagaatggacgccattgatggttcaatattaccgcgtcggatcaaggccggctgagatccgctcgaccatttcgcgcaggaattgcggtggcccatgcgcgtgccattcgccgtcggattgcagcagcagcggccgccgcatgtcacggctgaaggcttcgagccaggcacgcgccttttccttcgggcgcgtgccgacggcgaccgcgacatcgacggggatcgtccgccagacgaagctcgcgggaaggaaaatgagatcggacctgtcgggacgcatccagtcgggcagcggacttgtcggcgtcagccagccgcagacgaaattccggcagggatcgaccggacgctcggcgtagatcgtgcagcggcccgcgctgctgaacgggcacggctgccccggatggacgtcgtggtcgcgaatccggatcttcagccagccgtcgcagcaagcggtgcactcgccacatcgtcttgcagtcgtgctggggtcggccggcatggggcgagtgtagccatgccgcgccgaattcagaaggcccgcggttcgatcaaagcgctcgcttgcgctatgccccgctcagccgcacgccgagccgtccggcgagttcctgtgtgtactgccaggcaacgcggccggagcgcgagccgcgcgtggtcgaccattcgagcgcctcgcgctcgagctcgtcctcggcgatcttgatgccgtaatgggcgcaatagcccttcaccatcgcgaggtactcgtcctggctgcagcgatggaagccgagccagaggccgaagcgatccgacagcgacaccttctcctcgaccgcttcgcccggattgatcgcggtcgagcgttcgttctcgatcatctcgcgcgccaggaggtggcgccgatttgaggtcgcatagaggatgacgttgtcggggcggccttcgataccgccatccagcaccgccttcagcgacttgtaggaggcgtcgttgccgtcgaaggacaggtcgtcgcagaacacgatgcagcggaacggagagctgcgcaaaagctccatcaggccgggcaggctctcgatgtcctcgcggtggatttcgatcagcttcagccggtcggccggcttgcggtcggcattgattgtggcgtgcgccgccttcaccagcgacgatttgcccatgccgcgggcgccccacagcaacgcattgttggcgggcagtccgttggtgaagcgctcggtattctccatcaggatgtcgcgcatccggtcgacgcccttgagcagcccgatctcgactcggctgacgcgcggcaccggggccaggcggccgtccgggtgccagacgaaggcgtccgcggcgccgagcgactcggctggatcggcggcagccggggaggcggccgcgaggcggcttgcgatggtctcgagggcgttcgcgatccgctcggcggtggcgccatcgagcggcatgaccgggcgttttgtcgcggcgtttgcggctcgcttggcggcagttttgggggcggttttgctggttgtttttttggcttttttcggcatttgtccagttcctgacggcgcagccttatcgggctggcggcggtcccgcaagcgccctaaatgaaggtccgttaacgttgcaattgggaccgcggccgctatagtccgcgcgaatttgtccggaccgccataccgccccgaaggtcgagggcactgccggttctttcccgtcttatccgaggatcgtccgaatgctgattactcctgcgtttgctcaggctggagcaagtggtgacaccaacagcatgttgatgtcgctgctgccattcgcgctgatcttcgtcatcatgtacttcctgattctacgcccgcagcagaagaaggtgcgcgaccatgcggacctcgtgaagaacatccgccgaggcgataccgtggtgacctcgggcggcctcgtcggcaaggtgaccaaggtggtcgatgacgaccagatcgagttcgagatttcggacggcgtccgcgtgcggcagatgcggcagatgatttcgggcgtgcggaccaagggtgagccggcgaagggcgacgccaaggacgaggcatccgcgagctgatcgccgcggaagccttttgccgaacctgacaggtcaattcgatgttgtatttcacgcggtggcgagcgctggggatcatcctgacagcgctggtggtctgcctgtgcgccgtgcccaatttcttccccgaagcgcaggtgaagacctggccggcctgggcgcagcggcgcctcgtcctgggcctcgatctgcagggcggctcgtatctgctgctcgaggtcgactccaactacgtgaagaaggagaagctcgagcaggttcgcgacgacaccaggaaggcgctgcgtgacgccaggatcggtttcaccgggggcatcacgatccgcaacgacgccgtcgaggcccggatcgcgaaggaaagcgatgttcccgcggcgatcaccaaacttcgcgaggtcgcgcagccgatcggcggcttgctcggctccagcggccagcgcgacgttgacgtgaccgatgccgggggcggcctgatccgcctgaccgtgtcgcagcccgcgatgatcgagcggatgcgcaagaccatcgaacagtcgatccagatcgtcgagcgccgcgtcaacgagctcggcaccgtcgagcctgtgatccagcgtcagggcaccgaccgcatcctggtgcaggtgccgggtctgcaggacccgacccatctgaaggatctgctcggcaggaccgcaaagatggaattccgcatggtcgacacctcggtgtcgcctgaccaggcccagcagggccgggtgccgccggactccgagctcctgatgagcgcggcgccgccgccggttccgtatgtcgtcaagaagcaggtcctggtctccggcggcgaactctccgacgcccaacccggcttcgaccagcgcaccggcgaggcgatcgtcagcttcaagttcaacacgtcgggagcgcgcaaattcgcacaggcgacggcggacaatgtcggccagccgtttgcgatcgtgctcgacaacaaggtgatctcggcgcccgtgattcgtgagccgatcaccggcggacagggccagatctccggcagcttcaccgtgcagtcggccaatgatctggcgatcctgatgcgcgccggcgcgctgccggcgccgctgaccgtggtcgaggagcgcaccgtcggtcccggcctcgggcaggactcgatcgagaagggcgagctcgccgcttatgtcggctcgatcctggtcatcgtgttcatgctgctcacctaccggctgttcggcgtgttcgccaacattgctgtcgcaatcaacgtcgccatgatcttcgggctgctgtcgctgctcaacgccacgctgaccttgcccggcatcgccggcatcgtgctcaccgtcggcatcgcggtcgactccaacgtgctgatctatgagcgtatccgcgaggaactgcgcggcggccgcaacgcgatctcggcgatcgacgccggcttcaagcgggcgctggcgaccatcctcgactccaacatcaccaccttcatcgccgccgccgtgctgttctacatcggcaccgggccggtgcgcggctttgccgtgacgctcggcatcggcatcatcaccacggtgttcaccgccttcacaatgacgcgcctgatcgtcgccgcatgggtgcggtggaagcggccgcaaaccgtgccgatctgagaggcctttcgtgacccataccgttctcattggccttggcatcctgatcgccgtgctgaccgtggtcgcggcgctcggcctgctgccgtcgctgcgcatcgtccccgacgacacacatttcgacttcacgcgctttcgccgcatcagcttcccgatctcggcgctgctctcgatccttgccatcacgctgttcttcacccacggcctgaatttcggcatcgacttcaagggcggcacgctgctggaggtgcgggccaagtccggcactgcagatatcgccgcgatgcgcacgaccctgaacggccttggtctcggcgaggtgcagttgcagcaactcggcggctcgggcgagggcgacgtgcagatacgcgtcgccgaacaaccgggcggcgacaaggcgcagcaggacgcggtgggcaagatccgcggcgcgctcggcgaaaccgtcgactaccgccgcgtcgaagtggtggggccgcgcgtctccggcgagctgcttgcctacggcatgctcggcctgatgctcgcgatcgtcggcatcctgatctacctctggttccgcttcgagtggcagttcgcgctcggcgccatgatcgccaacgtccacgatatcgtgctcacgatcggcttcatgtcgatctcccaggtcgacttcgacctcaccagcatcgcggcgcttttgacgattctcggctactcgctcaacgacaccgtcgtcatctacgaccgcatccgcgagatgctgcggcgctacaagaagatgccgatgccgcagctcttgaacgaatcgatcaattcgacgctgtcgcgttcgatcatcacccacgttaccgtgacgctcgcgctgctcgctctgctgttgttcggcggccaggcgatccacagcttcaccgccgtgatgatgttcggcgtcgtgctggtcggcacctacacctcgatcttcatcgcggcgccgatcctgatctatctcggcgtccacaccacgcgaggtgaggcgcaggatgcgccggccaagaagccggacacggcggcagccaagaagtagccggtcatgagcaacccctcggacgctccccatcttccgaggtcggcgccgatcgaggcctacggcaagggcggcttcgcgtttgccgatatgtcgcatcgcggctcgctgctgtgcctgccggactcgatctgggcctggccggtcacgaggccgcaggacatcgacgaatattcgctgcagaaggtgttcgcggccgccaacgcgatcgacacgctgatcgtcggcaccggcaccgaggtctgggtgccgccgaagggcctgcgcgaggccttgcgtgcggtccgcgtcgtgctcgaccctatgcagaccggtcccgcgatccgcacctacaacatcatgctgggcgagcggcgccgggtcgcggcggcgctgatcgcggtgccatgagcgcgacggaggcgccgagggatggcgcggccttctgcgccgatctggtgcggacccatgacttcgtgcgctacgcgtcgaccttgttcctgccaggtccggagcgccgggcgctgctcgcgatctacgcgttcaacatcgaggtctcgcgcgtgcacgagcaggtcagccagccgctgcccggcgagatgcggctgcaatggtggaccgatatgctggcaggcgccgggcacggcggcgtcgagggcaatccggtcgcggcagagctgctgtatgcgatccgcaatcaccgcctgccggtctcgccgttctcacagctggtcgaggagcaccagttcgatctctacaacgatccgatgccgtcgctggtcgcactcgaaggctatctcgacgccacggcctcggcgctgttctcgcaggcgacgcgcgtgatggcgcggccatcggaggcgatcgatcacctggcccgccatgccggccttgcccagggcatggcgcaggtcatcgcggccctgggccgcgacgcatcgcggcagcaactgttcctgccgctcccgctgctgcagcagcacggcagcagcaaggaagaggtgtttgccggcaagccgacgccgaacatccgcgctgcgatcgaccagctagcggacgaggcgcaaagccatctcaagaccgcattcgggctgcttgcggacgtgccatccggcgtgcggccgatcttcctgccgctcgctcacgtcaggcgcgagctcaaccggatgaggagggccgacaacgatccgttcctgccgaagccggtctcgcgcctgcgcacgctgtggacattgtggcgagccgcgcgcaccgaggagttcggcagctagctcctcgctttcgcgatgtgcttggtgaagatgcggaccgttacgcccttgaccatcgggccgctgtcatagatgtcggatgcgatctgctcgaccgcgtcgcgcagcgcaacgaactgggcttgtcgcgccatgctcgcagttccacgcgtgccggcgagctcgtccattgcagcgtcgctgatctggcattcaacttcctggtcgccgttcatcatggtgaagccgaacgcgagacgttcggcatcatatcccccgatacggccacgggtgagtggcattaagctcgtcccttgagcgcgctagcccacgcaaagagtggtgcttcgcagcgcgtttgtcgagggctgcgcgcccggaagtgcgcatggtctagcgcagctgtcgatccatctcggcgacttcaaaattgaagcgatcgcgcaggttcttgcgttgctcgaggatgtccttgaggaattcgcgatcggcgtcgctgcgcatcatcggctcgatcaggtcgatctggttcatggcgacgagctgcaggatttcggtgcgcggcttgccggccgcatcgcgcggcagtgcatgcacgatctggatgtgttcgggcggcttgacgcccttggctgcggtgagctcgttgcgcagcgtcttttccagcgcggattggtctgcctcgacgaaggcgtacagcccgacgccgacgcgccggtcggcaaacgcgacgatcgcggtgtcgcgcacgtcgggattgcggcggatcaaatcgaccagcaccggggcgtcgttgaccagccgccggccgccgccctcgcggtcggtgaaattgaagatgccgcgcgtgatcgcctgatagaccttcttgccggtcttcagccagacgctggcgaccgcggacttcttcgccagcaccttgcgctctttcggcgtcaacgcctccggggcgtagctgcgcttgtgcttcaacagatgccgcagatcctcataggccgcgaggcggaacagccggcttcggctcttgaagcaggcggcgagctggaagtcggtgaggtaggcgcggccatcgcggccgaccagccagttctgctccttggcgaggtcgttgtggcagatgccggcgcgatgcagcttgcgcaacgcttgcttggcggagcggaaataggcgacgtcgccatgcggcttcgccagatgcagcgccgcgccgtcgatgaagccgcgcaccagcgcgcgtcggcccgcccacaacagcttgggtccgacgttgaggtcgcgcgccagggtcagcgcacggcgttcacgcgagaacagatgcagcgccacggcgaacgaccagaacggcacctggtcgagccggcgcagcaccccgtcgacctcgccgtcatcgccgcggaatcggccgcgctcgacggtcgagaacacgtcgcgcttgagcagcacgccctggctccatcgcgccgacaaagtggcgtcgtcgtctttcggcaagctcatgacggtcaggccgctgctgcaacgcgcaggtgctctgcgatccagtgatcgaggtcggcgagcgcccgcgcgctgatcgcctgcttcttggcgaccgtcttctcgttgccgcgcagccgcgagccgtccggcttcttggtcggagcgctggcgagaggcgggaacaggccgaaattgatgttcatcggctggaacgagcgcgcaccggcatcgatggtttcgatgtggccgccggtgatgtggccgagcaacgcgccgagcgccgtggtggcgggtggcgggggcagcgccgcgccgcgcatgtcggcggaggcgcagaggccggcgatcaggcccacgctggccgactcgacataaccctcgcagccggtcatctggccggcgaaccgcagccgcggctgcgcgcgcaggcgcagttgcgcatcgagcagcttcggcgagttcaggaaggtgttgcgatgcaggccgccgaggcgggcgaactccgcgttctcgaggccggggatggtgcggaacacgcgctgctgcgcgccatgcttcagcttggtctggaatccgacgatgttgtagagcgtgccgagcttgttgtcctgccgcaactggacgatcgcatagggcttgacggttggattgtgcggattggtcagtccgaccggcttcatcggcccgtggcgcagcgtctcatggccgcgctcggccatcacctcgacgggcaggcagccatcaaaatacggcgtgttggtctcccaatccttgaagtcgaccttctcgccatcgagcagcgccgcgacgaaggcatcgtattgctctttcgtcatcgggcagttgatgtaatcggcgccggtgccgccgggaccgaccttgtcgtagcgcgactgaaaccaggccaccgacatgtcgatggaatccttgtgcacgatcggcgcgatcgcatcgaagaacgccagcgcgttctcgtcggtcagctgcctgatggcgtcggcgagcggtgccgaggtgaggggaccggtcgcgacgatgacgttgctccagtcagccggcgggagccctgcgacttcctcgcggctgatctcgatcagtgggtgttcgttcagggccttggtgacggcggcggagaagccgtcgcggtcgaccgccagcgcgccgccggcgggcacctgattggcgtcggccgagcacatgatgagggagcccagtcgccgcatctcggcgtgcagcagcccgaccgcgttgttggcagcatcgtcggagcggaaggaattcgagcagaccagctcggcgcagccttcggtccggtgcgcttcggtcatccggtgcgggcgcatttcgtgcagcacggcacggatgccggaattggcgacctgccaggcggcttccgagccggcgagccccgcgcccacgatgtgcacgggttgggaagaggagtgatgcggtgtcatcgcgcagcgttagcgcgtttcgaaaccatatgcatctgaaaccgcaccacaaacgataacgcccgctgcaggagcgggcgttatccgttcatcaattggcttacggcggattagccgttgtaggtaccggcggcaacgcgcggaatgtccgagcggtcgaggccgatatcggccagttcacgatcgctgagctgggacagttcgctgacattgcgctgataatcccggaaagcctggatcatgcggatgagcgagagcaacatgatagtctcctagtagttcagattcagcttttccaaagcctcatcgttgaagtgaatatagatgatatagtgcagtgcggtaggttcaatgttgcgatgcagctaggctcaaaacgcatggcgaaggtaagttccggttaaccgtttgcggcttcggtcggtggcccggaggtgaaagttccctcggtggtgctggtcgtgataaaatgttctatagatcagtaggttgatggggctctactggtctctgcggtgtcctccatgtggtaattaaggaccgcgcaatcaagctggaacgcccttgtgggtgagggatcacttcgatgtgttccatgcgtgattcgcatgcgacatcttggcattagaagtgagtttgtattcataatatgtcgctgcggagacgccgacggacgtagcgtcaatcagccgcattgactcctgaggtaattcagcactccgggatgcgaatttctgccagggagcaagacgctgctaagggcgtctgctgattatcggaacggcgctttgattgaagtgaacgtgcccgaccatgctaatgcggcgctgcttccttaccggcttgtaatcaaaacattatgcaacgcatgcgcgatccgcgtgcagcgccgatcacattcgtctcgcgtgaagttcattctgaacggtgccgggaacagcgaataatcgttccgcagattccgcaatcacgctggattctgttcaagaacaaaagatggaacatcccatgatcaagacattgatcgcagcggccagcatggctgccgtcgtttacgccgtcgctccggctcaggccgctcatcgtcatcatcatatgggcgtcggctgcagcggtgccaatttcggcaagactgaagctgccgtcgaagcgatggctgacaatgaggtcaaattcgcggcggagaaggaagtctcgctcgcccaggatgcgatgctgaatgacaagtggggtgcatgcggcgcgcatctcagcaaggctgccgaagccagcatggcgaagtaagcgttgatcatgacgatatgggccgattgcctggggcaatcggcccatattatttggctggagcgcgatcggtccggattggatcaaggccattgttcgcgataggcccttttcgcgccgattcacgcacatctgaagggggcgcgccgtattggcggcgaaaggtgcggttgaaataggacaagtcgccgaaaccaacctcaaaggcgaccgcgctcacaggccgatcggcgtggcgcggattgacgagcaatcgatgcgctcgcgcgagacggcgtccaagcacgaattgggaaaatgaggtcccgtcgtcttcaaacatccgttgcacctggcgcggagtgacgccgtgccgccgcgcgacagcggccaccgtgaggctgccatgattgagatggtcgatgatatcggccttgatggcgcgcagccgtgctgcgcggacgccctgcccacgggcaacagccgcggcgtctctcgttgcgccgagcgctacagcgatcagatcgtgcacatgcgaggccacgtcgtgccttagctgaggcgttgcaagcgaataatcctcctgcagcgccccaacatagctcaccagcaatttcagcgcttcggtggagcgtgcaataggctgcatcacggaggaatcgacgctgctcaccagcggctccagcgccggccgtggaacgtgcaggcacagaatcttcgccggggcggggcaaaccatcgcgaccggatccgccgagctgagcagcagcccatcgccggcgctccaagagacctcgcgtccgcgctgcaccatcgtggcatcgtgcgaccccatcaccaggacaagcccgtcgttgccgtccgccaactgttcggcaccccgctcgtagcgaaacgccgacatgctggccgacgtgatggacagcccgggcagcatccgcacggtcacgtccgcatgcaacgaatgatccggcaacggcacgaggtcggccttcagcaccagccggccgtacagatcacgccatgcggccatacggtcccgctcggcaaaatctgccagggagaaccgggaaagtgcaacgtcgtcggccgtcgaggtcatcgggaaactcagggtgtcgcaacatgtgtcggcgaaccgccgcgtctcgttcaccggggcgccccggttcggcaacaaacgctcgcaacgcagggcttctagccaatgacttggctctgtcaaagcgcctatgtgtgttccatccccggttcgcccctgcggcaggtgcagtccgaggtggaacgcacctcccattggccgaaacgtattccgattgaaatggcgacccgtcaggtcgttttcatccaaggtgtttgtcgcgcctgtcctagccggcgggcggacaaatcagtaaacgctatagcgctggatcggactgcttgcagaaggataaagggtgatcttagtactacttttgcgcgtccataccgcgcacgtcgacgtgaggcttgcaatgggcatcattggcgtgctggccgtgttcctcggaatgttgccgtttgctcgaatcgtgtaccggaccgcatcacccgagacgtcgccggccggcgtggcaaagcagacagttcgaacctcatgcgcgcactgatcgccgcgtggcttgtcctcgtcgcgggaagcaacgcatcagccgccgaaggtgccgcaacttcctgccagctgatcaacggcaagtcgatgatgcaggccgaactgttgtttgggcgtcagatcgccggacatggccgcgtgtcggacgcccagtggtcggacttcctcaagagggaggtgacaccgcgctttccagatggcttcaccctgctcagggcgttcggccagtggcgcgacccggaaacgggccgaatcacgcatgagccgtccttcgtcgtgcgcgtcatcgctgccgagaccccggagaccttggcgcgcttgaaagagatcggctccgcgtacaagcagcgctttcaccaacagtcggtgggcctcacgctctcggtcacttgcgcatcgttctgaccactcgctgtaacaacaattgcggcgacataccttatggcgccttggcgagttgggtggcgaagtagccgatcgtcttggcgtacacctcgctcttattccactgctggatgaccgcaaaattctcgctgccgggctcccagcccttgcccttcttccagccgtagctcttcaggaagttcgccgtcgaggccagcacgtccggcacgttgtgcaggaggtcgcgcttgccgttgccgtcaaagtcgaccgcgaacttgatgtaggacgacggcatgaactgggtctggccgatttcgccggcccaggcgccgtgcatctcctgcggcgcgagatcgccgcgctcgacgatgcgcagcgcatccatcagctcggccttgaacatgtcggagcggcggcaatcataagccagcgtcgccagcgagcgcagggtcggaaacttgccggtgttgacgccgaaatcggtttccagcccccagatcgcgaccagaatttcgccgggcacgccgtaggtttcctcgatacgcgacagcaccgagccgtagcgcttcatcatgtcggagccgcgattgagccgcggcggtaccatgcggcccgagaactgctcgaaggtctggctgaacacctgctgcgaatggtcgcgcgccaggatcgccttgtcctgcgtgacgccattcaatccggcctggatcgcgttctgtgaaatccccttcgccacagcctctttcttgaaatcgtcaagccaggactcgaacgtgcccgtgccgcattgggcggcgagcgcagacgcggtcgaggtcagaagccacgccccaacggcgagcgtgcgaaaggacaagcgagaggtcataggcaatttcactccgaagtctgcgttgccagcgatgggtcgcggaggcggcgggtatgttcgcggcaacagcggccaaaacaaggctcgtgacccgggccgcctttctcaggtcgcgctgcaaatgccacgccaatttcacatccatttgacgatccgggacgacaaaccgccggccgatcatatcggccggcggttgctgtgacgtttacgagctcaggttgactggcgtctatccgcgaccgctgcgccgccaggggaacaggttggccgggaagtcggcggcgggcttgcgctcgcgcggctcggggatcaccggccgagcgttcggatccttgacgatgacctcgcgatagagatgccaggtggcgtggccgagcagggggatcacgacggcaagcccgagaaagaacgggatcgtgccgagcaccagtagcaccgcgaccgtcaggccccaggccgccatcggcaccgggttttgcgcgacggcgcgcatcgacgtcaccatggcttcaccggcggttgcttggcggtcgagcatcatggggaaggcaaccacgctgatgcaaagcgcgacgagcgcgaacaggaagccgacactgcagccgaccacgatcagccaccagccttgcgaggtggtcagcacgcgttcgacaaaatcgggaatattggccgcggtctcgtagccgaacaccgccgtgtagatcgcctgtgcggtggcgatccaggtcacgaacaacgcgaacagcagcgttcctaccccaagcatcgcgccgaatgacggcgaacggaatacctccagggcgtcccatgcggatgcttccccgccgtcttcgcggcggcggctcatctcgtacaggccgacggcggcaaacgggccgagcagggcaaaacccgcggccagcggaaacaacagcggcagcacggaatagccgtgcacggtgcgcgcaagcacgaggccgagcaccggatagatcagacacaggatgatggcgtggcttggcaccgccttgaagtcttcccagccgagacgcagcgcttgatgcagatcggacaggccgatggtgcggataatgggtgcagatgcggcgccctgtccgccctgcgtcatcgatgtgacattgccttggtattgcgtggccatggtcgttgtctccctctgggcggtcgcattctgcgcccggcgcgcgggcacaaacgtaccgcctctcgaagcgatcacgagcaagccagacgcgaaagacagagcaggaactggccgtgtcgcgaactgttgggtgagggtactcccaaaccgcgccaaaagcactcacgcttaagtgaatgtcgcattggcaaggtattgagggggcgatacacttgaactgcgacctcggtcagccggcgcactgccgtgtggccttcacatctcaactctcttgggagcgaacgatgagcattttcggaaaaatcatgggcgcgatcttcggcagcagcgccagcgccgcgcccgccggcggaacggccacgagcgcagctcccgccggtggatccagcagcgcgtcgccgtctcccgctgctgtgcccgccggtgccgcgcccgcgcagtccgtggacgtcgcccccatccttgacaaggcggttgccgccaagggcgagaagctcgagtggcgcacctcgatcgtcgacctgatgaaggcgctcgacatcgactccagcctgtcggcgcgcaaggaactcgccaaggagctcggctacaccggcgacaccaacgattccgccagcatgaacatctggctgcacaagcaggtgatgacgaagctcgccgccaacggcggcaagctgccccccgatatcaagcactgacgggatcgtcatcccgcgcacggccagggcccgcgccaccgcgggcccttttttatggagcggcgaacatctatagatcggcggacaagaaggagagcgccgatgaaaactcctgcaagaactgccgtgaccgatctcgatcgccggaccatgcttgcgaccggcgccctcgcattggccggcgccgccgcccaatccgtgccggcccacgccgaggtggcgccgaaggcgatgtttccggtcgcggccgtgacgatcccgattgtcggcgccaccgaggtgttccaagtccgccgcatctactgcatcggccgcaactacgcagcccatgcgatcgagcgcggctccgatccgacgcgcgagccgccgtttttcttccagaagccgaccgatgccattcagaatgtcgcgatcggcacggtcgccgatcatccctatccgtcgctgaccaagaactatcaccacgaggtcgagctggtcgcggcgctgaagtccggcggcaccaacattcccgccgacaaggcgctcgagcacgtctatggctacgcgcttggcctcgacatgacgcggcgcgatttgcagaacggcatggcggccgagaagaagccgtgggagatcggcaagagctttgaccatgcggcagtgctcgggccgatccatccggctgacaagaccggccatttcacgcaaggggcgatctcgcttgcggtcaacggcacggtgcggcagagctcggatctgaagaacatgatctggagcgtcgccgagcagatcgcaaagctctccgaggcgttcgagctgaaggccggcgacatcatctattccggaacgccggagaatgtcggtcccgttgtgaagggcgacgtgctgctctgcaagctcgagggcttgcccgacatgtcgatcaagatcgtctgacgttggatcgaaagtcagccggcaaggtccgcatattccgggtgcttgtcgagatagtccaacacgaagccgcagcctgcgatcaccttgcggccgtcggcacggatcagctccagcgcgcccttgaccagctccgacgcgatgccgcggccacgcagggcgcgcggtgtctcggtgtgggtgatgatcactgccgatggcgtccgacggtaattcgcaaaggccagcccgccctctgtttcaagctcgaagcggttttggtccctgttgtcgcggacggcagccatcgcagaatcccggttgatgcactggtcttgatttaagcgcgccaacccgccgctgcaaagccgcgaccaacctgcaaattggtgtctgtggtttgacgagatgcgcattctggcctgcctgctcggcgctgccctgacgctgccgaatctgccaaaagggccgtcgcggcatgatccggctgttccagcgcgacaacaagggcgagctcgccgattacgacaagggcgctgcacgctggcgcgcctcggcggggcgcggtgatggacgatgccagccgttgtcggccttgccgcatcgcacacagacgatcgggccttgcgagccgatgcaattcgattaggcttgcgctgagacatacgcccgtgatgcggcccgaaggtcgtctggtgcggaatggcaggaccggccgctgacgtatgccccttgtcgcaaggaggttcgtcatgtcggacaatcgtttcttcggcacacaccgcccctgggaggactggctcggcatgctgctaggcgtgctgatcatggtctcgccctggtttccgatgcaggtgagcgacgtcgtcgacgtcgagcgcagccacctggtgctcaacagcttcgtggtcggcatgctggtgctgggcctcgcccagctcgaatatgtcgcgctgcatcgctgggaggaggtggcaagcatcctgctcggcctttggctgatcgtctcgccggtcatcttcggctactccgaggaccaggcgctgcagctctggcacatcctgctcggcgcgctggtcgtcatgatcggcgcgttgcagctctggcaggactggaacctgagcgagcaggacctggccaagtaccctcagtagcggtctgggccaaggcagatcgggctggctgacaccggtgcgcggtatcatcgcgctccgtccggcaggccttgccgaggcgcgctgcttggcgataaaccgggtggtaccaaccccttgcggcgcttgaagacgcccggttctgaccaaggaaacacccgatgaccgtcctgaccatgccctgtctgttgtgcgtatcggcggggcggcaatgagcgggacggccgggaccgccccgcgcggcgggatcgcgcgggtgtcgcgccgggtgatgaacctcgcctacatcctgacccagaacgcccgccgccatggcgatcgtcccggtttcatctggaacgagaaggcctggtcctggcgccatatcgaccagaacgtctcggcgctggcggcggcactggccgcgcgcggcatcggcaagggcgaccgcatcctggtgcattccaagaactgcgacgagatgttctggtcgatgttcgcggcgttccggctcggcgcggtctgggtgccgaccaatttccgcctgatgccggacgaggtcggctatctggcggctgcctccggcgccaaggcgtttctgtgccacacggacttccccgagcacgccagggcggccgccaatccagcgctcgaattcgtctggcggatcggcgaggaggggacgttcggcgaagcgaccgttggtgacgtcatcgccaggcatgcgggcgcctcggtcgagaacgcgccggtcgagtacgacgatccctgctggttcttcttcacctccggtaccacgggccgctccaaggccgcggtgctgacccatggccagatggccttcgtgatcaccaaccatctcgccgatttgatgcccggcaccaccgaggacgacgcctcgctggtggtggcgccgctgtcgcatggcgccggtgtgcatcaactggtgcagaccgcgcgcggcgtgccgaccatcctgctgccgtcggagaaattcgacatcgcggaagcctatcgcctgatcgccaggcaccgcgtcagcaacatgttcacggtgccgaccatcctgaagatgatggtggagcatcccgccgccgagcagcacgaccattcctcgctgcgctacatcatctatgccggcgcgccgatgtatcgcgaagaccagaaggccgcgctgaacaagctcggcggcgtgctggtgcagtatttcggtctcggcgaggtcaccggcaacatcacggtgctgccgcccggcctgcacgatcccgaggacggcccgcatgcacggatcggcacctgcggcttcgagcgcaccggcatgcaggtcgcgatccagggcgaggatgggcgcgagctgaaaccgcacgagaccggcgaaatctgcgtgatcggtcccggcgtgttcgcgggctactacgacaaccccgaagccaatgcgaaggcgttccgcgacggctggttccgcaccggcgacctcggccacatggacgaggaggggttcgtctacatcaccggccgggcctccgacatgtacatctccggcggctccaacatctatccgcgtgagatcgaggagaagctcctgacccatcccgcggtcggcgaggtcgcggtgctcggggtgccggatccgttctggggcgaggtcggcatcgccgtctgcgtcgcgcgcgaggggacggaggcggtcgccgaggcggagcttgccgcctatctcgcgccaaaagtgccgcgctacaagatgccgaagcgcttcttcttctgggaggcgctgccgaagtccggctacggcaaggtgccgaagcggctgatccgcgacgagctcgaggcgcgcgggctgctcgaggcgatcgccaaatcgccgggcgcgtgaggcgatgcgcagcatcgctcagcccggcgctccggtcaccgagcgcatccaatgggtcaccgcgcgcggccgcgccttctcattcgtgctcgaggccggaattcccctgctcgaggccgtgcgtcgcggctttgcggcggaggggttctcggccggcgtgctcagcgccaaagctggcgcgctcgggccgttcgcctatgtgatgccggcgctgtcgaaggacggcgccaacgccgcgttctacagcgacacgtttcgtcccgagggtgtgacgcggctcaagctcgcggcgctgaccttcggcgagcgcgacggcgcgccgttcttccattgccacggcttgtggaccgaggccgacggccgcttcaacggcggacacatgctccccgatgagaccatcgtcgccgaaccgttcgaggtcgccgcattcggaatcgatggcgcgacgttcctggccgagcccgacagcgagaccaatttcaagctgttcggtccggtcgcccgcgcgccggctggtgcgaagaccaccagccatgcctttgcgttacggctgcggccgaaccaggatttcgcctgcgcgctcgaaggcttctgccgcctgcacggcatcctgcgtgcacggctgcatggcggcgttggttccaccatcggtgccgttttcaccgatgtccacgacgtggtgccgttcgcgaccgagcttgcggtgaccgcggggcagatcgcggccgacgaggatggccggctgcatgccgagctcgacatcgcgctggtcgattatctcggcggtaccgccgaaggacgtctggtacggggcgacaatccggtgttgatgacgatggagctggtgctcgaggtgctggaggaggcggagcagccgtagcggctgtgcgatccatccgcatcgtcgtcccggctacggtactgcttgtgagacgggcaccagtgccgttggacaaatcagtgattgagccgaataggtcgctcgggaaccgcgctgaatattcaagctgcctctgaaaatcgctacacgttagaattgagttgatcgaagaacgcctctattgttgcggcattgcaccgacaaggcgaggtcgggttgattttgagcggaacatattgggagagtgtcgatggccaaattgctggtggcgggcggcctgtacgagaaggatgagacagggcccttgcgacggcgcttcgccgaggcgcttggtcggcagacgatcctgcgaggccatacgctgctcggtggctgtcgcacccaactggatctcgtcgttgcgcaggctgcctcggccgcggctcaatccaggaagctcgacccgaacaagatgatccattcgtgggtcacccgcagcacgacgccgatccacaaattcggcgagatcacccgatcgcagctgggcgactggtccgaggtcccgcgcggattcgcgtttcccgagccggtgcgtgaatgcgatgcgatgatcatcatcggcggctgggacgggacgcagcacgccgcgagctggggccggttcgcgaacaagccgatcctgtcggtcgcgacattcggaggtgccgcaacggatatctatgtcgacgagctggcgtcgtttgagcgaagaggggtgtcgaacctgtcgcgcgaggattaccaggccttgaaccgcttcatgaccgacgagaacgacgaggtggtcgaccaatacgcggccgaggtggtcacgctggccgagcgcgcgatcctgtcgaccgaagtgttcgtcgtgatgtcgttcgagaacgttcctcacctgacggatgcctatgcaaccttcggtcgggtttgcaaggagaagggtttttcggcggtcaaggtcgatgaccatctcgacagcaatgagcgcatcgtgccggcgatctttgccggaattcggcgcgcggcgtttgtgatcgccgaggtcagcggcgcacgtccgaatgtcttctacgagctgggctatgcgcgcgccagcggcaaggccgtgatccagacggcctatagcgggaccaagctgccgttcgatgtgttcgacgtgccgacgctgttctggggcggtcaaagcgagctcgagggcaagttgaagaccgcgattgatcagttcatggccaaaccgggacgcttcatctagcccgaaggccgcgcatcgcgatcacctccgcttgcggacatggatgttgatatcgaggtcgatcgcgctgacgcaggtctgttcggcgcgatgcgagccgccctcgtgccaggggcccttgcgcaggcggacgtcgctgacgtgcgcaaggcgcaggcagcgccattgcggcagcttgccggagctctcgccggcgaactgccaggccagcacgacttcttcgccgcttctgttgtggccgatgatgtgcgggcacagctcccgcggccggccggcatagacacagaccacctgctgctcggtgaggattgccttgcggaagcgggcgtaggccttgctgggcattcggacatcgaaccatctaggattgccgcgggctcgtatcataaactgggccacccgccgttgtttccccggattcgcgcacatggccagacgaaaccgcccgatcaagatgcccgcgccgtaccttcggcgggtctggctcgatcctgcacgaatcccgaaccgcaaggcctatccgttcgtgctgccgctgctgggcgatgatttcgagctcggcttcgacaaggcgatcaccatcatcgtcggcgagaacggcaccggcaagtcgacgctgctggagggcatcgccgtgatggccggctatgacgatgccggcggcggcaaggggtatcgcgcggtcgaccacggccgtgcgctggagaaaatgggcggctcgctggcgtcggcgctgcgcgcgagctggctgcccaggattaccaacggctggttcttccgcgccgagagcttcttctcggtcgcacgctatctggacgaggcagcgatggacgcccgaggcacgccgccggacttcctgtcgcattcgcacggcgagggcttcctgcgcttcttcgaggagcgctgccagcggcagggcatcttcatcttcgacgagccggaatccgcgctgtcgcccgcgcgccagatcgaattcctcaagctgctgcaccggatgaacgggacgggccattgtcaggtgatcatggccacgcattcgccggtcctgatggcctatcccgacgcgacgctgctgcggctgacgaagtacggcctcgaaccggtgagcctgaaggacaccgatcacttcaaggtcatgcgggagttttgcgacgacccgaaggggttcatcgaggcggcgatcgaggagtagggcggaaaggcttgtcccgcggggaagttttgacttcgctctggtgcaagaagccgctttccatccggtgcagaataccgaaacataagctccggcaggcgcctggtgcgcggaccggaaaagcggggagacgaggatgaggctgacgatcgcgagggctggcgtcgtggtggcggcattggccgtgctgggggcggcatgggcgcatgggccgacccgtcagaaggtgcgggaatccatcgagatcgacgcgccgcaggccaaggtgtgggcggtgatcggcaatttccaggacatgagctggcttgccggcgtcagcaagaccgagggcgagaagggcaacgagatcggcgccacgcggcggctgacgctggctccgggcgtcaccatcgaggaggagctctccaaatacgagcccgagatgatgagctattcgtaccggatcaccgcggtcgacgtgaaggtgttgccggtgaccaattattcctcgacgctggaggtgtcgccggcgcccggcggcaaggcgaagctggaatggtccggcgcgttctatcgcggctaccccaacaacgatccgccgccggagctgaacgacgaggccgcgatcaaggcggtgagcgggctctacaaggccgggctggaagcgctgaagaagaagatcgagagcggaagctagcgcatgctgcgtgcgatcgcgctgccggcctcggcagcgcgcgcatcccgaaatatcgaaaacaaccccatgcaaaggagcaggctgccgccggcagtcggaaaatcgacttgacacgtcgggcaaatcagcgatacgtttctattattcagaaatggagtatgcgtgcccgctgaagggtttcgcgacatgcgggagtggtcaatccgtccgatcaactcgcccggatatcgctacgtgcatccgggcgagttgccgatccgcctcccgaaatcgagactcactgcttggtttgcagataggcgatcacgtcggcgcggtcgcgggcattgctgagccccttgaagaacatcttcacgccgtgaacgtcgccgcgggggtcggcgaggtaggcatcgagcgccgtcacgtcccagggcgccttgttgccgcgcatcgcgtccgaatagtcgaacccctggaccgacgccggctggcgaccgacgacgtgccacaggctcgggccgaccttgttcacgccgacgtcgatcgaatggcaattctggcaaatgcgctggaagatggcctggcccgcgatcgggtcaccgtcgagcgcccaggccggcgcagccgatgtcgcgagcagagcggcggcgagcgtcatgctgccgacggcgcaggccattgcgaatttcgtccccatcatgaatttctccggaaacagtttggattgcaattggagggatgtcgggtcgatctcatctcttggtttgagcaggatgtccgcgagggaaacccggtctccacattccgggtcatgctctaatgccgctcggcttcagcctccttctccagatccatgatgtgggcgcgcagcacgtcgaaccgcgcctcggtcgcatcgctgaacaacgggtccttgtgcggcgaaagcgtggactcgatgtcggcccaatcttgcggcgtcaatgccttgaccgcggcgggaaagaaatcgcggtcttccatcatgatgtggcgccgctcgtgcgccaggaaatcgcggatgaccgcgtcgacattctcgcgcggaatctcgccgcccgcgcgcacattggcgaccgcgtgggcgacgcggtgcaggcgatcggagcccttctgatgctcgcgcgcgagatcgcccatcttcgccgcggccgcaggatcgcgatgcctgagcttggcgaagatcaggtcttcttggcgatgatggtagagctccgtgtagacctcgaaataggcgatgatgctgccgatcacttcgtaatccgggcggccggcgtgatcgaaaatatccagctcatgctcgagaacgttgagcagccgctcgatgttgcggtgttcccgggacagaatgtcgatgatcatggcactgatccaggcaggaggctggatcagtccatagacgaaaagaccgtcaccaactttgcgctggatcaaggcgcaagccgaatatgcgcgatggttcgcgcgaagcgctgccggatggcgccccagccggtcgctgcgccggggtttgccggttggctcaccaggccgaggggcgtatgatccgcggcaaatacgaggaaatacagggaggatgccatgcatcataccttggtgcccagtgaccgggtcgagcacgtctgcgtcttcgggcgcgacggttcaaaactcggttcgatcgagcggctgatgctcgacaaggtgagcggcacggtggcctacgccatcatcaagaccggcggcgtgctgagcacccatcaccactatcccgtcagatggaccgcgctgcacttcgatcccgcgcggcaggccttcgaggccgaagtgacgctggaggatctgcgcgccgggccgtcggagttcgacggcgacgaattcgactggggcgaccgctcgcagtcgtatacgcacccgaattattgggcggtgtagctggagcgagtagggcgggttagcccaacgggtccgcgcgacgcggggcccgataacccgccgagcttggcgataagatggcggattacgcttcgctaatccgccctacgcttggtgctatcgtggtagtcttgataagcgacgcatcgtcgtcaaagttaggcgcatgacccaatacaagcccgtcggctggccttccgtcataccgagaattgtcacgagcgacttcaccggcttggccggattcttgaaaaacgtcttcggtgccgaaggcgaagtgcgctccggagcgccaacggaaatccggatcggagactcgatcatcctgatcagcgacggcggaggcatccgcgagacgatgccgtccttcctctacgtctatgttccgaacaccgacgaaacctaccaccgcgcgatcgcggcaggagctgaatcgatcgaaacccccgcggatacgccttatggcgaccgacgagcgatggttcgggattcctgggcaaacgtctggcagatcgcctcgtaccgcgggaatcgagacaatgtctagtgtaggttagccggaggcgtaaccgctacaatgtcgcaaaaggatcggtgaaatgcgctacgccaattcgcctacggacctcattctggctacctgctaagccttccttttaggcaatgagctacgtacagcctcgttcattcgctgcagccggctgcgaagcaagctagcacaagtgcggagggtgagcggggagtaatgcgtcacgttcgtcgcaagaacggcaaattatgcaccccgagtcgacgcggcaagtttttatagtccaactcgacatgagcatctattcaacgttacgttgtgcctcgcggagttgagtttgctggaggagcaatgacaattagcgagactgaaatacgtagagctttagaaaagctagattcccggtggatagcacaggaactgacggcgggctctgcggaagacaacgccaaagccttacttgaacttgcaatgcgatcgggacagttattttttaagtatcccaataagcgggaaggcgcgcggaacctctttttctcggaactgcaaaagcttttcgccaagactcttagcgcgggcctgcagcagagtctgacggatgtcgtcacgacagttagaagggtagaagaagggtatcgtaatgttcttcacatactaaacaagctacccgcgcgcagtcgacctccgacgacgcaagtctcggcagcgctaaagttagcttcgcactatctcgacttcgtcgagcggcgggcgcgcgagagcatcaagaaaaagaagagattgagtgttccggatgagccgaccggtacgctcgatgatggaacgcctttcctgatagattctgcgacaacatcgttgattgaaaatctaggtgcgacgcttgaaatgttcgcgcacgagaacggatggatatcaagggacggaagaattgtctttccggaattgcaggaagtttcggatgaagaattgagcgaaagcgttgccgttgcgacattggcaacgagttggatcagatgggagagagtggaacaacgtcgtcgatattggggtggagaattcgtagagatcgagaacggaagagcgatcgagggaatgcctggggaggcacgcgcgtactttgagtacgttccttccggcgaagaacactacgactggatcgccaacgagcgcctcaaggaacagttacagcagatcgttgcagagttgatgttcgaaacgccggcactggagcaagaaaaagacatttcagatcaacctaagctacttcctgacgaattcgtcagtgtccgtgaagttagctctgcgatgtatctatcgagggtactgggcgcggacgttaggaccgaccgaggaaaatatgcgggattgaagatcatcgagtggctccgcgggtatagcgctctcaacaaattggcgttggagtgctttgaacggaacgtcgatcccttggaaagatgcttgccagcgttcgatcgaatggaacttcaacataggctagagcaagctggcctctcgtcagaggcggctacggcgttcatcgcacaggttaccttctgcacccgaagtgaagatctgtttgattgcccgctgttacagatgtctggcggctcacttttgtttgttgcgccagcagcaattcacgccgatcccggtatgacgacctattctaacttactgtcgttggaagagcggttcgatggcaaaggaaagaggtttgaggccgaagtccagcagttcttccaggcaatgggtcttaatgcctttagcattgatacgagccgtgatggagagccctacgagatcgacgttcttgtaccgtgggagagccatctctttattttcgaatgcaagaatcgcggcttgtcaaatcatcacccaatccagtcctattacttccgaaaagagcgtgacgccttcattaaacaaatcaaacggcagctgaatggattagccatgtaccctgagatggcgattgaggctggaggagtagacccgcgtcaaatgcagattgtacccattatcttgtacgaagctccttatgctgaaggcggtgcgcatgacgggatttatattgcagattggtcaagcattggccgttttttcaaagatcggtacttgaattcaaagaccccgcacgttctgcatcgaaagaagcgtctcatacatcggtcgggcttatattctttctggcaaggtaaggagccggcaccaaacgatttgatgcgtcaactctctgatccagtgcaggttcggataatgcagagtcggataaaggagattgaaagcgtttttgtaattgacgagaatcggctcggagtcagtcgggagctgcagcggggacctttcattttggagagagttggcaagcttctcggatttgatgccgcgggggtcaagtccgaggaaagaaaggcaagaaggcaagtcgccgctcttaacaaggctctcgagcagaaggaattaaggcagcaaacaagagcctttcgggaaaggcagaagcgagcagagaaatgactccggctactccgccgcctcgctcgctgaactcttccgcggcttgctgttcgccttctttagcaccggcgccaggaacttgccggtgtagctcctcggcgccttgacgatgtcctccggcgggccccaggcgacgatctcgccgccgccgtcgccgccttcggggccgaggtcgatcacccagtcggcggtcttgatgacttcgagattgtgctcgatcacgacaaccgtgttgccctgggcgaccagctcgtgcagcacctcgagcagctttgcgacgtcgtggaagtgcaggccggtggtcggctcgtccaggatgtagagcgtgcggccggtggcgcgcttcgacaattccttggctagcttgacgcgctgggcttcgccaccggacagcgtcgtggcttgctggccgacatggatgtagtcgagaccgacgcggtgcagggtctggaaggtctcgcgcacgcgcggcaccgccttgaagaactcggcggcttcctcgacggtcatgtcgagcacgtcggcgatgctcttgcccttgaacagcacttccagcgtttcgcggttgtagcgcttgcccttgcaggtgtcgcaggtgacgtagacgtcgggcaggaagtgcatctcgatcttgatgacgccgtcgccctggcaggcctcgcagcggccgcccttgacgttgaacgagaagcgcccgggctcgtagccgcgcgccttcgcttccggcaggccggcgaaccattcgcggatcggcgtgaaggcgccggtataggtcgcggggttggagcgcggggtgcggccgatcggcgactggtcgatgtcgatgatcttgtcgatgtgctcgaggccctcgatgcggtcgtgcggcgcggcgccctcgctggcattgttcagcttgcgcgcgatcgacttgtagagcgtgtcgatcagcaaggtcgacttgccgccgccggagacgccggtgacgcaggtgaacaggccgagcggaatctcggccgagacgttcttcagattgttgccgcgggcgttgatcaccttgatggtgcggcgatggttcggcggccgccggtcgggcaccggcaccgaaagctcaccggtgaggtacttgccggtcagcgatttcgggttgcgcatgatctggtcgggcgtgccttccgcgacgatgttgccgccatgcatgccggcgccggggccgatatcgagcacgtaatccgccaagcgaatggcgtcctcgtcatgctcgaccacgaccacggtgttgccgaggtcgcgcagccgcttcagggtatcgagcagccgggcattgtcgcgctggtgcaggccgatcgacggctcgtccagcacgtagagcacgccggtcagtcccgagccgatctgcgaggcgaggcggatgcgctggctctcgccgccggacagcgtaccggaggagcgcgacagcgtcaggtagttcaggccgacgtcgagcaggaaggtcaggcgctcgcggatctccttgaggatgcgcgccgcgatctcgttctgctgcgcgttcagcgcctccggcaccgtctcgaaccattcgccggcgcgcttgaccgagagctcggagatctcgccgatatgcttgccgccgatcttgacgcacagcgcctccggcttcaggcgatagccgtggcagccttcgcagggcacgtcggagaaatacttgccgagctcctcgcgcgcccactcgctctcggtctcgcggtagcggcggttgatgttggtgacgacgccctcgaacggtttcttggtgtcgtaggagcgcacgccgtcctcataggagaacttgatctcgtcgtcgccggagccgtgcagcagcgcggcctgcaccttcttcggcagatccttccacttggtgtcgagcgtgaacttgtagtgcttgccgagcgcggtcagggtctggatgtaatagggcgaggacgattttgcccatggcgcgatcgcgcccttgcgcagggtcagctccttgtccgggatgaccaggtcctcgtcgatatgctgctcgacgccgaggccgccgcaggccggacaggcgccgtagggattgttgaacgagaacaggcgcggctcgatctcggggatcgtgaagccggacaccgggcaggcgaacttttcggagaacaggatgcgctcggggccgctcttgtcgtggatttttgcggtcttcttcttgtcttccttctcgccggcagccgccgccggcgtgtcggcgtattcgatcaccgcgaggccatcggcgagcttcagcgcggtctcgaaactttcagcgaggcgctgggccaggtcggggcgcaccacgatgcggtcgaccaccacgtcgatgtcgtgcgggaatttcttgtcgaggctaggggcctccgacagctcatggaaggtgccgtcgatcttgacgcgctgaaagcccttcttgaggtattcggcgagctccttcttgtactcgcccttgcggccgcgcacgaccggcgccagcagatagaggcgggtgccttcgggcagcgccagcacgcggtcgaccatctgcgagacgatctggctctcgatcggcaatcccgtcgccggcgaatagggcacgccgacccgcgcccacaacaagcgcatgtagtcgtagatctcggtgacggtgccgacggtggagcgcgggttcttcgaggtcgtcttctgctcgatcgagatcgccggcgacaggccgtcgatctggtcgacatcaggcttctgcatcatctccagaaattgccgcgcataggccgacagcgactcgacgtagcggcgctggccctcggcatagatggtgtcgaacgcgagcgacgacttgccggagccggacaggccggtgaacaccacgagcttgtcgcgcggaatctcgacgtcgatgttcttcagattgtgttcgcgcgcgccgcggatcgtgatggcgcgcgatgaggagccggcgttgttttggcgcttcgccttgagcacttcatccattgcgacggttccgggcgcatgatcgggcgccttttgggcgcgcatcgccggtgatgccgggagcttgcgccgatggggtgtgtgaagactggaacgtaggtagaacggccgacaatttccagtgctgaatggcgtccatcaacggatagtttagccgatggcagcagccgtcagcaggatcggttccagatttccgttttgacgcgttttcctggcgcgaaccggcatccatcccggatcaagttccgggacaggcttcgctcgaaaatgctttgacgaaaaaaaggccggcgcgaggccggcctttccgagaccttggggggctgtctttcgcttaaagcgagatgagttttggttgaatcggcttggcgcggtcttgcttcacctctccctggtggggagaggtcggattgcgcagcaatccgggtgagggctcttgctctctcgatagaccgcaacccctcacccgatttgctccgcaaatcacctctcccaagggagaggtgaactttcgatgccgttccagctcaacttaatctcatcaggctttagtacttcgcgacgatcgggccgccgaagtgatagttcacgccgaactggacggtgtgcaggttgatgtcggccgaccgcacgccgaagtaggtctcaccgcccaggctgcgatacaggtattcgcccttgatcgaccactgcggcgcgatgaacgcctcgatgccggcaccgacggtccagcccgagtggaagttgctctgcgagacgctgacgccgcccgcgctgagggagagcttgttgtcgacccaggcgtagccgccggtgccgtagaacagcaccttgtcgaccgcgaagccgatgcggccgcgcgcggtgccgagcgcgtcgatcttgctcgtcgccgtgatgccgagcgcagtggcggaggcgttgacgtcagcccatgcgccgtcggcctcgaggccgtacacgatgttgccggcctgccagttgtagccgatggtgccgccgccgaagccgccttccatcttcgggttgcccgaattctcgctggcgtagccaccgaagccgccgatgtagaagccggtccagttggtgaacgcgaccggcggcggagccttcacgtagggcgcgcgagccgccatgtcggcggccatcgccggtgcaattgcgctgagggcaaacatgccggccgaggccagcagaacattcctgattttcaaagtcccagtcccattttcttgttgtcccttcaaacattgaagggaaacgccaacgcggtgtcgcgtgacgttcatgtgtttctacctagaaatcttggaagttgtgtatccgtgaaaccacaatgcacggaaaacggcccacgcgagccgtgcgcttgcccgcaacgaaagagcccggcgcaaggccggctcctgtcgttcgctgcacggctgcggcgcgcggccgcaggtcgctcagtacttcgctgacaccaccggactgctcggtgcgttgaagtggtaattgatgccgagcttgacggtgtggaaactgtccttccactccgagcgatcgttcagtgccggcgtgtactggatcggcgcgaccttgccgagatcgatgtagttgtattcgagcttggccgaccaattggcagcgaacatgtattcgacgccggcgccggcggtccagccccagcgcgtgtcgctggccgaggccgagggcggcgcgagcccggcattgtagcggtgcaggatgtcgccgaccgcggcgccgccgctcacgaaccacaacgtggcgccgtcggcgtagccgagccggcccttgatgtcgccgaagctgcgcagctcggtgtagtaggtgtcgagcacactgggcggtccgacattgatcacgtcggagcggccggtgacggcggcccagtggtagtcgccctcgatcccgaacacgacggggccggtctgaaaattgtaaccgaccacgccgccgacaaagccgccgctggtgttgtagctctgcgtgccgatgaacgccgcatcgttcggtgcgccaaggtaagtctcgttgctggtgccccagccgccgccgccctgggcgccgagatagaagccgctccagctggtcgcaggcgcgacgaccggcgccggtgcgggggcgtgcgcggcgaggtcagccgccgatacggacgaaacgctcagcgcggcaaggccggccgcggcaacgcaaagctgcttcatggaatccatcccgtttcgaatcgatcaatgacgggacaaggctaccagcacaggttgcaagccagcgtagcgctccggccacactgataacattttgattttattggatattgcacgatttattaagatttaaccacgtttgattcgtggttgtgtgcgactggccgctcgcgcgagccggccgacccgccaaacaaaaaggccggcgcgaagccggcctttggtctcgatcgaaccggatcgcgcgatcagtagcgcgcgaccaccgggccaccccacttgtagttcacgcggacggtgacgaggtcgacgtcctggcggtcgcggatgctgctgaacagcgcgccggtcggggtggtgaggttgtaggtcttgtcctgcatgaacaggtggtcgtattcgacaccagcggtccagttcggcgcgaagccgacttcgatgccggcgccgatggtgccgccccagcgggtgtcgctggcgctgccggcgagcacgccggtcggcgtgaagaaggtcctgtaacgattgtcggtcagcgccgcaccacccttggcgtacagcagcacgttgttgacggcgtagccgacctggccggtgaacaggccgaacgcgtcgatcttggtctggttggtgaagaggcccgggaagatcgcgctgttgttgctgcccttcaggtcagcccagtcgccctgcgcttcgaggccgaacacccaggcgccggactgccagcgatagccgatctggccaccggcaacgccgccggtcgcgtcatggcaaccatccgatccgaggagcagtccacccgggacctggctccagcaattgtggctcgagccccagccgccgttggcgccgatgtagaagccactccagtcatagatcgcagcaattatcggcggcgccttggtgtaggggcgtgccgcgaggtcggccgccgcagcgggcgctgcgaacgcaatcagggcaaccgtaccgagcaaaaacttcttcatttcaaaactcccagccgatcggcttccaaaagggtcccaaagccgatctcagacgcgagcgcccatctgatggtggacatctatacgctgattcaaccggaaacgccgtctcccaaaagccacacttgcggaagaagtgtggctagtgcaagtcattgatttactgaattttttctagcgtggatgagccggcgggccgccgcgatcgaaatcgtccggccgttctatcgccctggtcgcctctacggctggttgtggcgaacaaaactggaacattgtcggctgcagtgctatatcctcgatagtcgtggataaccgcgcgcgggcaaaggcggcgagccggcgccggcgtatagggtcatccacgacgcctgcgatgtaagtggcgaaggttgagagtggcggccgatgtccggacgcccggtttttaagtggagatgatgcgatggcaggaagcgtgaacaaggtgatcctggtcggaaacctcggcaaggatccggaaatccggcggacccaggacggccgtccgatcgccaatctgtccatcgccacctcggagacctggcgcgacaagggcaccggcgagcgcaaggaaaagaccgagtggcaccgcgtcgtgatcttcaacgagggcctctgcaaggtcgccgagcagtatctgaagaagggcgccaaggtgtacatcgagggccagttgcagacccgcaaatggaccgaccagtccggcgtcgagaagtactcgaccgaggtcgtgctgcagggcttcaactccaacctgaccatgctcgacgggcggggcggcggtggcggcagcttctcggacgacggtggcagcgatttcggctcgtccggtccggtcagctcggcgccgcgccgcgcagtggccgccggcggcggcagccgcaacagcgacatggacgacgacatcccgttctgatcgaacgtcgcattcccgggctcatacgaaccgctccgtgaagattcatttcgcggggcggcggtgagatgcgtggtgcaattatcctcatgtggattatgaggataacgtccgagctgcaagcctagtattaggtttttggggctggctggcgcaagttcccgcgactttgacacaggtcgatgtgaatgatatttacattggctggcggcggacgatgactggccgcgagttcaatgcaaaggccgtcaccatgagcctcgcgccactgctcgacgccgcgcctgcgatcccgctccatgccttcgctgcgatggccgccttcgtgctcggctcgatccagctcgccgcgccgaagggcacgctgccgcaccggacgctgggctggatctgggtgatcctgatgctggtggtcgcaggcagctcgttctggatccatcagatccggctgctcgggccgtggagcccaatccatctgctgtcggtcttctcgctggtcatgctggtggtcggcgtgacggctgcgcgcagccacaatgtccgcagccacaagttcacgatgatcggcatcttcttcggcgcgctgctcatcgccgggctgttcaccttgatgcccgggcggatcatgcacgccgtgattttcggcaactgattgcgcggttgaggggcgtcgtggggccagctccatcggctcccacccggcctgcgatcgcggcgcaaagccggcccgcggcaaatctacaatgtggctggtaagtccatgaaaaaacgaagggaaaaacggctagccggagccgcgtcggggtggttatcaggcccccgatgggctatatgattccccagtaaaactgaccggatttcccctttgtccgataacgaagatgacaagcccggcgagccgccggcgccctcagatattcgtcccgtttccattctcgacgagatgaagaaatcgtacctcgattacgcgatgagcgtgatcgtgtcgcgtgcgctgcccgatgcgcgcgacgggctcaagccggtgcaccggcgcatcctgtattcgatgcatgagcaggggcacacgccggacaagaaatacgtcaaatccgcccgtgtcgtcggtgacgtgatcggtaagtaccatccgcatggcgaccagtcgatctacgacgcgatggtccgcatggcgcaggacttctcgctgcgcgtgccgctgatcgacggccagggcaatttcggctcgatcgacggcgatccgccggcggcctaccgatataccgaagcgcggctgaccaaggcggcgctcgccgtgctcgccgacatcgacatggaaaccgtcgatttccagccgaactacgacaattccgagcaggagccgtcggtcctgccggcccggttcccgaacctcctggtcaacggcgccggcggcatcgccgtcggcatggcgaccaacatcccgccgcacaatctcggcgaggtggtcgacgcctgcgtggcgctgatcgacaacccggcgctctcgatcgacgagctgatcgacatcatccccgggccggatttcccgaccggcggcatcatcctcggccgccagggcatccgctccgcctatcatctcggccgcggctcgatcgtgatgcgcggcaaggtgacgatcgacaccatccgcaaggaccgcgaagcgatcatcatcaccgagattccctaccaggtgaacaaggccacgatggtcgagcgcatcgccgacctcgtgaaggagaagaagatcgagggcatcggcgatctccgcgacgagtccgaccgcgacggctatcgcgtcgtgatcgagctgaagcgcgaggcggtgcctgacgtcgtgctgaaccagctctatcgcttcacgccgctgcagaccaacttccccgccaacatgctggcgctggattccggtcgtccgcagacgatgacgttgaaggatctgctcaccatcttcgtcgcgttccgcgaacaggtggtgacgcggcggaccaagttcctgctcggcaaggcgcgcgaccgcgcccatatcctggtcggcctcgccatcgcggttgccaatatcgacgagatgatccgggtgatccggacctctcccgatccgaacacggcgcgcgacacgctgatgtcgcgcgactggccggcgcgggacgtcgaggcgatgatcacgctgatcgacgatccacggcaccggatcaatgacgacggcacgctccggctgtcgatggagcaggcgagggcgatcctcgatctgcggctgcaacgcctgaccgcgctcgggcgggacgagatttccgatgagctcgacaagctcgcggccgagatcgccgactatctcgacatcctgcgctcgcgtgcgcgcgtgcagggcatcgtcaagaccgaactcgccgaggtgaagcagcagttcgcgacgccgcgcaagaccgtgatcatcgagcaggaaggcgaggtcgaggacgaggacctgatccagcgcgaggacatggtcgtcaccgtctcgcatgcgggctatgtcaagcgcgtaccgctctcgacctaccgggcgcagcgccgcggcggcaagggccgcgccggcatgcagacccgcgacgaggatttcgtcgcgcggctgttcgtggcctccacccacacaccggtgctgttcttctcctcgcgcggccaggtctacaaggagaaggtctggcggctgccgatggcggcgcccaacgcgcgcggcaaggcgctgatcaacatcctgccgctggagcagggcgagcgcatcacgaccatcatgccgctgccggaggatgaatcctcctggggcaatctcgacgtgatgttcgcgacgaccagcggcaccgttcgccgcaacaagctgtccgacttcgtcgacgtccgccgctccggcatcatcgcgatgaagctcggtgagggcgaggcgatcgtcgacgtgcagatctgcaccgagcgtgacgacgtgctgctgaccgccgccggcgggcagtgcatccgcttcccggtccccgatgtgcgcgtcttcaccggccgcacctcgatgggcgtgcgcggcattgcgctcgccgaggccgacaggctgatctcgctggcgatcctgcgccatgtcgagaccacctcggatgaacgttccgcctatttgaagatgcgccgcgcggtggccggcgaggccacgaccgaagagccggtcgagaccgagggcgaggagacggcgaacgatgcgatccagctgtcgcaggagcgctatgccgagctgtcggcggccgagcaggtggtgctgacggtttccgtcaacggctacggcaagcggacctcgtcctacgagtaccgcaccaccggccgcggcggtaaaggcatcgtcgcgatgagcgtcaacaatcgcaacggcaatctggtggcgtcgttcccggtcgaggacgccgaccagatcatgctggtcaccgacaaggggcaattgatccgctgtccggtggccgacatccgcgtggccggccgctcgacccagggcgtgatcgtgttcgacaccgccgaggacgagcacgtggtctcggtcgagcacattccggaagaagagaacagcgagaacggcaacggcggttagcaggcgcctccgaatgtggtttttcgccacagagaactcgacggcgcttcagcgccgtcgttgacctcttctaacaacgatcggtgaatcgcagggaattttgcgcaagtgcatactgtgatatcgcgagtaacgatcaagtggctacgaagagactttggttaaagggtttcggagaatggcgaattgtcgtcgcccgtagtctgtaagcttccagaaccgcactttgctgcgccgcgccaaagaactgtcaatttgctcctcgtctatacggtctatgagattcgcggcgaacagggtctccccgatctcacgtaagctacgttcttccaggctgttgccttcgaattctttcgtattgggttgataccgacttagagctttgtagaagttggcaaccaaaaaattctcctcggagaagttcattattgtcgttgcgactgcaaggaatatcgtaccccaactcacctcaatccggttcccaaatttaaccgtcacatcgtatccaataaacggcctctcctctgctgcctttgagtcaagcacctgcttttccaagtacgctaccttttcgagcagttccgcatacttcttgtattcgaccacctcatctctcctaacaaatcccgttctcggttttgttcgcttaagatctacaaagctggttgttacctctgcggccagctgatgagggcttgtgaacgtgcgcaccggtcgcttccggatcttcgaaatgaaggcgtcgagcttctcgcgcatttcttgattgtcttcggtcttactgaacggaatggcgcctcgatcgccgtgaatgaagccgatcgatggaatttctcgttcacgcgcatagttgaactctttttctgtgaagctaactccgtccgcagcaaggctgccgtatcggccgccaaccagcacaacgtagtagtctgagtcatctatctgctgcttgatgaactcccaagtatcatcatcggccgcgggaaagagctccattcctaccggcaagcaattcaatttcagcagagccttctggacctcggctcgttcctccctgaggtccgcaaatgtagagctcacgaatactttgtatatcggctccgacgccattgaggtctccgcgtacatctaaccttgggtggtagggaggtcgcgccgtgttgacgttggcttctggtggcagtcggcggtgaccggcaagctctactttggccttatcccgcataattacacgcctaattggtggaactctcaagctccatggtgagcctggggagcacgtccgtctttccgatttgcgcgaaccagcaccagagctccagcgtgcaggcgagccggtagagcgcgatcgtggcttcccaatccagccggtcgcgtgtgccgtggccggcgagcaggccgtcgcgcttcggcgcgtcgtttggcgtgaagtagtacagcgccttggcgatatccatcagcggatcgccggccgtgcagttctcgaaatcgacgatgccggaaagctccgggcttccttcggcgttcaccagcacatttccggcatggaaatcgtagtggcacaggcgcggcgtctgggctgcgtcgagcaaatggttgcgtgcgataatgctggcccgcagccgtgtggccagcgccgggtcgccaccgcgggtgcaaaattctgtcagcttccgctcaaactgggcggacatgtaggcgcggttgcttgggtgaggggtccagacgccgttcgggccgatatagccgaagctatcgagggtgacgtcgttgatcctgcgcagcgccgcgcccatctcggcgtagatcgcaaacagctcctgatcgcccagctccggctcgcgctggccgagcatgacgccgtcgagcttgctcatcagcacgaagctgaggtcgatcgtcgaatgcgtatcgtcggcgaggagaatgtggggaacgggaatagcgacgtcgcgcagcagcccgaggacgtggacctccttcgccatcttccattgcagctgcgtcgggtagaccttcaggatgcagttgggcgcgtccgccagaacgatctcgaggatcgtgctgatctcgccgccgcgcagttcgatgacatcgtgcacgcgggaatgcagcggtacgcggtcgacgatggcttgagcctgctcgatcgagattgtcagcctcggtttgagctgaagcggcggatcgttggacatgcccgcacatcccaccgatggtctgatcgagcgcgacacatcagcccttgaagcgacgttacatagacaacatcagggcgaatgacgtggaggccaaccatagcagcatcgcggcaagacccagtcttgttgccagttgccagaaacccgagaaatccctgaacacagatggcgagaacatcaagatgatgccttgcgccagaaccaaccaaccgaaaacccagacgtcgtcgcatccttgccggcacagcaagtcaccctggtgccagtacgtgagccgatagccgtcgaccaagtgcagcccagcataaaccaagaaaacgacggaaatcgcaagatagagattcagcagccaagacgttttgcgcgctagcacatagagcacggattgcgccagcggtgcggcgacgaagaactgaagattgtcatatcccgtgactggaaaggcgaacggttctccatccaatgtcgcgtcgttcagtccgatccagaaaatgtaaaagcatccccatgtgaggcatattccaagcaacgccctgatgtgtccggacgtgacgaacgctcggctttcgccggaaccatttccgccttggtggggcgttggtccagccgcttgcgccgccggcccaaatgagctgctcatgcacgtccactcctaaatctcgatctccgtgccgaactccacgacctggccggtcggcacgccgaagaaggccgccgaccgctcggcattgcgttgcaggaaggcgaacagcgattcccgccacacccacatgcccggaacgtcctcgcgcgggatgatggtctcacggccgatgtaataggtcacgtcggagaggtcgatgccggggagcttgccctgccggcaggtgagcttcaacccttcatagatggtcggatactgcatgaagccatagtgcaggatgatgcgggtgatgcccgggctgatctccatgacctcggcgcggtcctcgtcggagatgcgcggcagttcctcgatctgcacggtgaccagcagcacgcgctcgtgcagcacgtggttgtgcttgacgaattgagtcagcgccagcggcaccccccggggagccgaggccaggaacacggcggtaccgggcaggcgggcgctgcatttgttgaccgcggtctcgatcagatcctcttccggctgacgcagcttggcgcgagccttctcgaccagcttcacgccgccgcgccaggtcatcatcaggaacgccaccgccgcggcgagcagcagcgggaaccagccgccttcgaacagtttctcggtgtttgccgcaaagaagatcgcgtcgatgatgaagaagaagccgttcaccgcgatcacgaggatcggcgaatagccccactggatcgcgaccagcgccgcgagcagcgtggtgatggccatcagcagcgacaccgcgatgccgtaggcgccggcgagtgcgtccgaggtgccgaaggccagcaccgcgccgagcgttcccgccgcaagcagccagttcaccagcggcacgtagatctgtccgatcgcatcgctcgtggtgtgctggatgtgcatccgcggcaggaagccgagctggatcgactgctgggtcagcgagaacacgccggagatgatggcctgcgaggcgatcacggtggcgagggtcgcgagcagcacgagcgggtaatgcgcccagttcggggcaagttggaagaacgggttgtcgatcgagttcgggtcgttgatcagttcgccggcctggccgaaataattcagcaccagtgcgggcaggcagaccgcgaaccaggcgagccggatcgggaagcggccgaaatgccccatgtcggcatacatcgcctcgccgccggtgacggcgaggaaagcggcgccgaggatggcgaagctgacgtgaaaatcctggtggatcaggaaatcgaacgcatagaacgggctcagcgcgaccagcacgccgggcgccttgacgatgccatgaatgccgagcgccgcgagcacggcgaaccagaacagcatcaccggcccgaagatcttgccgatgaagcccgtgccctgcttctgcatgaagaacaggccgatcaggatcaccacggtgagcggcaccaccgctggcgtcagtgagggcgcgtcgaccttcaggccttcgatcgccgacagcactgaaattgccggcgtgatcgcgccgtcgccatagagcagggcggcgccgatcaggccgaccaccagaagatgggagcgccaggtgccgggcgccgcgttgcgcgccgaaagcagcgccagcagcgcgacgatgccgccttcgccgcggttgtccgcgcgcaggatcagcatggcgtatttgactgaaatgatgaggatcagcgcccacaggatcagcgagaccacgccgagcaccgcgctgtgggtgaggggcccgccatgggcggcggccttggcggcttccttcagtgcgtagagggggctggtgccgatatcgccatagacgacacccaaggcacccaacgtgacggcaaccgggatcgggcttgatggaggatggccagaagaagcgatggcgggcgtactggtcacggcaatcccccgatggctagcgcccgccggatcatccggtcgggcgcgttagacgatagtctgcgacgggacgtcgcaaattaccattgggatttgcgtgacagcctgacctttacgcggggctggacgacttgctggtgcgcgcgatctccgcgcgaaccagcagccgtctcgcctggaaatttcttctacggcgtacggtcggcggtgacgaggcgggcttcgcggaccatcgtcttgctgccggcgctgcgcaggcaggaggcctcgaaattcggccaggcctgctgcgagcagcccttgcccaccgggtggatgtcgagacggtcgctcttggccagcggctgcggggtagaggcttcgacctgcggcgcgaagcccggcagaacggtgagcgcggcggcaatgaacgcggcaacagcgatagcggaaagtgccttgatcatgacggtccccatatgaacgagccccccggggcccgtcgtttcgttgtccaatgtctaccggccgcacgtttcctggtgtcttcgccagggtcgaaaatggtttcatcgcaggccggttttgtttcgtccgccaacggccgacgaaacattcacccacatagacgctggcatcccaggactcgttcactgggcgagcagggatttattttcgctcgacggggggaacccggggcggcttgccggggagagccgggcgggttaggagggaccatgtcccgtatcgcgctctaccccggctccttcgatcccgtcaccaacggccatctggatgtggtccggcaggccgtcggcctatgcgaccgcctggtcgtcgccgtcgccatccacgccggcaaaaagccgctgttctcgaccgaggagcggctcggcatgctccgcgaggtatgcagcccgatcgcccaggcagcgggctgcgccttcgactgcaccacctacgacaacctgacggtgacggcagcgcgcaagcttggtgccaccatcatgattcgcggcctgcgcgacggcaccgatctcgactacgagatgcagctggccggcatgaacgaggccatggcgcccgacgtgcataccgtgttcgttccggcgtcggtcggcgtccgcccgatcaccgccacactggtgcgccaaatcgcccagatgggcggcgacttctctgcattcgtgccgtcatcagtcgccgctagcctgaaggccaagttcgccggctgatcccggcggcctgccacaccccgaacgttacagagatccggagtttccatgatccgcattcttgcattcgttgccgcgttgctctgcgtcgtgcccgcggtcgcgcagccgctgcccgccaatctcgacaaggccaatgcgatcgtgatcgacagcaccaagggccgcatcgtcatcaagctccgcaccgacatcgcgccccagcatgccgagcgcatcaagcagctggcgcgcgagggcttctacaacaacgtgccgttccatcgcgtgatggatggcttcatggcgcagaccggcgacggccagaatttcaacggcaccggcggctcgaaatatccgaatctgaagcaggagttctcgcaggtgccgttcaagcgcggcgtcgtcggcatggcccggcgcggcgacagcgtcgacagcgccaattcgcagttcttcatcatgttcgccgacggctcgagcctgaacgggcaatacaccgtggtcggcgaggtggtgtcgggcatggatgtggtcgacaagctgaagaaggcatccgcgggctcgcccggcggcgccgtcaccgatcccgacaagatggtgaaggtgcaggtcgcatccgacatcaagtgatcggcgatggcggcgcgcagcaagccacttgcctggttcgccgcgccgctcgtggcgtggctcgcgctgtccggaccggcggcagccgagccggagcaactcaatacgatcagggacgttgttcttgccatccaccgctgctggcggccgccgccgccggacaaggccggcccggtcgacattaccgtcattgtcagcttcaaccgtgaaggcgcgatcctcggccatcccaggatcagctatgaatcggaggaagcgaccgacaacgaccggattgcataccgggtcgccgtgatggaggcgttgcaacgctgcacgccgatgccatttaccgagagcctcggcggcgcggtggctggccgcccattcgcgatcccattcaggaataagaaatatccaccccgaagccaggagaagcgagcatggctgctaccgaaaatactctgatcctcgaaaccacccagggcccggtcacgatcgagatgcgcccggatctcgcgcccggccacgtcgcgcggatcaaggagctggtgcgcgagggcttctacgacggcatcgtgttccaccgcgtgatcgacggcttcatggcgcagaccggctgtccgcagggcaccggcatgggcggctccggcaagaagctgaaggccgagttcaacaaggagccgcatgtccgcggcaccgcctcgatggcccgcgccgccaacccggattccggcgacagccagttcttcatctgcttcgacgacgcctccttcctcaacggccagtacacggtctggggcaaggtcaccgagggcatggagaatgtcgacaagatcaagcgcggcgagccggtgcagaacccggacaagatcgtcaaggcgcgcatggccgccgacgcggcttgagttgaacactccgtcgtcacgggatcacgccgcgcgcgatcccgtgacggcaacgttgaagtaacaatcgcgccatgcgcaccgatctcttcgatttcgaactgccgcccgagagcatcgcgctccggcccgcgagcccccgcgattccgcgcggatgctggtggtgcatccggacggcgtgctgcgcgacgcctccattgcggacctgccgcactggctggagccgggcgaccagatcgtcgtcaacgacaccaaggtgatctcagcccagctcaagggccgccgcatcgggcgcgagaccgagccgaagatcgaggcgaccttgatcaagcggctcgacggctcgcgctggcaggcgctggtgaaaccggcgaagaagctcgccccgggcgataccatccgcttcggcaacgagggcaaggtctgcctgctcggcaatctcgatgccgaggtcgaggccaaggggcaggagggcgaggtgacgctgtcattctcgttccatggcccagtgctcgaccaggccatcgccgatgtcggcgccacgccgctgccgccctatatcgcctccaagcgtacaccggacgaccaggacgtcagcgactaccagaccatgttcgcagccaatgaaggtgcggtcgccgcgccgacggcagggctgcacttcacgccggcgctggaagccgcgctgcgcaatcgcggcgtcacgctgcaccggctgacgctccatgtcggggcagggacgttcctgccggtgaaggtcgacgaaacctcagagcacaagatgcatgccgaatggggctgcatcaccgccgagaccgcctctgccttgaatgcagcgcgcgccaagggcggccggatcgtcgcgatcggcaccacgtcgctgcggctgctggaaagcgcgacgacaccggacggcgaggtccagccgttcgcggcggaaacctcgatcttcatcacgccgggttaccgctttcgcgcggtcgatatcctgctgaccaatttccatctcccgcgctcgacgctgttcatgctggtctcggccttctccggcctcgagaccatgcagggcgcctacgcccacgcgatcaagaacggctaccggttctattcgtacggcgatgcgtgcctgctgtttcgggcgaatgagcggtaacagcgacaggtggtgctaagcctgatatacccgcagcaggggtgtatgaggggaaaaccatggctctcacaatcggggaaataggcggcgtcgtcggcctcatcagcgctgggttcgtctttattgaccgctattataaggggcgtcctgtagtgtcgcttacaacaaaggcggaggacggtcgtataaaaatctgcatcagaattacgaacacgacgccttatgacgttgcgatcatgggcaacaaagtcaagcgagggtggttctttcgaccttgcaaagtatattttctctccgatggacaaagcactcgtgctcttttgaatgcgcaggcgggcaggccaccgcagttcatgctgaagccgaacgaaagccgagagctgacaatttgtcccgcgttcgagaacaacgtggcgttagaggtcgcggagccgggccgcgttgatttctttatccaatggcgtcgcgggaacgctacttggctcccccagattccattacctgtttgcacaagcacggaagcaatcagactttacggactcggagaccagaatagcggcctctagaagcgtgggtgggttagctgcgaagcttaacccaccctacgaatccaactcgctcctcacgccatcgcgcgttcgggcaatagctccgcaatctgcaccgcgttcagcgcggcgcccttgagcagttgatcggcggcgacgaacatcgagatcgagtgccccgagggatcgctgaggtccttgcggatgcggccgaccagcacgtcgtcctggccggaggcgtcgatcggcatcgggaagtagttcttggcgcgatcgtcgacgatcttcacccccggtgcctgcgccatgatcgcgcggacctggtcctcggtgatcggcttctcgcattcgaaggtgatcgcctcgcaatgcgcgcgcagcaccggcacccgcacgcaggtgacgccgaccgcgatcttctcgtcctcgaagatcttgtgggtctccttgatgaccttggtctcttcgtcgttgtagccggtctccggatcgaccgccgtgttgtggttgaacaaattgaaggcgtagggatgcggcatcaccttcggggtgtagacttgtccgttgagattggcgcgggtggattcgacgagctcgtccatcgcggcagctcccgcgccgctcgcggcctggtaggtcgagatgatcacccgcttgatgcggttcttctggtggatcggccacagcggcaccagcgcggtgatggcggcgcagttcgggttggcgatgatgcccttgtgatcgcggatgctccgcgcgttgatctcggggatcaccagcggcacgttcgggtccatccggaacgccgaggaattgtcgaccaccacggcgccggacttcactgcaagaggcgcgaacttcttcgagatgccgctgccggctgagaacagcgcgatgtcgacgccgtcgaaggcgcgctcggtgagttcctcgatcaccaccggctggccgcggaagctgatggtcttgccggccgaacgggcgctcgccagcgccttcagcttgccgacgcggaagccgcgcttgtccatggtggcaatgaattcggcgccgactgcgccggtgacgccgacaatcgcgacgacgggatcgttactcactttgtcctccattcgagatgtgttggatgtgctgcagacaataaaaaagccccggaccttcatcaggcggggcttcggctagagatggtgcggttgaccgactacgcgcgcacgcctcccgaggccccggagagctcagtggttttggtggtgcgtttggtcgcggtgatcatggtgccgacttatgcgggacagatcggctgacgtcaacggcctttgggcgaaaattcggcaacatcggcgccggcctcagcgcctgcgtgcgcccggcggctccaggatcacctctttcaggtcgctgccggcgaccaccacgatgacgaaattgagcttgccgcgctcgcgcgtcaggccgccgctgatcgccttgcccgaggtggtgtgttcggcaacccgcaccgcatcggcgaggcgatggcggagcgccctgagcaccatcaggttgccgcggtcttcggcgtcgagggaggtcagcggcgaggcggcctcgccccccaccacttcgccggtcgctgcatcgatggcgtgccgccagatccggtcctgctgcatggtcttgacccggtagactgcgggaaacgaggcgccgtcgaagctgatgtcggcagtgatcgcaccggcgtgcagcgcctcggcgatcgccatcgccttgcgcagcgagatctgcgcggcctggaagctgtcgagctcgcggcgcaccgcatgcacgtcgagcgcgctgtcatcgtcctgcggcgtgagcgccgcggcagccgaactcgtgatcgcctgggccggcgacgcgagcgtcgcggtcagcagcgcagccgcgagcaaccacgttccgaatccccagtgccgcaatccgcgcaatcgtcctgtcctcatcgtcgaacctgcatcgaaactgagctcgcgcgttgcccgcgctgtcgtgcggccattggtgccgcgaaaatgcggccgacccccgttagtcagaggtcggccgccgaacgttcagacgaagcgatggcggctgctccgtcgtgacgatcgaagtttacaaggcgacacaaaaccgttggggggctgaactaggtcccgcgtctcattgcaactaaacaatacggtttcgttctgtttattcaaggttcatcacggcaacgtgtaagacgataaaatgatccaaaataccgttcagcgcgcgggcctgcggcgtgccttcgtcccttccttcgtcccttccttggccccgttgcggagccggtcccgcggcccgacggcgccggccaggaacagccggatcgagacctccatccgcgtctcggccgccttcatgtcgatcggtatcccgaatgtcgccatccggtgggtgtggccgaccaccatgttgaggaaggtctcggccgcgatcgtggtgtcctcgagatcgagcacgcccttgtcggccagatgatcaaagaaatcggcggtggtggagacggccttcgaccagccctcgtcgacggccagcttggcgacctcagggaaattgatcgcttgcgcggtcaggatccggctgaaggcgatggaatcggcgctgcaattcagcaccaacagctggcgcccgaggtcgatcagccgctcctcggccgaaccatcgcagctgccgtcgccctgcatttccgccgcggcggcagcgagcggggcgagccagcgggcaatctcgcgccggagcactgcggtgaacaggccgcgcttatcgccatattggccgtagacggtgggtttgctgacgcgggcagcctcggccaccgcgtcgatcgacgtcgcctcgaagccgcgttcgaggaacaggcgggtggcgacctcgatcagccgctggtcgcgctcgatcgcggcgtcccgggtcggccggccgccgcgtgacttgatcacgccgcgcttggccgccttgttggccgccttggccttggtcgccgtcaatcccatgtgcccattcatctcgttgtgcgtcggacgggtccgtccggtctataacccgcgcggtacggattcgtccattcggcggtaccaggggcaggcgggtcagggcggcgtcgcggtccaggcgcgtcccgcggcggccttgtcgtagccgtactggtagagcgcacgcatataggcggtgtcgaagccctggttttccgacgcaggatagtcgcgctcgatataggacagatggaagccgaggcggttgcgccgggcaaaatcataggtcgagagaatgacggagcgggtttgcgcctgggtgatcgcagaaatgctgcgcgaggcgacgtcgatcgtcgagttcaacaccagctggaaattgccttcgagcttcttgttgacgaggatgtagatgttcatccggccgttggcgggccaggcccgttcgcggaacatcagcgcgtccggcagcgtcagcacgggcgcggtgacgccgccgtcgacatgcatctcctggaagcgccggccttggccctcggcatcgatcatgatcggcggaaacaccagcgggatgctggctgaggcggccatcacgtcgcgaaacagctgcagcgcttcgggcgtgccgacggctgcgatccgtcccatgtcccagatcacggtgcgctgggtgtcgaggtcggtggtgacgatcaggagctttcggcccttggcattctcgcgcgccacctcgctcaggatgtcctcgccgacataacgcgccaccagctcgcgcagccgcttgttgccgaacaggccggagccgaacagcacccgcatcaggctcgggtcgtccagcaggctttcggcgatgcctgacgtgtagacctccttcagcgtgtcgtcgtagcgcgagccgaggaaggcaaacggcgcaatcagtccgccggtgctgacaccggagacgaccgagaagctcggacggttgccggctgcagtccagccgttgagcacacccacgccataggcgccgtcggcgccgccgccggagagggcgagataggtcttgatccgggcgaggttgtccttctcgagcttgaacctggacaccggctcgtcggcatagcggcgcagcccgtcgagatcgagcacccgcgaattaacggcgtcggcagccgtgtagggcgtccgcggcagcgaactgcacgccgccagcgtgaagccgagcccgcacagcagcgccacttgccgcatcgcatgggcgactttcgcccgatggcggacgcggtcaggccgggcgctgaagagggagaacatctcggtctggtttcgcgcggattgcagtcgcggcggggaggtctgtcgccttattgttgacataaaacgatacggtttcgttttgtttaaccgacgttccattccggggcaagctctgatccggccgttcgcgttcacgaagtcgcgcggaagccgttatcggacgggttgatcgggcttcagtgacacgcaataagcagccgcatgaatcttcccaatcatttcgagctgctggcaaccgacggtgcggcccgcaccgggcgcctgaccacaccacatggcctggtccggacacctgcattcatgccggtcggcaccgccggcgcgatgaagggcatgcattggcgcgaggtgcgcgatgccggcgccgacatcgtgctcggcaatacctatcatttgatgctgcggccgggcgccgagcggatcgcagggctgggcggcctgcagcgctttaccggctggggcgggccgatgctgacggattccggcggcttccaggtgatgtcgctgtcggagctgcgcaaggtcaccgagaaggcggtgaccttccgctcgcatatcgatggcgccaaggtcgagctgtcgccggagcgctcgatcgaggtgcagcggctgctcggctccgacatcgcgatgcagatggatgagtgcgtgcggctgcccgccgagcgcgccgacatcgagcgcgcgatgcagctgtcgctgcgctgggccgaacgctccaagcgggccttcgagagcgcacccgacggctacatgctgttcggcatcgtgcagggcggcgatatccccgatctccgtcacgccagtgcgcgcgggctgaccgacatcggctttcacggctacgcgatcggaggcctcgcggtcggcgaaccgcaggcggtgatgctgtcgatgatcgaggagaccgcgccggcgctgccggccgatcggccgcgctatctgatgggcgtcggcaccccggaggacattctggaggcggtggcgcgcggcgtcgatatgttcgactgtgtgatgccgacacggaacgggcgccacggcatggcgttcacccggttcgggcagatcaatttgcgcaacgcccgtcacatcgacgatccgcgtccgctcgatgaggagagcccgtggcctgcggcacgcgactattcgcgcgcctatctgcaccatctggtgcgcgctggcgaaacccttggggcaatgctgctgtccgaaatcaacgtcgcctattaccaggagctgatgcagggcatccgcgatgcggtggccaacggcacgttcgaggacttcagaacgaaaacgcgcgccggttgggcgcgcggggacattgctccgagatgagcttgtgtgatcagttgcacacgatcgggatcggtttcaccgagtgcttggtcacgaacccgtaaccgcaattatcgcaggtccagagatagctgatcagattgtcgaacaggtacgcggaagcttctgccgcgaccattgagtcagcacacaccgggcaggtcggcaaatcgctgccgcgcggatcgggtctggacgcgacggtcgaccgaacttcagcaagtgctggcatgtgcgcctccctttgcgttctgagctgcacctgacgaaagtatataagcccatttgtttgaccttgtcgcaacacaaatacgtaggttttacgttatttgcgcaggttctgattttgcgatgcaacgaatatgcgttgcggcggtttctcacttgcgcgtcatgatgcgctgctccaaatgagagaagaccgcatattccagcatatcccgcaacaggagccgcctgatggacgcgccgtcgacaacgagtgcagtgcaacccggacgcggccgcgtctttgactccatcgtcgatgcgatcggctcgacgccgatcgtgcggctgcggagactgccgcaggcgaacggtgtcaatgcgacgatcctcgccaagctggaatacttcaacccggcggccagcgtgaaggatcgcatcggggcggcgatgatcgtggcgatggagaaggccggtatcatcaatgccgacaccgtgctgatcgagccgacctcgggcaacaccggtattgcgctggcctatgtcgcggcatcacgcggctatcggctgaagctcgtgatgccggagtcgatgtcgatcgagcggcggcggatgctcgccttcctcggtgcggagatcgtgctgaccccggcggcgcagggcatgaagggctcgatcgcgaccgcggaagaactggtgcgcacgacgcccaacgcggtgatgccgcagcagttcaagaatctcgccaatcccgaaatccatcgccgcaccaccgcggaggagatctggaacgacaccggcggcaacatcgattacttcgtcgccggtgtcggcaccggcggcaccatcaccggcgtcgggcaggtgctgaagccgcgcaagccgtcgttgcgggtcgtcgcggtcgagccggaggaaagcccggtgctgtcgggcggccagcacacgccgcacaagatccagggcatcggggccggcttcgtccctgacatcctcgaccgctccgtgatcgacgagatcgtcaagatcaacagcgcgaccgcgatcgagaccgcgcgcgcgctggcgcgcaacgaaggtatccccggcggtatttcgtcgggcgccgcgatcgcagccgccttgcagatcggcaagcggccggaagctgcgggcaagaccatcctggcgattgtgccgtcattctcggagcgctatctctcgaccgcgctgtttgaaggaatctgagacacaggaatccaggatatggccgatcagccgaggcgaccgcgaaccctgaacgatgcccgtagcgaagccgaggcggcgttcaaacgcgccaccaccaaggtcgctgacgcggtgccaaagaccgtggccgtccccggcgtccgggagcaggtcacgctgcggatcgatcaggacgtgctggcgtatttccaggaaggcggtcccggctggcaggaccgcatcaacgcggcgctgcgcaaggccgccgggaagtaactcgcttcgcaagcaaggtagcccgggatgatccccgggcttttgccgtcatcgggtggtggcgttgcagatcgcgatacgcagcggtcagcttgcgcgcgtccgctttgttgcgcccggtttcaggttcaacaggttgccggccaggatcatggccgcgccgaggaccgtataggcgtcgagccgctcggcataaatcagccacccggcgatcgcggtgagcggcacccggacgaaatccatcgggatcaccacggtcgcgtcggcgtggagcagagcgcgcgccatgcaataatgcgagaacgtgccgcagaatgcgatcacggcgagccagccccaggtcgaaagcggcggccaggtccagacatagagcgcgggcccgatgctggcgagcgactgcaccaccagcatccagaacatgatcgtcagcgtctgctcggtgcgcgtcagcgatttgactacgacgaccgagatgccgaaaccgacggccgcgccgagtgcgatcagttggcccggattgatcgctccggtcgccggccgcacgatcacgatcacaccgaccaggccgagcacgatggcgacgatcttccaggatgtcatccgttcgccgaggaagctcgccgcgaggatcgcggtccagatcggcatcgtgaattcgatcgcgaccacctggccgatcgggatcaaggtcagcgcatagaaccagccgagttgcgcgcagaaatggatcaggttgcgcgcgatgtggatgtggacgcgcgcggtcttcacgatcgcgaagccgccattgatgtggatcagcggatacagcatcacgaagccgagtacgccgcgcacggccatcagctggaagacgttgacttcgcgcgttgcctcgcggcccgccaccgccacgatcagcatcagcgcgagccagccggacatccaaagtgctgcgcgagtcttcgagggcgtgcgatccatgatcggagcaggatgaggagggattcccggtatcggcgagccgtcacgaatttgcaacgcgcaattccgtcgactggtggtgcgccggctgtgcgatctctgctaagcaggtcgggaataaccccataaggaggatctgctcatgcgtgtcttgcaaccggccgaatggtcgaaaccccgcggcttctcgcacggcgtcgcgttcgaggcgcctggccaatggatcgtgctcgcggggcagaccggcggcgacgagaagggcgactacgcgcccgagatggccgtacaggtcggcaccgcgctgaagcgcatcatcaagctgctgaacgaggccggcgccggccccgagcatatcgtgcgtctgacctggtacctgaccagccgcagcgaatacgaggctgcgggcgcgggcatcggcgccgcgtggaaggagacgctcgggcgcaatttcccgccgtcgacgctgctctatatcgacggccttgtcgatcagcgcgcgaaggtcgagatcgaggtcacggcgttcgtgcccgcaacataggacattcagacatgaacaagagcaacatgcgaaaggcgcccgagctcctcacggggtttgcgaccggctggccggagcaacagccggatatcatggtgatctccatgaccacggaaaaaggcgtgtatgacttcgcggtcaacaaggagcaggcgctgttgatcgctcgcaccatccagcagaccgcggagaatctcggcaagccacgcaccgcttagaccatgatgcgtttccacggaatcgcatcatggtctcatctctttgtttgagcatgatcttttcggaaaaccggtttccacttttccggatcatgctctagcgatcgcatggccaacaaaaaacgccctcgagattttgatcccgggggcgttgttacgtgaaggtcggttacttcgacagcgtgatattggcgccgcggaactggctgtcggccctgatcgtgaccgactgcttgttgcctgaggtccgcatcgagatgtcagcgttgaagccgggggcgctggccacgacctggaagttgccgccgccgccgcgaccgcgcaggtcgccgctgacattgcggctggactcgctccaggatccgctgaccgcgctgccttcagcctccacgtcggccgccaagttgaacttgtaggcgtcgctggcgcaagtcaggctcatggtcatcttgggtccgccgacgcgataggtcgcacggcaacggatccgctcgcttgatccgtcgtccaaggtgaccgtgccggcgcccgaccaggtgcccgccatgccggcgaacgggccggactgggcatggcccgcggtgctcgcgagtgcggtcacgaaaaacgcggcggctgcaaatgcgggccgccgcgcgatggcgaagaaacgcgatacgctgctgatcttactgacgggatgcttcccatcggccgctgcacggtacgccagctgatgccccattccacttccccgatccggagttgccactgagttgtccgttcgcatatgcaccattgatcgagactcgcacaagacccccgctgccgacggtgccggagatcgccgcgccctgcgccgagatctttccttcggcgaccgtgacggtcgagctctgcgacggctcgcagctgccggtcttggtgaccacagtgacgttccaaaggccgtcataaggctgctgggcggtggcgggcgctgcggtgagggcggcagcggaagcgaccgaagtgaccaaaatcaggtcgcgaatgcggatcgaacgcatgaatcaaatccctgtcatttcgtgtgatgacgcggcttatcttgtcacaatgtgttcaaaatttgctgcgccgcgggagtccccgaatgttcctgtaaactcaaacacatcatggtgaattcggttccggctctggaacggagaatctgatctcttgctcccgatttttggtatttagataccgagcttcgatctagtgcttgccggggctcagattgggcgccttggtcgcgaactgctcgtcctgtggcttggccggcagcgcgccgttgaccttgccgtagtcgatgacctcgccgagcagccgcaggccgagcggcgccagcgcgcgctcccacaattcgcgggcggtctcgcccttcttgacgaacacccagtcctgcgcggcgatggcgccggcatccatgcggtcggcgaggtgatagatgctgccgccggcgatcggatcgccttccttgatggtccattccaccgcggcgatgccgcgatggcggggcagcagcgacgggtggtagccgatgccgccaagcttggccacggcaagcgcctccttgctgacgcgggcgtggctgtgggcggtcacgatcaggtcggtgccgggtgcgatctcggcggccgtcaccagcttgggatcggcctggaccacgacttcgatgccggccgccctggccgcggccgccagccggtcctcgccgtcatgcacgaccaccctgaccagcgtgacgtggtgctcgcgcagcatgttcagggtcgtcacgccgaaatggcgggaaccgacaagggtaatgcgcatggggatcacttccgtggggcttactctgggatttgctcttggatcgcatgggctgccgctatgccgatagcacaccgcagccggctgtcttgctgtcctgccggttatcaacagggcggccggttggcaatgtcacgccaccggccgcttgctcgccagcaccttgtcgatgcgccggccgtcgaggtcgacgatctcgaagtcccagccctgcgcagcgatcttcgcgccggtatcggggatcgcgccgaacgcatgcagcaggaagccggccgcggtctggtagggccgcggcgagggcagcgcgatgccgagcagttcgctgaactcgagcgccggcatccaaccggagattagataggagccgtcgtcgcgcttgacataggcgggctcggccgggccttcctcggtatggaaggcgccgacgatggcctcgaggatgtcggcgctggtcacgacaccctggaaggtgccgtattcgtcgtgcacgaggccgatatgcaccgcggagtcgcgcaggatcgcgaccacgtcgcgggcgtcaacggtttccgggatgatcggcgcatcacgcgtcagcgcacggatgtcgggcgtctggccggcgaggtagacatcgagcacgtccttggcctgcacgatgccgagcgcatggtcgcggttgccgtcgaacaccacgcagcgcgagtgattgctcttttgcagggtcgccaggatctcgggagcaggggcggcgaggtcgatcaggctgacctcgtgacgcggcgtcatcacggctccgaccggaagatcgccgagccgcatcacgccggcgatcatctccttttcgccgggctcgagcacgccggcattctcggcttccaccaccagcgtcttgatctcgtcctcgctgacgcggtcctgcgcgtcttcgcggtgaccgaggacccacagcaagaacttgccggaacgatcgagcagccacaccagcggcagcgacagccgcgccatcacggtcatcgccggagcaacccgcacggcaaccgactccgggtcgcgcagcgcgatctgcttcggcaccagctcgccgacgatcagcgaggcataggtgatcacgccgacgacgatgccgacaccggccgcatcggcgacgttcgcagccagcccgagttcgaacagaaattgcgaaagccgctggccgagggtggcgcccgaaaaggcgcccgacagcacgccgatcagcgtgatgccgatctggaccgtggacaggaattttccgggatcggaagccagcgcgagcgcgcggcgcgagccgctgacgccgcgttcgaccagcgccgcgaggcgcgccggacgggaggagacgatcgcaagctccgacatcgacaacagaccgttgacgacgatcaagaccgccacgatcgcaagttccagataaaacacgggagtccctaagcttcggcggcgttggccgccctacgacgccaatataggcacgccggcgctgttttgctgtgcctcgtcggggggccctgcacaagcagagggtgcgtatgccgagcatgcagtaggagatcgcggcattttggcgcgccggccggcatgcggccccgaaatgccggccggtttcctgctaggcgaggatccgcagctcgggcttggcgaacgtcttgcccgatgcggcgggctgactcagcatttgcctggaagcggcttgcagttgcacgcgcagatcggcgttgcattgcttcatctggttgcgcagttcgcggcgggagaaggcggtgagcgtggggtccgcaagctgctgccaggcgttgcggagccattcctgcagctcgcgaatattctgatccaaaatcttctgatcaaggacgctgggctgggtcatgcagccaaatcccacgaagtgatcagttgcaagataacgctgattcgcgccgcttcacctagcgctatgttgctttgggcgcgtgttcagcgggggatcggatgcggcaggcgccgccatggcccgcgtcagcgggcgttgtcggcgccggcgcgcagcaggtccagtgcgatcggcagcgcgaggaacagcgcggccagcatcgagagatgacgcgtctgcgtggcggtcaggccgagattgtgctgggcgagataggcaagcatgatcgccgtgtatgcggcaacgcagattgcgaccacgatgcttccgaaatcggtcttgctgtccatggcgcaccacttcgttgcgggagtggtgtagcgtggctcgccttcaccgactatgagctggatcacggccgcgaggccgccaatcggcttggcaggtctcggcgatcgatcaggcctgccagccgcagagccgcatcggtcgtggcgatgcgccccaacaggcctaacgaggcacgttgccttcggggcggctttcgcgcggaagcttgaccgggacgtggggcgacgtgctcaccacgcgcggggctccgttggaatgggtctggccgttgagcaatgtctcgagcaccaaaaagaacttttcagaaagcatgggcgtagccctcgtggtctaatgttatgtcgcggcgctccgcggaaaattcgatcaactaaatgcgagtcgcatcgacatggcgatgccgcggcgcagggtcttcaatacgcaatccgcaagattaccggtgcccgcgccatcaacgcatcgaggcttgcgcgaaatagttgccaaaatcctaacgattgctggtgcagctcgtgatggcactcaccgttccttcaaggatgcacattaacgataggggtatggatcgtgaccacgatatcgacgaaggattcggatcggcgcttcgccgcaactacgggcgactggcctggtggatcgtgcggctcaatcgcgtgttcgagccgtcgcgcgcggccgagccgacgcgcacccaattgccgccacggccgaccgtcccgccgaggcggccggtaccgccacgtccggaataggccccaccagaataccatcgtctgctgtatcggccattcggccggactgctatgcatgcgccatccgcggaccccacggtccgccgtttttgacgatgcggctgcgaggcggccgagcgacgagagggattgatacaatgatcgagacggttggcatcatcggcgccggaaccatgggcaacggcatcgcgcagatctgcgctgccgcaggactgaacgtgaccatggtggatatctcggacgcggcggtgcagcgcggcctgaagacggtcgggggcagtctcgatcgcctggtcagcaaggagaagatgaccgcggcggatcgcgacgcgacgcttgcgcggatcaacgcgaccaccgacaagtccaagcttgccgcctgcgatctcgtgatcgaagcggcgaccgagaacgaggagctgaaggtcaagatcctcagggatctctgcgccgggctgaagccgagcgcgctggttgcgaccaacacctcgtcgatctcgatcacccgccttgcggcctccaccgatcgtccggaccgcttcatcgggatgcacttcttcaatccggtcccggtgatggcgctgctcgaactgatccgcggcttgcagacctcggacgacacggtcgccaaggccgaagccttcgccaagcgcgtcggcaaggtcgcgatcaccgcgaagaacagcccgggctttgcggtcaaccgcatcctgtgcccaatgatcaacgaggcgatcttcgcgctgcaggaaggcattgcgaccgcggaggagatcgatgccggcatgaagctcggctgcaaccatccgatcggaccgctcgcgctcgccgacctgatcgggctcgacaccatgctgtcggtgatggaggtgttctacaccggcttcaacgatcccaagtaccggccggcgccgctgctgaaggagatggtcgatgccggccatctcggccgcaagaccgggcagggcttctacagctacagcaagtgacgtccgcgcgcggctgatccccgtagtcatccgggatggatcgcgccggaaggctcgcgtaaccacaacacctgatccgccacgaggcgggggacatcagacacgaggcccggactcctaggcacaccgggcctcgtgttttttgtatgcgaggcacgaaggagcgccccgcacgatcgggtcacaccttcttgaggccacgagcggaaacctcgcagattctgcctgcgtacctaaatcaacggctggatgccgatcgaggaaggaagcaggatcatgcgcagcacgaaatgggcgattctcgccttcgcggcgctcgggacgagctggatagctggctccgtggagccggcggcggccgatcccttcgactatccctggtgcatccagggcagggacgagggatatcccggctattgcggttaccagacctaccagcagtgccaggcgtcggcgtcaggccgcgacgcctattgcggcatcaatccacgcgttgcgttcagccagcagcggaccctgccgcggtcgccccggtaagcgcggtgcgcatgtcggcccggcggccatcaggcacgatggttgcattgccgatggctgaacaattccccctgctttggagagcacatgggcgagatcatcagattcatctcgaaatccgaactggagcgtgcgcgtctgattcgcgaggcccgggccaactacgagcgcatctttccatcggccgatccggctgatgcgcaaggcgccgcggtcgagggcgacggcggcgaagcgtcgtcgaagccgtagccggcattgcctcggggataaggcgggcgctccgatgtggaagcggaactggcagcgatgttggcagacctggacgatcgacaagccggccgcgcttggcgactggctctggctggtcctggtggtcgagctcgccgccttgctggaccggctgacattgcggaagctgattgcgctgatcccggtggtcatcctgatcgtcgcttacctgcaccggattccgcttccgcccgaattgatgctggtcggcgatatgctggcctatatcgacgtcttctcgatgatcttcctgatcggcttgttcacgcgcgttgcgaccgtcctggccgtcgtcaggcgggccattgcgttggttcgcgatatcgcggagcgcgtgccaaaggcgttgcaccggttcgacatgcggcatcgccgcgcaacggacagcgcgcgccgcaggcggctcgcacgggccggggacgacgatgatgacggcgccgtccccgcatacctggcctgggcctaggcggtgcggcgttgaggaacgcgattgcgcggcctatcgggactggtggtgcagctgatcgccgccgccccggtgcgatctcgaaagatcggtcggaacctgccgggagcgatggaacgcgaagcccatctggacgctccagataccgaacatcagcgcgcctgccacacatgccgccacgaaggcccaatcgcgcttcttcatctggttcaacaatgccaactcaacgccgcgccaccgcacccttcgcgaagatacccctgcactgcgctcaagacgttgctgcgtccgaagcaagactcacgcatagtgtagccatcgggtgcgcttgtcgatcagcccggcgcgtgtccgcgcccggcgcgcgcccgcactggtcacggagcagtgattgtcaaatcatgcgtccagcaacactccgaccagatagtccggcgttcgcaacaatcttgccaaactttcactaggccgttggcgcagtgagttcgaagatgctgaacggaatcggacgaatcgcaatgaccgaacttgaggagcttcgatacttcgagcaccagtgcctggagatggccaggcagtccacgctgccggatgctcgacatgcgctccagagcctcgcccgcaactacgccacggcggcggaaatcctcgaacggcgcgcgcaatccgccaacacggcgctcgcccaactgtttcgacgcctgaggctgtgacgaggcagaagcagcggccaaaccaggcgagctgcgggttgccacccgcgcgaacaacgtttcattaacccgactcgcccacgctcgtattgggccgtctggatgggccgcttgcagagggccgccacggatgagttccgtggcggccctttgtcttctgaccgtgttgagggagacgaccgatggactacggcgccttcaccgacgccagcctgaagatgatgtacgaggccgtccgcggcgcgctcaaggccgacgatgaattcgaggcgaacggcgaggagccgaaattccgggtccgcgcgacgccggagtggaagcggcacgccggaagcctcgaagccgagatgctgaagcgagggcttcaggtcgatatcatcgattggacgggcgggcagggcgagctgccgctgtcttcttgaacaacgtcaacttcgatcgaccctgatctccccattgcgctgacgcgtgtcgattgattccgcagctgtccggctatcctttgggaatgggtttcccgcccgcagggcctatcggcttgggacccgccaggggcggagggccaatggacggaaacggaatctgatcggtatcgttggttgattttgccggtcgtgtcctgggacgaacctcgtcgtccaatgacggacaagtcttctcccagcctggaccataggccgtgtcgagtgcggcaaggatgcaaggcgcgaaccagactgcgacggccctggcaaatctcatgtgccagttcctcacgcttgaagaaccacggaaacaatccgtgtgcgcatatttggcggattgccggcgctgttgcgacgacgatacagagatacaagcgcaacgatgctaaccaacctgcatctgaaccaggatggggttgtgtcgtgtcgggatctgatcagtggaacgctacgaatagcccttactcgtctgcccaggcgccactgctgcgcgatgagcagcagcagttcgaccactatcacaagttcgacgatgccatcgcgcgatcggcgcagagtggctcgaaaaccgtgatttgggatcgctacaatccgccggttcgttgatctggcgggtggccgggcatcccatgggcgacggcatgctgtcctgaccgtcccgaaaaagtacgccgccgggcccgaaatggtttgtcccgacggcgccctgtttcaatctggggactgcaatcccagcaccgagcgaaatcgcaagttcagtgccaatcggatcagcccggctcaggtctaccggccaccgttcatcacaccggctgctagcgccgcgcgaggtaggccaagccgagcacgcccagtgtgcatggtgtggacgatccgaactgacctccggccggcttaggtctatttctctcttaagtgattgatttaattggtgagcgcggagggactcgaaccctcgaccccatgattaaaagtcacgtgctctaccgcctgagctacgcgctcactcacctgaacatcagatccggaccaagcggtgaaaccgctccggatcatgctccagcccgcgctgtgtagggggcagggcccatcgggtcaatagccgatgggcagtcaattgtgcaccgttgcggcggatttgccgttccaatgcctgtgcttagggccgtttcttgaagtgagcttcttgttggcgcatggtctttcggaaaaccgctgcgcacttttccggatcatgcgctagttgtcgcggccgatttccgagccgaccggctgctgcggggcggcgaccgagggcaggctgaccggtcgcaacccgatcagttccgcggtgcggatcgcgctgttgcgccagaacgcgaactcgttgatccgcgaattctccaggatcgcgatcgcgaccgccgccaggaacggcaggctctgcagcaccaggacgccggcgaagatgtagatctcccgcacctgcttgtagccgttggtgacgaccagcacgatggcgccgatcaggagcagcacgccgatcacggcctcccagaacgcctggaattcgatcgacatccgcgacaggccgcccttggaggtgcgggcgaaggcgaggtgctcggtgatcaggccctgcgccaccgcgcgcgacaccgtccattgcacgctcatcgccgcgatcatggcgcccagcatctggccggccttgatgttcacccgcagccggtagagcgcgacgaaatgcaccagcgagacgatgaaggaggcgatgatcggaagggtcaggatcttgtcggggatcgcgatgtcggcgaaggcgacgatcggcacccagatcaaattgaggatcgcgaccacgacgccgagactttcggcgccgagccagttgagccagccgagcgagaattcgcggcgctgatccggcgtcagccggctcgccccgggcaggaagcggcgccagtgcttcttgacgatctggaagccgccataggcccagcggtggcgctgcttcttgaacgcctcgtaggtgtcgggcagcaggccttcgccgtagcgcacattggtgtagtgcgtgagccagcccgcctgctggatcgaaaggccgagatcggtgtcctcgcagatcgtgtcgctcgaccagccgccgaccttgtccatcgcggcgcggcggatcaggcacatcgtgccgtgcacgatgatggcgttgaactcgttgcgctggaccatgccgatgtcgaagaagccggcatattcgccgttcatgatgtagtgcatcagcgagcggtcgccgtcgcgatgctcctgtggcgcctgcaccaggccgacgcggggatcggcgaaggcggggacgagatccttgagccagtccggatgcacgacatagtcggcgtcgatgatgccgatgatctcggcatccgccgcggtgcgttccatcgcgatccgcagcgcgccggccttgaagccctgcaccttctcggcattgatgaacttgaagcgctcgccgagctgccggcagtgatcctggatcggccgccagaactcgggatccggcgtgttgttgatgatgcagacgcactcgaaattcggatagtcgagccgcgacaccgcatcgagcgtctgcttcagcatctcgaccggttcgaaataggccgggatgtggatcgagaccttcggaaacttgacgtcctcgccgatggtggcgggcgccagcgtcgcgctcttgccgatcagccggcgtgggccatggccgaacgccaccgccgcgatctcctcgatccgcgccatcgcgatcagcaccagcggcaccagcagcacgaggccgaggctgagcgcgaaggccgagccccagacgaaataatgcgtggtccagtatgagaacacggtcgcaacccaggcgccgacgccattggcggcggccgacagcaccagcgcctgcatcaccgtcggctggtccagccgcaggatcggcagcgacatgaacaggccgacgaggaccgcgaccagcgcgatcttccagtaattcaggtcggtgaccggaccggtccaggcgaacttcgcctcgcggtcggcattgaggatgccccagtagggaccgacgccgccttcgaagtacttccagggctgatcgatcgcttcgacgatgttgtagtccatgccgatggcttcggcgcgggtgacgaagttgcgcagcacggtggcctgctggaacgcgcccggctcggcgttgcgcagattgtagccctggctcggccagccgaactcggcgatcaggatgcgcttgccggggaaggagtcgcgcaacagattgtagcggtcgaccgcctggtccaccgcctgcttgtcggtgaagttttcccagtagggcagcacgtgggcggcgatgaagtcggacgaattggcgagctgcggatggtctcgccagatgttccagatttcaccggtcgtgacgggaacgttgaccgatttcttgacgcgctggatcaccttgatcaggcggtgcacgttgctttcggcaatcgcccatttgaccgcttcgccgcgcttgtcttcgggctgcgtttccgcgtcgtgcaggcgttgcgcctcctcgcgaaggattcgttcggattcctccggcggcactccgacttccggaaccgagccgaggttttcgagcgggacctgctcgccgcggaacacggtttcgttgccgaccacgatgccgatgacgttgctgttgcgcttggcaagattgatcgcagcttcgatctcgcggttgttgcggttggcgtccttgtcgatccaggcgccgaccgtgaccttcatgccgaactcggcggcgaccggcggcaccagttcgttgccttcggtcgacgaatagaggcggaccgccttggtgagcgtcgagagctttctgaggtccgtgcgcaccttctcggtgtcggcggcaacgtccgcgaccgtgtggcccgactcgaacggggcgtaggacaggctcggcagcgtgccacggaaatcgggcgctgcctgcttctcctggaagagaccccacagggcggcgtgagcggcggtgacaagcaacaggacggcgacgacggcgcgcatcgcggttaaaccatacggggcctgagattgaggactaagcgaacccgtcccctgggttcgaccaacatggcggcggagcgaaagatatctccgccatccgatttaacaactggtatgccgcaatggcgttttaagggcgcaagccgttccagccgcgaaaaaaatcgcggccggtcccgatcgcgcggcgcgcttatttcgacgccggcgcaggcgaggccgacggggttggcgcaggcgagggtgacgctgccggcgctggcgcgccattgccggccgtcgacggcgccggggtgggtgcaggcgcggcggcggcggcctgcggctgggcgcccggattgatccagcaggcgtggatgcggccgtcgaggctgccgcgcaccttgtcgtcgatctgggcgccgaaccgggtcaggcagcggaacgcggcctggacgtggccgccggggcagccgaaccggtcatagaggtcgagatgacggaatgcggtatcgaggtcgtcgttccacatcaggcggaccacgcggcggccgagccagacgcattccggattgccggccggaccattgatggcctgctgggcctcgacgaattcctcgaccttgcgctggttggcttcccgcgcggcagtggcgtcggcctgtccgggctgctgtttggcctggtccggcggattcggtgtgccgctctgggcgaaagcgccgccgtctccggtcaggagcgcaaggcctgtgacaaggcccgttacggcaaggtggcgcaaagcagtgttcttcaactcaagcagccgtcgacgcatgtattccccgataatgttcctgcccccgcgggatcatcctaacggctcgcgtgatgccgtccaaataggtctccagtgcggcggagactctggcggagtcagatgaccggaatttggtattttgtccagcaaactcacaactttatcgttccagagcaaaactgtcgcaggacaaccatggtattgacctaatcctactcttggcagacgggctgtgaccggctaattcgacggtcccccggaggatggaaccgatttcgcttcgtacgccgctggcgcttctcctgatctcgctcgccgtgattgcatccgtgtggtggtggctcgccacgccgattacgctcgtgcgcgcgccgatcgatcctgccgcaaagctgcaatgcgtgtcctacacgccgttccgcggcgcccagacgccgctcgatcccaccacgcagattccggtcgagcagatcgagcaggacttcgccgatctcgccaaggtcaccgactgcgtgcgcacctattcgatcgagaacggcctcgaccaggtccccgccgtcgcggccaaggtcgggttgaaggtgatgcagggcatctggctcagcagcaaccgtttcaagaacctgcagcagatcgcgatcgcggtgcggctcgccaaggaatatccgggcgtggtcacctcgctgatcgtcggcaacgaagtgctgctgcgcggtgagatgacagccgccgatctggccggcaacatccgcgcggtgaaggcttcggccggcaatatcccggtcacctatgccgacgtctgggaatactggataaagaaccgcgagatctatgacgcggtcgatttcgtcaccattcacatcctgccgtattgggaggacatcccggtcaaggcgaagtacgccgcggcgcatgtcgacgagatccgcaagaggatggcggtcacgttccctggcaaggagatcctgatcggcgagaccggctggccgagccaggggcggatgcgggagggcgcattgccgtcgcgcaccaaccaggctcgggtggtgtcggagatcctcgacctcgccaagagcgagggctttcgcgtcaacctgatcgaggcctatgaccagccctggaagcgcaagctcgagggcaccgtcggcggcaattggggcctgttcgattcggtgaagcggcaggtcaaatatccacccggcgttccgatctccaactatccggactggaagctgcagatggcgggcggcatggcgctgtcggtcgccaccttcctggtggcctggctgacattgcgccgcaggccctggacgccacggccgtcggcctggattgcagtcgccatttcggcgacgacggcgggggcgctgctcgggatcgccggcgacaagatgtattacgagagctacggcaccagcggctttctgcattggggcgtgctgctcgcggccgcgatcatcgcgcccttgctgaccgcgcatgcgctgattgccgggcgctcgctgccgaccttcctggaactgatcgggccgcgcgactatcgcggcaagggcgcgatcggcgcactactggcgatcgtgcttgccgtcaccaccgtcatcgccgccgagaccgcgctcggcttcgccttcgatccgcgttatcgcgacttcccctatgcctcgctgaccatggccgtggtgccgttcgcgctgctgaccatgctcaaccgcccgaaggaaggcatccggccgctcgccgaatccgtgttcgccggcctgctcgcgatcgccgccctctacacgatctacaacgagggcacgatcaactggcagtcggactggacctgcgtgatgtatctgttgctcgccgctacgctgtggcgggcgcgggccgcgcaaaacccaggatgaacaggccgatcgcaaggcctgacaacacgacgttgtagagcacgatcccgagcccggcggcaatcagcccgccggtgagcagcacgatcgagggccgcatcaggttcaacagcgcgatcaccagcgcggtgatgccgaacaccgaattcttgaacagcacggtcgagagcgcacgcgccttgcagagcatggtctgcgtgccggcgtcgcaggccagcgcgacgggcgagaactcgatcgccagatagcgcacgtagagcgcgtacccgacagtgacgaagccgacgaccatcaggaactggacctgatagggggagaggcggaacggaggttttgtcatcgcggcactatggtcgggaacgggggctgggacaaggctcggtcaaagcagcgaaatcggttgagaatttggccgcaatcctttgccggacatgactattggctgtttcgccggaacatcgacgagattgtcgcaggctccggcttcttttcctcgacggccggttgcggcggcgcggcgagggtgctgcgcttcggcgccaaccgccggtgcggctgcgccgctctggctccggcgggcggctcgtttacggccagccgctggccgtcatagatcgccgtctcgcaggtccgctggatcaggctgaggccggcgcagatcttggcagcggtgccggcgtcgttcagcggtccggcgaccaggcgcagctgcatgccgagtccgttgctgttttccttgatgacgatgatcggccgcagcgcggccagcggcgcgttggccttagccttcaacaagccgcgccataatgcccgtagtccgttgaccgaatttgcggtgccgagatcgacgccgaattcggtgcggtggatctgagccttcggcgcgtcgtcttcaacgtcggagtccggatccggtgtgatcaccagcggcggtatcggtgcggcgttgacgtcgttggcggtcggcggcttgatcgttgcggtcgccttgctcgccgcaggttcgagcgatgccacccgcggcttctcggcaggtggcttgtccgcgaccggcagcgccgcaagcgctgccgcggccgcctttgtatcctcggcactggctgccgcagctgcggcactcatcggactggcaactgttgcggcgggagcaggagccggcgacgaattgtcagccgccaacggcttctctgtggcaaccggcggcttcgccgaggcgggcgccggcttcctgtcagccgttacaggcttgtcggccgcagcagcgggcttttcggttggtggcggcttgctgtcggtggctgccggtaccttgtcgggcgtgaccggcttgtccgatacggcaggcggcgtggttgcgacgatggcaacggctggtgcggcggcggacgccgtattggcggaggtcggcggtgtgacgggggccgccgccgagggaggcggtcccggcacaggtgcggccggctgctttgcgatcgtgccggtcacggagtcgagaccctgttccagcgtggtgacgcgcgaatagagccggtcgcggtcgccgttcagcgtatcgatcgcggaggcgagccggcgcgtctcgttatggctctccttcgccaatgtctgcaattgctgggcctggcgtgcgatgtctgacgcggcgaccaggtcgcgacgcatcgtcagtgccgactggttggccatcacggcgatggtgacggcgccgaccgcagctgcgccccacgagccgagccgccacagcatgcggcgatcgaaggcgtcctcttcggccaaaaagccggaggtgctctcggtgtctaaatccgccgccagactgtcgcgatctttggccaaagcccgcttggccctcctcaaggcccgccgaatcacgaggcaaagattaacaggaaatggaccgggaacttgaatccggaggaccatgagggcgaaacggtttcttctgccggggaaaacaattaaagacggcctccaagaaggctttgaacgtaagctttggacgttagctttgaacgtaaggttggcgcggcgaacttcgcgcgatatcggggattttcgaatgactgcgcgaacgagcctgacagtggtgcttgcggccggcgagggcacgcggatgcgctcgtcgctgccgaaagtgctgcaccccgtggccgggcaggcgttgctggtgcatgtgctcaatgccgccgcctccggcgtgggctcgcagctcgcggtggtgatcggccccgatcacgaggcggtcgccgccgaggcgcgccgggtgcggcccgatgccgggatctacgtgcagcgcgaacggcttggcaccgcgcatgcggtgctggcggcgcgcgaggcgatcgccggcggcgccgacgacctgctggtcgcgttcggcgacacgccgctgatctcggccgagacctttgcgcggatgcgcgcgccgctgcgcgacggcgcggcgctggcggtgctcggcttccatgccgccgacccgaccggctacggccggctggtggtcgagaacggcacgctggtggcgattcgcgagcacgctgacgccagccccgagcagcgcaccatcacgctgtgcaatgccggcgtaatggcgttcgacggcaggaccgcgctcgcgatcatcgagaagatcggcaacgccaacgccaagggcgaatactacctgaccgatgccgtcggcatcgtcagggacatgggattggaggccgtcgtgatcgagaccagcgaagacgaagtgcgcggcatcaacaccaaggcgcagctcgccgaggccgaggctgtgatgcaggcgcgactgcgcaaggccgcgctcgatgccggcgtgaccctgatcgcgccggacaccgtccatctcgccgccgataccaaattcggcaacgacgtcgtgatcgagccgttcgtggtgatcggaccgggcgtctcgatcgacgatggcgcggtgatccattcgttttcgcacctcgtcgaggcgaaggtcggcaaaaaggtgtcggttggtccctacgcgcggctgcggccgggcacctcgctcggtgacggcgcgcggatcggcaatttcgtcgagaccaaggccgcggtgctcgaggctggcgtcaaggtcaaccatctctcctatgtcggcgacgcccatgtcggcgccaattccaacctcggcgccggcaccatcacctgcaactatgacggcttcctcaagcacgagaccttgatcggcgagggcgccttcgtcggcaccaatacgtcgctggtcgcgccggtcacgatcggcaagggcgcctatatcggctcgggctccgtcatcaccagggacgttcccgacgacgccatggcgctggagcgcagtgagcagtcgatccgcgagggcggcgctgcgcgttaccgcgcagcgaagctgaaggcgaaggcggcgaaggggaagtgatcttctcctggtctgatcgggagtctgcctccgtcccaagacgtcgtccctgcggaagtgttcgcagggccccataaccacagggttgtgttgctggagcaagctgcggccacagcgcggcaaaccagttggcgctcgtggttatggtccggctcagggccgggacgacaccgaatgtgctgcgcgctcagtgaatcaggccgcactcttcgcccgggcaggttcgctggtggtcggctggaccggtccgagcaggatgcgctgctgcatctcgtcgaaggcgagatctgcgttcttctcccgggtgaccagcgacagcaggatcgcgaccgcgaaggagagcggcatgctgatgatcgccgggttgcgcagcgatacgaaccaccattgatgctcgatcgcggtgagctgcttgccgagaatgtcgacctggatcgtcggcgacagatagatcagcaccagcgagctcagcgtgccgaccagaatgctcgccaccgccgcgggcgtcgtgaagcggcgccaaatgatggagagcacgagcgaggggaagttcgcggcgcaggcgatcgagaacgcgaggcccgccatgaaggcgacgttctggccttcgaacgcgatgccgagcatgatggcgaagatggaaatcagaacggttgcgacgcgcgcgaccttgagctgctcttgctcggaagcggcgccgttccggatcacattggtccagacgtcgtgacagagcgtggcgacgcccgacagcgtcagccctgcgacgacggcgagcatggtcgcgaacgcgaccgcgcagatgaagccgaagaaagcgttgccgccgacggtgagtgcgagcaggggcgcggccatgttgccgccacctccggctttggccaccgcgtcggcgccgaccagcaccatggcgccaaagccgatgatgaagaccatgagatgaaagacgccgatcaggccggtagcatagaggatcgacagccgcgcggccttggcatccttcaccgtgtaggcccgcatcagcacatgcggcatcgcggcagtgccgaacatcaggccgagcccgagcgagatggcatcccattggcccgagaccaccttcgatcccggctgcagcaccttggtgccgtatttctcggacgccgcggcgaacagcttcagtgggttcatgtcgaaatgggtcaacaccaggaaggcgagcaggatgcctccgcccatcagcagcgcagccttcacgacctgcacccaggtcgtcgccaacatgccgccgaacaggacgtagaccagcatcacgctgccgaccacgaggaccgaccaggtgtagggcaggccgaacagcagcttgatcagcgatcccgtcgcgaccatctgggcgatcaggtagaacaggatgacggccagcgttccgacggcgccggcgaggcgcacggggcgctggcgcaggcgataggccacgacgtcggcgaaggtgaagcggccgacgttgcgcaggggttcgacgatcaggaacagaatgatcggccagccgaccagccacccgatcgaatagatcatgccgtcgaagccgttcgaggtgacgatccctgcaattccgagcagggccgcggcgctcaggaagtcccccgcaagcgcccagccgttctgccacggcgtgacctggccgccggcggcaaagaagtgctcggtggtgcgcgtgcgccgcgcggcccaataagtgatccccagcgtcaacgccatgaaggcgaagaagaacccgatcgaaagcgtgctgctgcccattcttactctgtcccctcagcgaagcctgcgaacgcctgcgtcgagcacccggttcgcccacagcacgtagaccaggcagagcacgaacgaggagatgatgacgagcggaccgagcacgatgcaaagcgacaggcccggcatcaggatggtgccgagcagcggcttgtcgaacgcgaacagcgccatgaagccgaaatagatcacgatcatcgcaacgctgagagcgagcgcgatggtcagccgcgtcttggcgagcttgctggccgatgcgacgccacttggtgccggaccggcattgccgggaataaccctgtccatattggccccctaagacttgagcgcgctttgccttgcgccaatcggacgagcttcagccggaccaccacggaagggaattatggatttttgcaatctgctgtgcgcggctgcggcagggcgtcggccagcgtgacctgcatgtcggggtcctgcttcagggtatttttcaggaaggcgcggacggcgcggatgcgcggcgcaaattgcaggtcgctgtggacgttgagccagacctcgcgaacggtgccggcgagggcgggcagcacggggatcaggtcgggccggtcgctggtggcaaagctcggcagcatgacgatcccgaggccgcccgccgcggcattcatctgcgcgatcatgctgttggagtgaaaggcgattttcggctcttcgatgacatcggcgagccagcgcaccgaatccacctggatcagatcctcgatataggaaacgaaccaatgatccccgaggtcgcggagcgttgcaggcatgccgtgcgtgtcgagatagctccggctcgcgaatagcccgagccgaaacttgccgatgcgttccgagatcaggcccgggccgggcggccggaagaaggacacgaacaggtcggcttcgcgcttatggacgtagaccgtctgggcggacgtgacgagttcgacggtgagttgcggtgcggtgcgccgcagatcggcaaagcgttgcgccagatagagcgaggcgatcccttccatggtggcgagccgtacgttccccacgagctcccgggtgtcgctggcgctggcctcctcgcgaatggcgatgacagcgctttcgacccgctcggcgtgacgcaacagccgctcgccgacttcgttgagcttgagcccggtgcggtggcgttcgaacaccgcgatcccgagcgaggcttccatctgcgcgatgcgccgactgacggtggagtggtccagccgcagccgctttgctgtttggctcaaattccctgcgcgagcggcacagagaaatacccgcaaatcgtcccagttgatcgtatcgaacatgacctgcctccggattacggccgttgccagcaaagcaattcccgttccaacgcgaggtggctccgatccttcgcaaccgaccatgcgacaattccgatgcatgcctgcgaggcagggatgataccgcttcgctccccccatcctagccgggatttttcatatgcttgctcgcttcaaggctgccgccgtccacgccgcgcccgtgttcctcgacagccaggcgaccaccgagaaggcgatctcgatcatgcgcgaggcggccagggccggcgccgagctgatcgcgtttccggaaacctacattcccgcctttccggtctgggcggcgctgtggcctccgatcgacaatcacgacttgttcgtgcgcatggcggcgcaatccgtgtcggcggacgggccggaagtggcgcggctttgtgccgaggcgcgcgcccttggcgtcaccgtctcgatcggcatcagcgagcgctcggccgtcagcgtcggggggctgtggaattcgaacctgttgatcggcgagaccggcgaaattctggtccatcaccgcaagctggttccgacattctacgagaagctggtgtggtcatccggggatggtgcgggccttgtggtcgcggagacacggcagggccgcatcgggggattgatctgcggcgagaacaccaatccattggctcgtttcgcgctgatggcgcagggcgaacaggtccacatctcgagctggccgccgatgtggccgacccgacgcccggccggcggcggcaatttcgacaacgtcgccgccaatcgcatccgggcaagcgcccactgcttcgaagccaaggtgttcgggatcgtcaccgccggctacatggatgagccgatgcgtgccttcctcatcgaacgcgacagaacgatcgccgatgtgatcgaccggacgccacgtgcggcgagcttcttcgtcgatccgacgggggtcgtgtttggcgatgaattgcaggatcaggaggggatcgcctacgccgagatcgatctcaatcgctgcgtcgagccgaaacagtttcacgacgtggtcggttactacaaccgcttcgacatttttggcgtgaccgtcgaccgcagccggctgaccccggcacgatttcgcgatgaacgacagccaggagcggaagcgcaggcgatcctgtccgtcgacgccgacgccggatcgaacgggcagcgggtcggctagccttcaatccagtgctgttgccaatgcgcgaatgtctgactacgctttaccggaggtaggaccccaagcgctctcggccggacgctcatgcccaaattcctccgcatcggagtccatcagtccaacgtctccggatacacgtccaaggcatggtgcattcggcgcaccggctcgacggtcttcctgaagtggggcgccgtcgaagttcagggcgctggagccggccgaaaagtctactggacgtttccaccgcaggaaaagaccattcgctgccgcacggtgcagcgtgcccaggattacaccaaggcggccgtcgcacggcggcgcagccatcgttacgaaccgctgacgggaaacatcgccaaccggcggtggaccgccgatcgaggctcggagctcaagcaggcgctcgccacgatcctgttcgtcgacatcgttcgatccaccgagaaagccgcacggctcggcgattcgcgctgggcgacggtgatgaaccactattatgccgccgtccgcagggagctgaaggccctgcgcggcaaggaagtcgtgacgaccggggacggcgtgctggcgacgttcggcaagccggcggccgggatccgctgcgcgaccgcgatccgcgaggccgtgcgcacgctggggcttgagatcaggattgggctgcacgcgggcgagtacaaggtgagcggcgcggaggtcatcggtctcgcgtttcacatcggcgcgcgcgtcgcggcgaaggcgcgtgccggcgaggtcctggtctcgagcgcggtcaaggacctgatgctgaagtccgaagtccgcttcaaggatcgcggcgcacatcagctcaagggcgtgccggagcgctggcgcctttaccgggtcgagccctgagccgtcctgcaagacggacgcctgatgctgcaatcaagcagcgcgtctagcctttgcgaactccgatgctctctcgaatccgctccagccagccgatgatggcgccgagcgcctgatcgcccttgccgagaagtcccgccagttcgcgctctgcagtgccccgtctcgtggcatcgggttcgggcaatggcggcaggatgtgggcgtagtaggtcttgtccagcagccggtgcagcaggcgttcgcccgggaacggttcgttgttgttcagcgctcgggcgcccttcagcagcgtgcggatatcatattgggtggggctgatgtccgggacccgcttgggaaggttgagaagcgtgtagaccgcgatccgcgctgtgcgcacggaactgtccatcgtgaagatgatgtcgttcgcggtttccacgaactgccccatcaagccgagattggtacagccggcgggaaccggatgcgggcggtcgccggcggcgcgcggcatgaacatcgcggtgatgtaaggcatcaaggcgagacgggccttggtgttcgccaccaccgcatcaagtttatcctcgatgccgaggtggtagcaaagctctgcgatgatctcgcggccggtgcaggccggcatcggcttcttgacgtagttgccctccttgtccatcagtaacgcgtagacccagacgaccaggacgtccttcggttgggtcgggaaatgcggctgccgattgcaggtgaagctaagcacccaattggaatcggtgaaggtgatgatgccgccggtgaccgtcttgccggaataggggtcattgacggaaagctccttcagccggtcgacgaagggggacggcctgcaggtgagcgtgaccgattcccacatcgacttgtcgacattgccgtagaatttctcgggcctgccgaagatcggtgatttcttcgcaaggttcgtccacagcgtccagtcgctcgcttcacccggatcatgcttgccgcgctgcaggaccggggcgtggtccatgtcgccgtaggcggtgccctcggtcatcgatcccgtgagcgcgaacaccaggtccttcggaccgatcgaaatggtgctatcggccccgttcaccttggccttgatcgcggtgaccgtgcgcgtcgcgccctcgaccttgatgtcgagatcgtatgcgcgcgtgtcgaactgcaccttgacgccgcgctcgcgcagatgcgtgaccagcggacggacgaagctgtcgaactggttgtacttcgggaagatcagcgccgacatgtcggtcagcccgtcgatcgcatcgaggaagcgatgcatgtagagcttcatttcgagcaggctctgccagttctcgaatgcaaacatcgatcgccacaggtaccagaaattggtttcgaggaagcccgggctgaaatactgctcgatggtgatgtcatcgaggtcttccttgcgcttcagcagcagccggatcagttcccattgctgcggcttcgacaggccgagcgtcgagaaatcgcggatctggccgcgcttgtgcatcagccgcgccttcgagaagttcggatcgttgtcgttgacgagccggtactcgtcgagaacgctgtagcccttgggcagttcgagcgcctgaacgtcctggaacatgtcccagagattgtcgtagttccagttcatctcgcggccgccgcggatgatgtagcccttctcgggatcgccggcgccgtcgagcgagccgccctcgatgtgcatggagtcgaggatggtgatgtcgtcgcccttcatgccgccgtcgcggatcatgtagaaggccgcagccaacccggcgatgccgctgccgataatccaggccttgcggggctcggccgttccgctcagcaccggacggttgcgcatataggcgcccatcatgtcgggcggaggcagggtatcgtgcttgctcttgtgccagtaacgcgccgtcgcgtccgcctcgacttcgaagctgctgcgggagggattgggagcatcggtcatggcggcctcgctgcatcgcgttcaggtgagcctgaccgtagcgagccgacctgtcaatttcgtggccgtcgggcggtattcacggaagctgcaaccagaacgcgatgcgccgtctctgcaatctatcatcgccagaacgggccgcgttcctgtcgcggcctaccgcgcgccgaggatgcgctgccacagcgtgccaccgacgaccttccagccgagatagaaatacgcagcgatcagtgcgaacagcagcagcgccggagcgccggtgaggctgaaaccgtccttggtggtctggccagtggcggcgccgatggcgtagccgccgccgaagaacacggtgatgaaatcgagcaagccggcaaggccgcggcgccagaacggttttgcgagcggcggtggctgatcgttcgacatcgcaaggctccgcagccaaccacgtgataatgaccgacgccgccggtcaggtgaaggcgacctcgatccggttgtcggcctttccggtgatccggcacgcgtgcgacagcgcatcggcggcgatcgcgagcttgaactgttcggggatgccggaagtcgacagcacctcgatcgttgcggtgtcgcgcgacaggccgcgcaccgtgcagtcgatcgtggaatgcccggcattgaagctgatcgtgccggccttgaacacgcgccgcgcggtcggcgcaatcgacggcgcacggtcgacccaggccagcgcctggttgcggccggcctgcttggcgccgtacatcgcaaggtcggcattgcgcagcatgtcgtcgaagccattgccgggcgagagcgcggcaccgccgaggctgcaggtgacgccgatggtgccggccggcgtctcgatccgcgtcgccgcgacggccgcacgcaccttctcgagcacgcccatggcgttgtcgagcctggtgtgcggcaacaggatgccgaattcctcgccgccgagccggccgatcacgtcggagccgcgcagcgcgccacgtgcggcctccgccaccgcggccagcaccacgtcgccgaccgcgtgcccgtaggtatcgttgacccgtttgaaatgatcgacatcgagcaccgcgcaggcgagcggactgagatgccgcgccgccagcgcggtcagccgttcgccttcaccgcggaaggcgcgccgcgatgagcagccggtgagggcgtcctgcatggacaggttccgcaacatcagttcgtcgacggcgacggcggcaagatcggacagcatgctgatcgcatcggcatcgaaatcgcgcgggcgcgtgtccatcgcgcacaatgttccgatcaccgcgcctgacatcttgagctgcgcgccggcatagaaacggatgtgcggcttgccgtgcacgaagatattgtcggcaaggcgcggctcacgcagcgtgtccggaatgacgaggggatggtcctgcgcaatcgccaggttgcagagcgcgggcccgcgcgcggtctcgcggtcctccatgccgtcggaggccttgaaccactgccgatggccgtcgatcagcgtcagcgtcgacatcggcacgcgaaagatctttcggcacagcccggtcagtcggtcaaaggcaagctcgcgcggcgtgtcgaggatgtcgagttcggccagcacatcgaggcgctgcgtctcacgatcatgcgtggtgtgcatcggggtacctccggcggcggcaccctcgccgaaagccgttaatgctgcgttgacgcggttcacggcgtttgcccgcggcggtttcatcgcgatcaagcggcggcgaagcagaacacatcatgcgcaactttgccgcgagcgacaaccggatcggcttcgtgctggcgttcgcgctctatctgcttttcatcaaggccggactgcacggcatgctgacgtgccgcgacgtccggctccacggtcggggttgggaaccgtgaacgacctgctcctttgtctggtccaagcattggtcgaaacgatcttcacaaagaccggtcgcgggctgtggggcctcgtgggcttgttcgcctacgtcaggatgcacggcgaaggcccaaggttcggctgccggcgccggtgctggctgacgcactcttgccaaactggttagccccgattaaccagcctttcgcatcaaccttgccgtttaagactgtcgcaatcggcaataattattgagtatcttgcggccggcgattcccgttaagggaccgtgtcgccgcttcggcaaattttcggcgatttttggggacattgaaccgcatgtgcggcatcgtcggcattcttggacgcgctccggtcgcggagcaattggtggattcgctgaagcggctcgaatatcgcggctatgattccgcgggggtcgcgacgctggagaacggcgtcctggcgcggcggcgcgccgagggcaagctgaagaatctggagacccggctcgaagcgaagccgctcggcggccacaccggcatcggccacacccgctgggcgacccacggcaggccgaccgagaacaacgcgcatccgcacgccaccgaacgcgtcgccgtcgtgcataacggcatcatcgagaatttccgcgagctgcgcgaggaacttgaagccaggggcgcggtgttcgccaccgagaccgacaccgaggtcgtggtgcatctggtcgacaatctgctcaagggcggcgtcgcgccggtcgaggcggtgagggcggcgctgtcgcagctgcgcggcgctttcgcgctcggcttcatcttcgccggcgaggacgatctgatgatcggcgcccgcaacggcccgccgctcgcggtcggccacggcgagggcgaaatgtatctcggctcggatgcgatcgcgctcgggccgttcaccgatacgatcagctatctcgaggacggcgactgggtggtgctgaaccgcaagggcgcgacgatcttcgacaaggacaacgccatcgtgcatcgcgaggcgatcaagcacaccacggcgacggcgctggtcgacaaggcgaactatcgccacttcatggcgaaggagatccacgagcagcccgaagtggtcgggcatacgctcgcgcgttacgtcgatatggcgaccgagcgcgtcaccatgccggtcaagctgccgttcgacttcaaggacatccagcgcgtctcgatcaccgcctgcggcaccgcgagctatgccggcttcgtcgcgaaatactggctggagcggttggcgcggctgccggtcgagctcgatgtcgcctccgaattccgctaccgcgaggcgccgctgcgcaagggcgatctcgcgatcttcatctcgcagtccggcgagaccgccgacacgctggcggcgctgcgctacgccaaggcgcagggcacgcacacgctctcggtcgtcaacgtgccgacctcgacgattgctcgcgagagcgagaccgtgttgcagacactggcaggtcccgagatcggcgtcgcctcgaccaaggcgttcacctgccagctgatggtgctggcctcgctcgcggtcgccgccggcaaggcgcgcggcgagctgtccgaggccgacgagagcaagctggtgcacggcctcgtcgaaattccgcgcctgatgtcggaggcgctcacgtcagagccgcagatcgagaagctggcgcgcgaaatctcgaagtcgcgcgacgtgctctatctcggccgcggcaccagctatccgctggcgctggaaggcgcgctgaagctgaaggagatctcctacatccatgccgagggctatgccgccggcgagctcaagcacggcccgatcgcgctgatcgacgagcacatgccggtggtggtgatcgcgccctacgacaaggtgttcgagaagaccgtctccaacatgcaggaggtcgccgcccgcggcggcaagatcatcctgatgaccgacgccaagggcgccgccgaggcgaccatccagtctctggtcacgatcgtgatgccggacatgggcgcgacctttgcgccgatggtctatgcggtgccggtgcagctgctcgcctatcatactgccgtcgtgatgggcaccgacgtcgatcagccccggaatctggccaaatcggtcacggtcgaatagtcgcaagccgggccgtcacgcggccccttcaaaaatgcgtcagaatggcttagctgggtgctggacaacggccgcttcgacgccgcttcgacgaccttggaaccgcaatgacttccaaccaagtgcctcctgtcgctggtgatttgccgccggacgcgccgcgcgggctgatggcgcgtttccgcaactatttcctgaccggcctcgtggtggccgggccagttgcgatcaccctgtacctgacctggtggttcgtgaactgggtcgacaatctggtccgcccgttcgtacccacggcctaccggccggagacctatctgccgttcgggctgcccggttccggcctgatcgtcgcggtcatcgcgctgacgctgcttggctttctcaccgccaacctgatcgggcgaacgctggtcgatctcggcgagcggctgcttgggcggattcctgcggtgcgtgcgatctaccgcggcctgaagcaggtgttcgagacgctgttctccggcaacggctcgagcttccgccgcgtcggcctggtcgaatttccttcgcccgggatgtggtcgatcgtgctgatctcgcaggcgccgaacgccgagctcgccgccagcttccccggacaggaggagcacatctcggtgttcctgccgtgtgcgccgaacccgaccactggcttcttcttctacgtgccgaagagcaaggtcatcgagatcgagatgagcaccgaggatgccgcgaccttgatcatgtcggccggcgtggtgcagcccggcaccaacgatcagaagcgcgccgcggcgctcgccggcatggccaatgccgcgcggatcgccaatcaggcgtcgttgcagccggcggcgccggccaaggtcgagggctgatgcgctccggcgagacgccgtccggtgagggcgcgcgactgctgtcgcccgaccaggccaagcgcgagctcgagcaaggcggcatcacgctgatcgatgtcggcgagccctggcagttgcgcgagcgcggcaccatcgcgggcgcgcgcaatatcagccacgaggagatcgctggcatcgctgcgtccgatcccgcactcggcgatcgcgagcagccgatcatcctgacctgcggcggcggcggcaaggccaagcgcgccgctcaggcgctgcacgacatcggatttgcgcatgtcgccgtgatccaaggcggctgccgcggctggcaggctgcgggacatgagctggtgccggtttcatcgaccgagggtgatcggcgctgattgacgcgttgctgtttcacgcaagatgctggctgaacaggtcaaccacgctctcgggggcgcggtcgccgaagaactcctccaggttcgcagcggtctgttccgccacatcagcgcttcgcgggaatagctcgctttcatagcgggccagcgcgccttcgacgtcatcgggagtggcaacaagcgcccgggcgagttccgcgccatcgagcatcgcaaggtttgcgccttcgccggcgaacggcgacatcagatgcgcggcatcgccgagcagcgttgcgccgggcacacgccgccatcgatgtccgaccggcagcgcatggatccggcgcagcaccggatcggtttcaccgtcggtgatcagggcggtaagttgcggggcccagccgcgaaattgttcggcaagatgcgccaggccagctttggggtcgctgaagtcgatcgagttgatccaatcctccggctccttcagggccgcataagtatgcagcgtgccatcggcatagcgatgcgccagaatacccttgccgggagcaacggccatcagcgtgccgctgccgatcgcatccgcgcttgccttgtggcgcgtgtcgccgtcgaacagcgaggtctcgatgaacgagacgccggtgtacgcaggtctcgactccgacagcagcggacggaccttcgaccatgcaccgtcggcgccgacgagcacgtccgatgtcaccgtcgcgccatgggcaaaggtgatgtcgtgccgtccgtcaccgcgcgcagcgatcgacgtgaccttgtgtccccatcgaatcgcattcggagggatcgaatcgatcagtatgcgccgaagatcgccgcggtcgacctcggggcgcgtgccggtgcggctgccgggctggtcgaacaggacatggccgtctttgtcgacgatgcgcttggcatcttcaccgggacggacgagctccaggaacgcgtcaaacagccctgcggccctgagcgcgagctgtccgttatgttcgtgaatatcgagcaggccgccttgcgtcctttggctcgccgaaatctcggcttcatagatcgttgcggcgaagccgtggagatgcagaacacgcgcgagcgtgagaccgccgaggccggcgccaatgatcgtaaccggatttcgcatggtagcgctcctgtggtcgcaaacatgcagcgcgcggcggcgctgatggctgcgatggcctgataggtgtcaggcgattgctttcggagacgctggccgaaccacgtgagtgcgtggctgacgtgtacgcgacggcctgccgggcttgccggttcaggcggtcgtttttcgcggcggcggaggggtataccccttgatcggcaaaagcaaggccgcgcctgccgttggcagctaccccgcgccgatcagcggcacggcctcgtcgcgttcgtagaggtagagcaggcagcgcagcgcttcgccgcgctcgcccttgagcttcggattgtccttcatgatccgcaacgcctcgtcgcgggcctgggtgatgagctggccgtgcacctcggagcgcgcgatgcggtagccgggcaggccgctctggcggacgccgagcacgtcgccttcgccgcgcagcttgagatcctcctcggcgatccggaagccgtccgtggtctcgcggatcaccttgagccgcgccttcgacatctcgccgagcggctccttgtagagcagcaggcaggtcgaagcctccgagccgcggccgatgcggccgcgcaattgatgcaattgcgcgaggccgaagcgttcggcgttctcgatcaccatgatggtcgccgccggcacgtcgacaccgacctcgaccaccgtcgtcgcgaccaggaggccgatctcgtgtgcggcgaactgcgccatcacacggtctttctcggcacccttcatctgcccgtgcaccaggccgacgcgatcgccgaaccgctgctgcaggctctcgaaacgttcggtcgcgttggtgaggtgctcggtgccctcggcctcggattcgtcgaccagcgggcagatccagtagacgagttttcccgcgccaagcgcgcggccgacgccgtccatgacgtcctcgatccggctcatcggcactgcgcgggtgtcgatcggctggcgtcccgccggcttttcgcgcagctcggagacgtccatgtcgccgaaatatgtcagcaccagcgtgcgcgggatcggtgtcgcgctcagcaccagcacgtcgacggcctcgcccttggaggtcagcgcgagccgttcgcgcacgccgaaacgatgctgctcgtcgaccacggcgagcgccagcgccttgtagatcacatcgtcctggatcagcgcatgggtgccgaccagcagatcgatttcgccggcctccagccgcgccaggagctcgcggcgctccttacccttttcgcggccggtgaggatcgcaacccgcatgccggcgcgctcggcgagcggcgcgatggtcttgatgtgctggcgcgccaggatttcggtcggcgccatcagcgccgcctgcttgccggcctcggtgacggcggcggccgcgagcagcgccaccacggtcttgccggaaccgacatcgccctgcacgaggcgcagcatccgcaccggctggcgcagatcctccgtgatcgccgcgaccgcctcgcgctgcgacctggtcagcgcatagggcagggcgtcgatgatcctgttgcgcagatggcggtcgcccgcattgcgcacgccggcggggcggcgcagcgtggcgcggatcaacgccagcgcgagctggcccgccagcagttcgtcgaacgcgagccgcgaccagaacggtccatcgggcaggatgtcggtcagctcgaccgggacatggacgcgggtcagcgcctcccggatcggcgggaagttgcaacggcgcagcacctcggggctgatccactccggcaaatccggcagcttggtcagcgcctgcgcgatggcgcggcggagcgagccgatcgccagcccctcggtcagcggatagaccggatcgatgccggagagctttgcaaagccggcttcgtcgacgacgcgatcgggatgcacgatctgcgggatgccgtcatacatcgccagcgtgccggagacgtagcgcttctcgcccatcggcagcagcttctcgacatagccgggctgggcgcggaagaaggtcagcaccacgtcgccggtgtcgtcgctggcatagacgaggtaaggtgcgcgcgaattgcgtggcggtggcgggcgatggcgatcgacggtgacctccagcgtcaccatggttccgaccacagcatcccggatcttcggccgggcgcggcggtcgatcacgctcgccggcaggtgcagcaggaggtcgaccagccgcggcgtctcgctccggtcgagcaaatagcgcagcagtctgtcctgcttcgggccgacgcccgaaagcgtcgtgacctgggcaaacagcggattgagcaaagcggggcgcatcgcagccctttacacacgactcacgtcatgcgcgcaaggaaaccccaaaaggcggcgaatgagggctgacatcggccgccgctgtcgctatatcaagcgcgcccggcacgtccgggcttttcgcgttgaacggattttgggacatgacgggatcgacacgatcgagccaggggctcgatgaccgccgcaagcggcttctgtttcgctgctggcaccgcggcacccgggagatggacctgatcctcggccggttcgcagacgcgaccattggcgagctgtccgatcaggagatcggtgagctcgagcacctgatcgaggttccggatcccgatctctatgccgcgctgaccggtgacaaggtgctgccttcggaatatgcgaccgcgctgtttgcccgcatcaaggcgttccgggttgcggaccccagcgcatgaagcagccgatgaaatcgccggccgcgatgctcgcacccggccgggtgctgaccatcgccaacgtcgccgagggcgccgaggggctcgtcatctccgatctggcgcgcgccatcgccgcgcagccgaagcggccggcggtcagcctcgcggtggtgtgccgcgacggcgcacggatgcagcagcttgcccgcgcgctggagttcttcgcccccgatatcgcggtcatgcagatcccggcctgggactgccagccctatgaccgcgtctcgccgcattccggtatcctggcgcagcggctgaccgcgctggcgaaactgtcgcggctgacgggctccgacaagccgctgatcgtgctgaccacggtgaacgccgccgtgcagcgggtgccggcgcgcgatcaggtcgcggcgcaggcgctgtcggtcgtccccggcaacgtcgtgccgatggactcggtcgtcgcctggctggagcacaatggctacacccgctcgtccacggtgcgtgaacccggcgaatacgccgtgcgcggcggcatcctcgatctgtttccggccggcctcgaccagccggtgcggttcgacttcttcggcgatagcctggaatcgatccgcaccttcgatgccgagacccagcgcacacacctggacatgcgcgggctcgacctggtgccggtctcggaattccagctcaccaccgagaccatccgccgcttccgcatgggctatgtcgcggcgttcggcgcgccggagcgcgacgaccagctctatgaagcggtctccgaggggcggcgccatcccggcatggagcattggctgccgctgttccaggagcggatggacacgctgttcgattatctcgacggcgcaaccattgcgatcgagccgcagggcgaggacgccgcgcgcgagcgcttcacccaggttgccgactactatgacgcacggcgcgaagcgctggagcatccgggcagcggcgcgatctacaagccgctgccgccggacaagctctatctgaccgaggccgaatggaccaagctgctcggcgacgcgccgctggcgcggctgacgccgttcgcggtgcccgaaggcacggcagacgtgttcgacgccggcgcgcggcagggccgcaatttcgcgcccgagcgcgccgacggcaatgtcaacgtgttcgaggcggtggtcggccacatcggcgcgctgcaatcgcagcgcaagaaagtgatcgtcgcgctgtggagcgaaggctcgcgcgaccgcatgggcgcgatgctgcgcgaccacaagctgctcaacaccaccagcgtcaacacctggcgcatcgtgcaggcgacgccgcgcaacgagaccatgctggccgtgctcggcatggagtccggcttcgagaccgacgagttcgccgtcatcagcgagcaggatattctcggcgaccgcttggtgcggccacgcaaggcgagccgcaagctcgacaatttcatctcggaggtgacgagcctcgcgaccggcgatctggtggttcacgtcgagcacggcatcggccgcttcgtcggtctccagacgctcgaagtgtccggcgcgccgcatgactgcctcgaactgcactacgcggcggagaccaagctgttcctgccggtcgagaacatcgagctgctgtcgcgctacggctccgacagcgccaatgtcgagctcgaccgtctcgggggcggcggctggcaggcgcgcaaggccaagctcaagaaccgcatccgcgagatcgcgggcgaattgatcaagatcgcggcggagcggcagctgcacgaggcgccgaaattcccgctgcagccgcacgtctatgacgagttctgcgcacgcttcccctatgatgaaaccgaggaccagctgggggccatcaactcgaccctgaaggacctcgaaatcggccgcccgatggaccgcctgatctgcggcgacgtcggcttcggcaagaccgaggtggcgctgcgcgcggccttcgccgtcgcactcgaaggcaagcaggtcgcggtcgtggtgccgaccacgctgctggcgcgccagcattcgcgcaccttcaccgagcgcttcaagggcttcccggtcaatgtcgcgcaggcctcgcggttggtgtcgaccaaggatttgaaccagaccaagaagggactcgctgacggcagcgtcgacatcgtcgtcggcacccatgcgctgctcggcaaggccatcaagttcaaggacctcggcctcttgatcgtcgacgaggagcagcatttcggcgtcagccacaaggagcggctgaagcagctgcgcgcccaggtccacgtcctgacgctgtcggcgaccccgatcccgcgcacgctgcaactggcgctgaccggggtccgtgagctctcgatcatcgcatcgccgccggtcgatcgcctcgcggtgcgcaccttcgtcgcgccccacgaccccctgatgatccgcgaggcgctgctgcgcgagcgctatcgcggcggccaggccttctacgtcgtgccacggatcgaggacctcgccggcgtcaaggatttcctcgacaagaacgtgccggagatgaaggttgccgtcgcgcacggccagatgccgccgaccgtgatcgaagacatcatgtccgcgttctacgacggcaaatacgatatcctgctgtcgaccacgatcgtcgaatccggtctcgacatcccgaatgccaacacgctgatcgtgcaccgcgccgacatgttcggcctcgcccagctctatcagctgcgcggccgcgtcggtcgctccaagctgcgcgcctacgcgttgttcacgctgccggcgcagcagaagatcacggcgcaggcggagcggcggctcaaggtgctgcagtcgctggagacgctgggcgcgggcttccagcttgcctcgcacgacctcgacatccgcggcgccggcaatctgctcggcgaggagcagtccggccacatcaaggaagtcggcttcgagctgtaccagtcgatgctggaggaggcgatcgtcaacctcaaggccggcgtcgtcgagcctgccgccgatcgctggtcgccgcagatcacgattggcatgccggtcttgattccagaagactacgtcaacgatctcagcgtgcggctgtcgctctatcgtcggctcgccgatctcgacaccgacgaggacatcgacgcctttgccgccgagatgcgcgatcgcttcggcgtgctgcccgacgaagtccgctatctgttcaaggtcgccgcgatcaaggcctattgccgccgcgccaatgtcggcaaggtcgatgcaggcccgaagggcgccgtgatcgcattccgcgacaacagctttgcgcatccggagcggctggtgacgttcatccgtcagcacggccgggccgccaaggtgcggccggacatgaaggtcgtgttcttccaggaatgggacacgccggaagagcggctcgcgggcaccacggagatcctgcgccagctcgccaatctcgccgagagcaagaaggcggcgtgaggttcagcctccccgaagcggaggctcggctcagagagcgggagtgcgctggctcggatcgcgcgaacgcaatcaaatgcgcctctccgttcgcgatggtgatcgccacgttcgttgtcacggcagagcagatttcgcccaaagcaagctcgatcggctcatcgttgcacggcgattcaggagcagccccgaggaggtactaaggtttggttcgttgacgaggttgttaatctcgcctacctttttgttcactttttgagcagttctttttatttcagggcaggggtttttttgtgaatgcgattaccgtcgcgtcggcgatcgccgtgaaacgcccggcgaaccatttagcgggacaacctaaggtaatcgttgatcgttcgaccgacgccacgccggtcgagtcggaggctgtttggtcgaatgccgacaccccgaagcctgcctatcctgcgaccgccaaactgcccacccaggtcggtccgaaaggattgcggtccgacttcatagacaaggatttcctgtggtgttcgcggcatgcggattcaccgcgacattttgaatgcgcgcggctgattacggccgatcacatagcgcaagtttttcagcgcataccgggatttccggtcggcgccaatatgtagcgcgtaaagggcgtcgacgccgacgggcatcgatgctccgaaaacgggcaaatgaattttattctggcctggaggcggagccatgcagacgatttccagcggcgtgaccgtaactgtatcttccggtactgaatccggcgataccgtcctgactggcggcacgctgatcgttgtgtccggcggcagcgctactggaacgactttgtccggtggcaacgaagtgatttcgagcggtagtgtcgacagcggcgccacgatcctgtccggcggcagcctgaatatctcgagcggcggtggcagcgtctcggccacggtggatgcaggcggcatgctcaacgtctcctcgggcggtgtggcgtcgtccattgccgtgtcgtcgggcggcacgctgaacgttgccggaacggtgacaagccaggttacggtctatgcgagcggcctggttgtgatctcttccggcggcatcgagacgggcgctccgggcagcaacgagacgatcgtgtcgggtggtacggtcagcgtgaccgcgggcggccagttgtcctacttcacggtcaggagcggcggccttgtcacggccgactttggcgcgacgatccacgacttcggcgtcagcaatggcggcatcctcaatctcgctggcgctcagaccagcaattcggaggtcttctccggcggcacggagaatatttcttcgggtggcaatgcgcagaacttcgatgtgtcggggggcacgctgaacgtgctttctggcggcaacgcgcagtcctttacggtgtcgggaggctcgctcaatgtcctctccggaggcacggccgagttcttcacgttgtcgtccggagccgcggccggcgtcgcagctggcgccaccgttcatgatcttactgtatcgaacggggcaacgctcagccttctgggtacggtgacgagctccgtattcattgcgggcggcgccacattgaacgtctctgccggcggtgccatcaacggatcattggattcgtccggcttcccaacggtcaacgtcgtcggcacagtgaacgtgtccgcaggagccaccgtcagcgaccttgctgtcgacggcagcggcgcgctgaacttgctggccggcgcgtccgcgcacgacatcaatgtgaattccggcggccaattcaatctcgcgggaagcacgacgagtaacatcaacatccgccagggcggcctggaaaccgtttcgtccggaggtgccgcgaacggcgccactgtcttcggcggcggtgagctcgacgtccttttcggcgggtcggcaaacgccacgatggtcaacggtggtctgctgaagctgttctcaggtgggtccctgagtggcgtttcggtcaccaatttcggcgccgtagaactggtcagcggagcgtccgtttcgcagctttccaacaccactttcggtagcggcaccaacctcgaggtggggcctggcgccgtcctgagcggctattcggtgggtgttggcccgatcctcgacgttttgtcgggcggcttaacctccgccaccaccgtcaccacgagtggcaccgagagcgtgttcgcgggcggcacggccctgggcagcatcgttggcgatggcggcttcatgcaggtcggcgttccgtcgtcgagccagggactgggtggttcggcgggcggaaccgtcagcaacacgtccgtgtcgggcggtcagctcagtgtgaattccggtggcctcgcagtgtccaccaccatcgtcaacaacggcggcgcgcaagtcacctcgggcggtacagtctccgggacaacgatctccaactccggcggcatgacggtgctgagcggcggcacggcggccgatacggcggtgctgagcggcggctacttccagctcggcgtaggaccgatcagcggtagtcccggttcagccggtggcagcgcgacgggcacgatcctgtccggcggattcgaggccgtctttagtggtggtgtcgattccggcgccacgattctgttgcatggcaaccaggtagtttccgccggtggcttcagcattggcgccgcggtttcaagcggaggtgttgaaaatgtttcgtctggcggccagacgttcaacaccacggccttcggcggcggcgtcctgaacgtttccgccggcgcgacggcacacgacgtcacgctatcgggtggcacgctcaaccttggcggcaagatcaccagcaatgttgttattctaggtggcggccacgaaatcgtctctgcaggtggttccgtcaccggcgtcgccggttcgggcaccgtaatttccgggctggtcgacgttctctctggcgcgtctttcgaatatgcgaccgtcttcaatggcggtgacctgaatgtctcgtccggtgcgacggtagaccatatctccgtctcgagcggcggcatcttcaacgtcggcggcacggttttgagcaatgtcgcggtgtttgccggcggcgtcgaaaacgtactctccggaggggtggtcaccggcgtgaccggttccggaaccggaatttcgggcggcacggtgaacgtgtcgtcgggaggcgcgctcgatcacgcgaccgtcagcggtggcggcgtgctgaacgttgcgtctggagctacggcgcacaacatcgcggtgtcgagcggtggcgcgctcaacgttgccggcgcggtgacgagcaacgtcgcggtctttgccggaggcaatgagatcgtgtcctctggcggctccacggggccggtcacgatctccggcggcacggtcgaattgcagaccggcagcgtcgcgagcggcggcatcaccttcagcggttccggcggtcaactgaagatcgacggcacctccctggccggcaccaccatcagcagtctggtgctgggcgacagcatcgatctgacaggcctcaatttcgtatcgggcggctcggcgaccttgggggccggcaacatcctgcatgtcaccgagggggcaacttccttcgatctgcagcttgatgcgcttcccggcgtgcggttcagcgtcagcgcggattctggcaccggaacgctggtcacgacacgtgccgatgtcgcaccggtcacgtcagcgtccaacatccatgcaggctctggccagacctctgtgctggcgtccagcctcttctccgtgacggacgcagatggcgatgccatcacccaatatgcgttcttggacacacaaggtcacggccactgggtcatcaacggcgtcgtccaggccaccaatgccgagatcgatgttgcggcggccaacctgtcgcaggtgagctacgtgtttggtccgagcggcacgaccgacaccctttccgtgcgggccaatgacggcacgctttggggcggctggactcaatttacggctaaggcatctggcgacagcgcgccaaccgtgagcgcagtcaacgtgacggcgacccatggcgagacgtcgacgctggccacgagcctgttcaccgcctcggattcggacggcgacaccatcacccaatacggg

SEQ ID NO: 6 - DNA, 231778 bp, Bradyrhizobium enterica
ccgcagggtcgagttgtcgacgcaagctgtggccacagcgttgcaagccaacttgcactcgtggttatgggtctcgggtcgcgcttcgcttgcccgggacgacgcggcggtcgattccgcttcacatcgcaagcagcgatgagaatgggcgaccgcatcctcgcgacgtagatcgcgcgatcagccgcgcggccatcccgtcggcacgacccagaccagcccgcgccaaggcgcgccgcgcgccgacagtgtcgtgaaatcacgcgcgggatcgcggacgagatcgagccgcgccatgacggcctgcgagcgcgcgttgtctgcgctggtgtaggacacgatcccgcgcaggccgacgtcatcgatggcatgcaataacgccgccctggcgctctcggtcgcatagccatgcccccaggcgttgcgcgcaaaacgccagccgatctcgacatgcgcgccaagcgggtgctcccgcgacgatcgcggcatcacgccagcatagccgaggaatgcaccatcgatggtctcgaccgcccatcgcgagatgccgtggtcacgctgcgcggcaacgtatcgctcgaatttctcgtcgctatccgcacgaccgatcggtccgccatagtcggccatgacctcgggatcggcatgcatcgccgcgaacgcctcgcgatggcggtcgtcccatctgtgaagtcgaaggcgcggcgttttgatcatgcgcatgccctcgcctgttccggtcacatcagcttcagcggcgcatcgtgaaccagccgcaggtcgatattgccgatcagccgcgcccggcgcgcctcggcggtgctgatggcggcctcggtctgccgcaaggtgctgacgttcgatccgagcgacacgatgccgccgagcaccagcgcaatcgacccgagcgccgcggtctcacccgaaccgaacaagccaagcagtgcggcaagcagcaatgcgaacccgcccgcgattgccaccttcgacccaagaatgatccgccgggaccgttcggcgctctcggccagatcctcgatctgcgcctcgatctcggaaatctggtcggtcggcgcgtcgtcggccatcgaattcgaacctgtaggcgggtcaggtggaagcacgcaacccaccgcggatcgcgcggaacgaagttggtgggtctcgcttgcgctaacccaccctacgcttccctcacaacggcagattgtcgtgcttcttcgccgggatctcgaccttcttgtccttcaacatcgcaagcgcgcgcgcgatccgccgcctcgtcgaatgcggcatgatgacgtcgtcgatgtagccgcgctcggcggcgatgaagggggacaggaagcggtcctcgtattccttggttcgcgccgcgatcttgtcggggtcgccgatgtcggagcggaagatgatctccaccgcgcccttggcgcccatcacggcgatctgggcggtcggccaggcatagttcatgtcggcgccgatctccttcgaggccatgacgtcgaaggcgccgccataggccttgcgggtgatgatggtgacgagcggaaccgtgcactgcgaataggcgaacagcagtttggcgccgtgcttgatcaggccgccatattcctgcgcggtacccggcaggaagcccggcacgtcgacgaaggtgacgatcgggatgttgaaggcatcgcagaaccgcacgaagcgcgcggccttgcgcgaggcatcgctgtcgagcacacccgccagcaccatcggctggttggcgacgaagccgacggtacggccagcaatgcggccgaagccggtgacgatgttccgggcgaaggtttccgagatctcgaagaagtcgccctcgtcgacgaccttgaggatcagctccttcatgtcgtagggcttgttcggattgtcggggatcagcgtatcgagcgacatgtcgacccggccgatgtcgtcgaagctcggccattccggcacgccgtcggtgttgttcgacggcaggaagtcgatcagccggcgcatctgcaacagcgcatcgacgtcgttctcgaaggcgccgtcggcgatcgaggagcgcgtcgcatgcaccgaggcaccgccgagctcctccgccgtgaccacctcgttggtgacggtcttcaccacgtcggggccggtaacgaacatgtagctggtgttcttcaccatgaagatgaagtcggtcatcgcgggcgaatagacatcgccaccggcgcaggggcccatgatgacggagatctgcgggatcacgcccgaggcctgcacgttgcggcggaacacgtaggaatagcccgccaaggcagctacgccctcctggatgcgcgcgccgccggcgtcatagaggccgatgatcggcgccctcgccttcatcgccatgtcctgcagcttcgtgatcttcagcgcgtgggtctcggacagcgagccgccgaacacagtaaagtccttggcgaagacaaaggtcttgcggccgttgaccgtgccccagccggtgacgacgccgtcgccgggaaccttggtcttttccatcccgaactcgatcgagcggtgctcgacgaacatgtcgaattcctcgaacgagcctttgtccagcaaaagctcgatccgctcgcgggcggtcaatttcccgcgggcgtgctgcgcctcgatgcgcttttcgccgccgcccaatttcgcgccggcgcgccgctcttcgagggtgtcgaggatatctttcatttgtttccgcccgtgttagctacagtccgcgccccggccgaggccgggacgcttcgttcggaatggctttagcacggccatttcggaaccggaaaggcgcttgtgaacgggttcgggcgccaaaacggtaggattttccgacatctggggagacggcaatgaccgacatgacgactgaagcgactggcgccgcgaccggcggggtgcgcaccctgctccggctggaggggctggtgctgttcgtcgggatgaccgtgctctactacaagtgggagggttcctggctggtctatgccctgctgttcctggtgccggacttaagctttgccgcctacctgatcggcccgcggatcggcgccatcgcctacaacgccgcccacacctatctggcgccggtggcgctgatgacactgggctttgccggtgaaggacccttggtgctctcgatcgcgatgatctggctcgcccatatcgggatcgatcgggcgctcggctatgggctgaaatatccggccggttttggcttcacccatctcgggcggatcggaaagctcagctgaactcgaccccgatccggcctttcctgcgccacaccacgcgacagcgccgctccatcgcttccatctccagcacgagacggaagctgtccgggacttcggcgggattgctcacctcaatagcggcgcccgtcgtggagaggttgcggacgatgcaggtcatgctgcgccgggcaaagctcagccgcgccgcgcgtgcgacgttgcgacgggacgcccggcgctggtcgccggcggcctcgctggtcgcgccggtcgagaaaccggaacggatcctgccctgcagccgcacgtccgcctgcatgtcgaaatgcttgacaatgcgaggcctgcttgcaaccgccgttaattgcagcgatgcgagcagatgctcgaccttcgcgccgccgctgccgaacggcagcagcagccgctcgcaatcgacctgctggtcgttggcatcgatggtggagaacaccatgtagaccgcgcagccgctcgcggcgcaatccttcgccggcgtcagcgtgatgcgccggagcgacatcgggaccacctgctccatggtcctcccggcccaggccgaattgaacgcctcggcgacattctcgccctgatacatcgcgcgaaacttgcgcagccggccctcgccttcgaccgcccatgcgacgagctgccggggatcatggaccgcaggatccggcttcagctcggcgagggcgggaaatggccggccggcggccagttgatcccactgcgccagcagtgcacgctggcttgccgaccggatcgcgtcaggcgcaatgaacctcatctgcccctctgatgtcgcgtcagcgcgcaaggtgggcagctcggcttaaggatcactgaaacctgatccgcaacaatgcgggaccgcgcggcggacgggatgaattagcacttggcatggttagcgcgcgctttacacttcggccaggtcacaggaggaaatgatgctcagctacggtcgcctggccgcatttggcgcggtgcttctcagcgcgctgctgttcgcctgcatcgagaccagcgcgcagcagatcccgaaggatatcgcggcgcgcaccgagatctacgccatcccctcgctgacgatctccgaccaccagttcctgaccggcgacagcaacggcaaaccggtcaccgtcggcggcgaattcaagatcgcgcagggaaccggccggctgccggtcgtggtgctgatgcacggctcgagcggggtcggcgccggcatggacggttgggtccgccacttcaacgcgatgggcatctcgactttcgtgatcgacggcttctccggccgcggcctgaccgcgaccgggccgaaccaggccctgctcggccggctcaatttcatcgtcgacatctatcattcgctggagatcctcgcgaagcacccgcgggtcgatcccgagcgcattgtgctgatgggattctcgcgcggcggccaggccacgctctatgcgagcctcgatcgcttcaacaagttctggaacaagtccggcgtgcagttcgcggcctatatcccgttctatccggattgctcgacgagctatctcgccgacaccgaggtcgcggcgcggccgatccggatcttccacggcacgcccgatgactacaacccggtcgcaagctgcaaggcctatgtcacgcgcctgcaagaggccaagcgtgacgtggtgctgaccgaatatcccgactccgcgcacggcttcgacgccggcctgatcggcaacaacacggtggtggaggcgacgggatcgcagaccgtgcgccgctgcacgatcaaggaagccgaaggcggcgtgctgatgaacgcatcgacgcaggcgccgttcagctacaaggatgtctgcgtcgagctcggtccgcatgtcggcggcaatccggccaccgcgctcgaggcccgcaaggcggtcagcgacttcctgcaggcgctattcaagctgggctaaagcgcgatgagatttggttgaatcgtcatcgcgcttggttcttgtcttagcatgatcttactcggaaaaccgcttcgcacttttccggatcatgctctcaagcgaagcgtcgcgcgaacaccacgcagaccacgaccagcatggtcgccgcgatcatcgaccaggcgaccggctcatgcagcaaaagcccggcgagcgcgagcccgaagaacggctgcaacagctgcaactggccgacgctggcgatgccgccgagcgcaagcccgcggtaccagaacacgaagccgaccagcatgctgaagatcgagacatagccgagcccgagccaggccggcgcgccgataccctgccagctcggcggcaacgtcatgatggtcatcagcagcgtcgccggcaccgagagcaccagcgcccaggagatcacctgccagccgcccagcctgcgcgacagcgccgcaccctcggcgtagccgagaccgcagatgacgatggccgcgaccatcaggaggtcgccggtcagcgaggccgatccgtcgttcgacaacgcaaacccggccaccgtcgcaccgccgatgcaggagaacagccagaacagcggcttcggccgctcgccgccgcgcagcacgccgaacaccgcggtcgacagcggcagcaagccgatgaacacgatcgaatgcgccgaggtgatgtgctggagcgccagcgcggtcagcaacggaaagccgatcacgacaccgagcgcgacaatggtcagcgacaccaggtcgcgccgttccggccagggctggcgcagcaccgcgagcagcacggcgccgagcagcgccgcgatcgcagcccgcgcagcggtcaggaacaatggcgagaacccggccaccgcaacgcgcgtcgccggcaacgagccgctgaaaatgatcacgccgagcaggccgctgccccagccctccagcgacgcgccgccggccgcctcgccggtccaggacttccccgacaatgtcttcgaatcgcgcatcgcgcacctagtctttcgcgagcgaggatagcggcggcgggctggccaaggcagctacggatcagtacaatatcgccaaactgtatgggtgaaggtaggcatacacttgcgacagccgtccaatgcgccgaaggcgacccgaaccaccgaggtgatgaacgcgattcgcgccaggatcgcgagccgcgcgctcgccgccgacgaccgcctgccctcgatccgcagctttgccgcgaccatgggcgtctcgccctcgaccgtggtcgaggcctatgaccggctcgccgccgagggcctgatccgggcgcgaccgggctccggcttctatgtctcgtcggcggcgctgccgcggctttcgctggcccaggaccagccgcagcgcgaccgcgccgtcgatccgttctgggtgtcgcggcaatcgctcgacgccgcgagcggcgcgctgaagccgggctgcggctggctgcccgccgactggatgccgaccgaggcgctgcggcgcgcgttccgcggcctggcgcgggccgaggacgccgtgctcgccgattacggcgcaacgcgcggctcactcgccctgcgccgcacgctgatggcgcggttcgccgacgagggtctcgacgcgtcgcccgaccaggtgctgctgacgatgtccggcacccaggcgatcgacctgatctgtcgcttcctgctgcggcccggcgacacggtgctggtcgacgatccctgctacttcaatttccgggcgctgctgcgagcccatcaggtcaagctcgtcagcgtgccctacaccccgtcggggcccgatgtcgcaagcttcgaggccgtgctcgaagccgagcggccgcggctctacatcaccgtatccgggctgcacaacccgacaggtgcgacgatgtcgccgcagaccgcgcaccgcgtgctgaatgccgccaccgcctgcgatctcaccatcgtcgaggacgacatcttcgccgatttcgagccggagccgtcggcgcggctcgcggcgctcgacgggctgaaccgcgtgatccggatcggcagcttctccaagacgctgtcggcgtcgctgcgctgcggcttcatcgcggcgcgcgccgactggatcgagcagctggtcgacctgcaggtcgcgaccgggttcggcggcccctgcgcggttgcgaccgaaatcatcgccagcgtgctcgcgaccggcttttaccgcaagcatgtcgaggagctgcgccggcggctcgcgcgcgcccgccgcgacgtcggcgagaagctgcagcgcatcggcatcgaaccctggctgatgccgcgcggcggcttccagctctggtgccgcctgcccgacggctgcgattccgcggacgtggcgcgcgccgcgctcgccgacaacatcgtgctggcgccgggcaacgtcttcagcaccacgcaatcggccagcggcttcatgcgcttcaacgtcgcgcaatgccgcgacccgaagctgatgccggcattgcagcgggcgctcgggcgctgaggcgcgagacggatcaatggcgtccacaacggcgctctactccctcgccccgttcttacggggcgaggtgaagtggggcagcgccctacttctcgccgaccttgaacggctcctccttgcccggcggcacggtctcctcggccatcgccagaatcatcgcgaccatcacgtaattgccggcgagtgcagtaagatcgacgatctgctgatcgttgaagattgtcttggcccgcgcataggtcgcgtcggagaccttcttggtcgtggtgagctcggtgacgaagtcgtacacgacggcctcgtcgtcggtcattttcgacggccggttgccggccttcaactcggcgatcacgtcggcagacagcccggccttggcggcgagcgacgcgtgcgcgaaccattcgacctgcgagcgccactgccggccgatgatcaggatcgcgaactcgttgagcctggtcggcaccgaggtctgccaacgcagataatagaacagatcgtagaggcgctggccgagcaccgggctgcggatgatcggattgtagggcccgccgatgccgacgctcgacactttcatgatccgctcgccgagcggccgctgctggtcgttgagctgatccatggtgagctgcgggaagcgcggctccttgctggtggcgggtgcggagagcaccgtggcggcgagccagccgccggctgcggccagcgtgagcgacgaaagccagacagttgccgaatgcatgatttcctccgctttggtttgtcggaggatgctagtcgagcttcgcggcgctcaccagccgcggcgcacgcaggtcagctcgtcacagcgcgacgatatcggtgaggcattgctgcgtgacgctcatccgcgcgtcgatctgcgcctgggtcttgcagtccatgttcatcgcgaacacggtgatctcattgcccttctcggaccagccgaccagccagccgagcgagccgtgctccttgtcggtgaggccggtcttggcgcggatgacggcgtcgccgactttcgtcaccgggagaatatcgcacaccagctgctggctgcgcttgccgaccggcagcacgccgcggcgcagccggtcgaggaaatcgatctgctgcaccggatcgatgcgcagattgcccgtcacccagaactggtcgatgccgccgccgatgtcgcgattgccgtagtcgatcgcgtcgagatatttcttcatccgctcctcgccgatccggcgggcgatctcctggaataccggaaaagccgagaccgcgatcgccgagcgcagcgtgtgatccttgttccaggcctcgatgctgcgggtgacgccgtcccacttgaagacgtccttgtccggatcttgcaccacgccggtgtcgagcgcgatcagcgcattcgggatcttgaaggtcgaggccggcagccggccctcgcccgagcgaaccttgtcgctggcgatgatcagatagtcgtcgatcttgtagccgacgaaggtgccctcggtaccgagatcgaagaaccgcttttgcagatcctcgcgaaactcgctgcgttggtaggacacatttgcaaaactgcgcgacggcaggatggcggcggcagcaaacagaccgagcgcatggcggcgatggatcacgacaggacctgaaccgtttcgggttgacgacgatggatgccatcgtggtgaaaggatggcaacagagtcttcggttgaaaacgctcagcgcgcccggcccgacatccgcagcacgaacaccagcacctccgcgacggccttgtagagctcggccgggatctcgtcgccgagctcgacattggagagcgcaccggccaagacctcgttctcctcgatcgggatgtcgttggccttggcgacctcgatgatcttggcgccgatcgcgcccttgccttttgccacgacgcgtggcgcgccggcatggtcgtagtgcagcgcgaccgcgagctggttctgcgtctcgctcatgatgcgcggtccaggaaatggccggcgcgcgcgggcgcaggttgcggcggactgccgtcgcggatctcgatgtcaccgggcgtgagctcggccctggtcagcgcctggctcagctcggcggccccggcgcgcagctgcgcggcggtcgaagaccgctcggcccacatccgcaccgaggtccgctcgccgctcagcgagaccagcgcgtgcaccgggccggccggctcgacgtcgagcgtgaagcgcgcccgccacacccgcttggcggcctcgacttcgttgccgccgccgtcccgcgaaatctcgaactgcgccatcgccgtgccctgctgggtcaggaacgggatctcgaaattccagcgcggcaccatggcgtcgagctgcgcgcgtgcagcatcgttgtggcccggcagcgaggcgacctgcagcagcgtctgccgcgccagcgccgcgtcggtgttttccagcaggcggtgtgccgtggttgcaagcggcgcacccggcgcgatcgtagcctcggcgacggcctgggccgacggcagcgccccggggaacggcggcggcgggctgccgcgcgcgggcacatcgccgggcagcatctcccgcggtgcggcgccctgccgtgcggggttgccgagctcatgcagcgcttcctgaatgagattgagcgcgccgcccgctgacggcccggcatcgagcgcatccgcgagcgcgccggcgagccgcgtggcgccacgcgtgagatcctcggtaaccggcacccgcgcctgcggcagcaggatctcctggacgtcgaggctgggcgtgcctgatggcacgaggctcggtgccgctccggcgctgggcaacgccggttgctgcagcggcgtggacgcgggccgcgcagcctcgccggcaccgagcgcggtcagcgcctggcgcagcacgatcagcgcggccttcaggtcgggcgcgctgccgctcgccggcgcgacacccgtcgccagcgttgcctccagcaacaggccggacttctggaagccggccttgacggcatcgccgctcaaattctcgtcgaggccggtctgctgcgccagcacctgcgcgatcgcagcctgcagccttggcggcagattcgcggaggccaccgcggtgaggttggcaaacagcggcgcctggctgccctgcaccgccgccgcatgctgggccgcagcagtgatggtgatgcgctccagcggcgtcagcgcagccttcggcgccgtggcggcgggttgcggcgcggcggtggcgttggccgcgcccggcgacagttgcaccgcatcgccggtgtccgcgcccgatccaaccagttgcaagcggatgccgccactgctctgcgacaccgcaagctgcaggttctggccctgctgcagcggcacctcggtctggacatcgatcgtcaggctcgcgatcgcgatccgcaccaggtcggcggacagcaccttcaggacctgggcattgacgacgctgccggcctcgagcgtgaggtccggcgcaacgctgtccgcctccttcgaggcgatcaccggcagcacgggattgacggcaagtgccatgtcggaggactctgccaggcggcgggaacgtgccgcaggctagcccggcgccgtaaaggtctcgttaacccgacctgaactccccgaggacggcggcgacggccttgaaatcgacctgccgggcggcacggcctcctcgtcgacgccccatttcccgatattccagtcctcgtcgacatgggccgcagcccggacctggtcattgtgacggacgtcatgcgtcagcgcgagcagcgctcggatcatccgttaactagctggtaccgaacccgttgcccgccccggaaatgcaatggtagcgttacgccatttcaggactgatttttatgatcaatttgaccgccacagattcgtggctcgcccgatcgtcgatggctattccaacgttcgccgtcagcctgtttctcagcgccggcctgatgtttttcgtcgagccgatgatcgccaagatggtgttgccaaagctcggcggcgcagcggcggtctggagcacctgcctggtcttcttccagactgtactgctcctcggctacggctacgcgcatctgctgacgagactatcgtcgcgagttgcccaggttgtcgttcacatctgcatcctgatgccgatgtcggccctgatgctcccgctgtcactcggttcggatggaccgtcagcggaacagtccccgatcctttggctcttgctgcgcctcaccttggcgtgcggcgtcccgctgttcgctatctcggcgacggcccctcttctgcagcattggttttccggcgccgaccacaagcgggcacgcgatccatacttcctgtacgccgtgagcaacactggcagtcttctggcgctgcttgcctatccgctcgtcgtcgagccggagctgccgctcgacctgcaggcgacactgtggtcagccggcttcgccgcgctggctctcggcatcgccgcgtgtggcacgatcatgttgtcccgcaagcgggcggacgcgccggacccgatcaccgaagcaaccgcgacgattggcccgcgagatcgcttgatatggatggcgctcgccttcatcccgtcatcgctgctgctcggcgtcacccaacatatcgcgacggacattgcgtctgcgccgctgctgtgggtgctgccgctaaccctgtatcttttgacattcattctcgccttcgcccgccgtcctcccctccctcatgcgatgatgtcgcgcgcaatgccggtgacgctgatcgtggtcgtggtgaccagcggcggcatcggcaacctgcttccccttacaatcgcactcgccctgcacctcgggtgcttttttgtcatcggcatggtctgccatggcgaactggcgaaacggcggccgccgacagcgcggcttaccgagttctatttcttcgtctcgttgagcggcgttgtcggtggaatcttcaacgcgctgattgctcctgtggtcttcaccagcgtgtgggaatatccactcgccttgatcgcggcatgcctggcgaggccccgcatgccagcggacgaccgttccaacctgatgatggatatcgtgctgccgctgctgctcgctgccgccctgctggccggtcgagcaatcctgatcgaaggtgcggttcccggcccgctatcgatggcgctgctttacatgctgtacctgctgccggcgctggtgctggtcaaattctcgcaacgacgctggcggttcggcatcgccgtcgcgctcctcctgctgtttcaattgatgcctcagaaatcaggaaagcaggtcgccgccgaacgaagctttttcggcgtacacaaggtcgagttgatcgatgatgcggaggcgccggccctcctcctcatgaacggcactacgctgcacggagccaaaagcttgcggccgaacgaggccacccaaccgctgacctattacagcaaggaaggcccattcggacgcttcttcgccgttttatcgccggtcaaactgcggcaagtcgcggttatcggattaggcaccggcgccctcgcctgttacgccggcgacggacaggattggacgttctacgagatcgatgccgcggtcgagcacctggcgagagagcatttccagttcctgcaaaattgcgctccgcgcgcccatgtcgtcctcggcgacgcgcgaatgacgatcgagaacgcaccggatgggacttatgacgcgctcattgtcgacgcgttcagttcagacagcgttccgatgcatctgatcacgcgcgaggccttggccatttacctgcggaaactggcaccgggcgggcacctcctgctccacatcagcagccggaggctggatctcactccggttgtcgcagccttgacggcggatgcagtcctgccggcacgcattctctttgacgatccgacgccaggaaccccggtctggcgacgttcgcccgcgctggtcgtcattgtcgtcagacaggaaatcgatctggacgctttcacgagccgggacggctgggcgccgcttccaaagccggaatcccggcatctttggacggatcagcgcgccgaccttctgcgggtgatcagatattagtcgcatccaagaacgaacttgggtcttgaaacgacaagaaatcctcgtatcccggctcgcatcgatacacgcgtcacatgcttggacggtatgcgtgttaccccctcgttaaccggcagccggcctgaactccctcaggatcccggcggcggccttgaaatcgacctggcgggcggcgcggcgcgccgcgacctcctcgtcgacgccccacttctcgatattccagtcctcgtcgacatgggcggcggcccagacctggtcctcgtcgcgcaccccgtgcgccagcgccagcgccagcaacgccgagccggtcagcgtcgtcaccacatggagcgccgccaccgaccatggatcggtcggaaacgcggcgcgcgccgccctgatcgcaggctcgggctggccgacatgcatgaccccttcggccatcacgaaatgggcgccgagcgcgtcggcagcccagaacaggatcgggtcccaatgctcggcctcgcgcgccaccagcgtctcgggatggccggcccgatagaacagcagatcgctgccgaggaattttgccgcatcgtccgcgacctcgccgacccgatcgatcactccctcgatcacgctgttggccagccgcgtcaacggcatggtcacgggatcgatggtctcgccctgtgcatcccactcggccgcgatcgcatcggcgatcgtgcgggtcggcaccacgatcggcttgccggacggcgagcggacctgcttgccgtcaagcgtgatcgaaaatccgccctcggcagcggtgacgccggcgctggtgtagaaccgcttgcgctggggcgtgcggatgtggcgccgcaccgcctcctgcggatcgagcggagattggtcagggacatcgtcgaagagttcgcgcattgcgccggccggctttcgtttcaagggatttccctgcaagatatgccagcggcaacggcaaataaagctgatgggacgcggcacattcctcgcgggtttctcgctcgttacggcggttttcggcgccgccgacgccgggttccgcacgccggaatcgctgatccgcaacgtctacgctcattacggcaggggtagcgccgcgttttccaatggcctgccgcgagacgagcagaccgcccggcagttcttcgatgccggcctgcgcggcgcctggaccgccctgcacgacgcgccgtacgattttctggtgcagggcccgacctggcggatcggcccggtctcgatcgcaacgccgcggcggcagttcgacaagaccgatgtgactgtgaccttcgacaatgagggccgcgccgtcacgctcaacttcatcgtcgtcaacggaccggagggctgggtcattgcggatgtcgagagtccgcacgattcattgcggatgtttctggcgcagttcaggcgctaatcccagatgtcggcacaacggcagatgacaggatcggcgacaccgaaaaaatatctgccgattacctgcgcgtcttggtatctccgcaattcaatcgcgcaatggccatccgattgatcgctcaacaggtttgaacgccgcgcgcactttctgcgtcgaagtgccgcaagtttctgtcatctgcgcgttaaatagctgccagattaccgcaacaacgtgcggctagcctcgcaccaccaaacggaaactttgtcgaccattgcggtcgcaagacgtagaccgacgtcatgcaagacgtcggtcgtgcgcttgcgcgcgtgtggcggcgtattggcggggcggcgtggcacgacgactttcaaccgtttgttgtgtcatcgccgcggcttgcctcgggcttgctgcgagcggcatgacggcttggctcgccgcagcaggcgtgcaggatgcgccgcgcacgcaacaggacgtttgcgcgcggcccgagcccggaagcgcgatcgaggaacccggcgaactgcgcagccgcgacggcgtgctcgaaaccgacctcaccatccacgatcagaagctgcccgacggaaccagccgctattgctatctgacgccgaacggcaagccgtcgccgaccctgcggctgaagccgggcgatcaactggtcatccatttcaagaacgacctcgtcgacctcgatacgacaacgcccgcgatcgatcgcccgctcgccggcgcgccgatctgcacgacgaggaagcaggccgacgtctgcgagagcggcgcgatgacgccgatctcgaccaacctgcacttccacggcctgaccgtgccgccggtctgccatcaggacgacgtgctgaaaacctcgatccagcccgacgacgcgccgttcgactatcgcctgcgcattcccgacgacgcggcgcccggcctctattggtatcacccgcatctgcacggcttcagcaagacacaggtgctcggcggcgcctccggcgccatcatcatcgaaggcatcgagcgcgccgatccacagctcgccgggctgcccgagcgcgtgctcgtgatccgcgaccaggatctcgtcaatcccgacgcgccgccgtcgaaattcgagccggtgatgaccaagagccagctcgacagcgacggcgacgtcgccaactccggcaccggcttcggcaagccgtcgaaggatctgtcgatcaacttcgtgccggtgccgtatccgaactatccgccggccaggctgacgatgaagccaggcgagcggcagctgtggcgcgtgctgaacgcgtccgcgatcacctatctcaacctcgcgctgctgatcggccgcgcgccgcagcagatcggcatcgtcgggctcgatggggtgccgctgcaattccagggcagcccgtcgccatcggtgcaatgggtcaaccacatcggcctgccgccgggctcgcgggcggaattcatcgtcgagggaccgccggccgggtcgtccgccttgctggtgacccgggcggtcgacaccgggcccgccggcgaaaacgaccccaaccgcgcgctgatgaccgtcacggcctcagccaatgcggacgaaccgcagtccaccctgcccgcgcacgccgagccgttgccgaggccggagcggccgtgggtcggcaacgtcgcaccggtgcacgtcagaaaactgttcttctccgagcagccggagaacccgaacgatccgaacagcccgaccaagttcttcatgaccctcgagggcgagacgccgaaaccgttcgatccgcaatccgacgttcccgacatcaccgtgagacagggcgacgtcgaggactggatcatcgagaaccgctcgatggagctgcatgatttccacatccatcagcttcacttccagctgctcgactggtccggcgtcgcggtcaacgagccgttcctgcgcgataccgtcaacgtgccctactacaacggccgcatgctgaaatatccgagcgttcgcctgcgcatggattttcgcgaccccaacatcgtcggcaccttcgtctaccactgtcacgtcctcgagcatgaggacggcggcatgatgggacggatcaaggtcgtgccacgcgacactgcaagttccaccaagccgaccaaccaccaaaaaggagaactgtaatgcgcgacaagcggaagtcacgttggctgcagagttgccgcctcaccctcagcgcactggcgctgggccagttcaccgccggacctgtccttgcacaggactgggaccatcaccaccatggacatgagacccggacgccgatcaagcacgtgatcgtcatcatcggcgagaaccgcagcttcgaccacgtgttcgcgacctacgtgcccgagcgccgcgaccaaagcgtgttcaacttgctctcgcagggcatcgtcaagctcgacgccagcaagaatgcgatccccgggccgaacttcgaaaaggcgcatcagcaggcagctttagataacggcccgagcgatgcgttcctgctgagcccgccgaagcagaatttccccaaggatcagctgccgtccccgcaggtcggcggccccaaggtctcctacatcccgaacaagtgcggcagctcgccgatcaccacctgtgaggcgtcgctggtgctggcgcagcagtcggaatccggcctgcccgcggagtactaccagtaccttttgaccggcggtaccggtcagacgtcgcacacgcccgatcagcgcatcagcaacgtcaatgcgttgccggccggcccgttccagctcaccaacggcgatgcgatgccctacgactcctattcggcgagcccggtgcatcgcttctaccagatgtggcagcagttgaactgcaaccactcggcagccagccgcgacaacccgtcgggatgcggcggcaatctgttcgcctgggtcgaagtgacggtcggcgccggcgccgacggcgcgacgcagccctccaacttctccacggaatactcgccgacggcgacgaccacgggcgagggttcgacggcgctcggcttctacaacgtgcagaagggtgacgtgccgtacttcacctcgctggcgcagaaatatgcgatgagcgacaacttccaccaatccgtcaacggcggcaccggtgccaaccacatcatgctcggtcatgccgacatgatctacttcagcgacacttacggcaacgccgcggtgccgccgaacggcattcaggttttcggcggcacgcccgatgccggcatcgtgcatgagatcgagaatccgaatccggctgccggcaccaacaattggtacaccgaggacggctacggcgccggcggaaacggcggcttcccgccgcccttccaaacgagcccggtgtccggcggcggctcctacagcgactgctcggatgcaagccagcccggtgtcaagccgatcctggactatctgaagggcatccggatcaacgcgaattgcgaaccgggccactattatctcttgaacaactacaatccgggttatttcggcaacggcaagaacgcctacaccgacaccaatccgtccaacacgccgttcacgatcccgccgtcgacccgcaagagcatcggcgacagcctgaacgaccggaacatctcctggaagtactacggcgaccagtggaacaactacgtcaacgatccctaccagctcaattggggcgtggccggtccgaccgcggatgagtattgcaacatctgcaatccgttccagtacgacacctcgatcatgtcgcacccggagcaggtcgccgcccatatcaaggactcggttgatctgtactccgacctctccaagcactcgctgccggcggtctctttcgtcaagccgagcggcttcaccgacggtcacccgtcatcgtccaagctcaacctgttcgaaggcttcgccaagaaggtcgtcgatcaggtgcaggcctcggactacgccagggacaccgcgatcttcatcacgttcgacgaaggtggcggctacttcgactccggctacgtgcagccgctcgactatttcggcgacggcacgcgcatcccgctgatcgtcgtgtcgccatacgcgcggcacggccacatctcgcatgaatatgccgatcatgtctcgatcatcaaattcatcgagcggaactggcgcctggagccgatcacccatcgcagccgcgacaacttcccgaacccggttgcggcgcccggcaatccctatgttccggtcaacagcccggcgctcagcgacctgttcgacttcttcgatttcgacgacggcggccatcaccatggtggtgacggcgacgatcggggtgacaactggaaccactgacggccgcaccttgcgacacaacgatccgccggcccgaaaggccggcggatttcgtttgcgtcaggccggatgtccatctcccgccggagcctgtaacgtgtccggcgacaccgaccacgtttgcaatggacaccccgttcaatgacgtcaatcgcattccgcgaggctcagcccgccgaccttccggcgatcatcgcgctcctcgccaacgacacgctggggcagcagcgggaggattcgagctcgccaccgaacccgcgatatgtcgatgcgctccaagccatcctcgccgatcccaaccagttgcaggtggttgcgatcctgcacggcgaggtgatcggctgcttgcagctcagcttcatccccggactggcacgcatgggcgcctggcgcggacagatcgaagcggtccgaattgccgagatgcaccggagttcaggcgtcggacagcagatgttcgaatggacgatcgggcagtgccggacgagaggctgcgacctcgtgcagctgaccaccgacaaggcgcgccccgacgcgcaccgcttctatgaacggctgggcttcgtcgccagccacatcggctacaagctgaagctctgacacctgccggcgtcagtcacgcgtattggcgcaggatcgcgaataggcagcgcggtcgctctggttcaagcctgaggctgcggcctcgtcgaggcagcggctgacacggtcgccgaacgagctgcgcgcgggagcacgcaggttcggctgcgtgaccgcgtccatcttggggatcggcggcacctcgatcttgggcggcggaggtggcggtggcggcggcggcagggtcggattgtagatcgagccaccgggcccgaggattatttgcttttgtgcaaaggcgctcggcgcgccgatgacccagagcaaggtgcaggcaataatcaaggatcgcttcatggcctatatctcgtgacggcgcggcgctggttcaagtgattgccagctgcatcaacgccgcccttgataagcgagttccccggccggccttcacggcttctgatagatcacgtgaccggcgcggatggtggtgctcactttcgcgagattggcgacgtcgctgagcggatcgccgtcgagcaccacgagatcggcgtcgaaaccctgctcgaccttgcctttcctcgcggccttgaagaaccgcgccgggttggtggtcagcgaggccagcacctggcgttccgacagcgcgcgatgcatcagctgaaattcctgcgtggtgtcgtacaacttcgtgaacccgacatcggtgccgaacagcacgggaccgccgttctccgagaactgcttgagctggttgacggtcgccgcgaccagctgtttggtgacgttgggatcgagcacgaccgtggtgaacagcgacagcgtcgggatcagcgcggtgttctgtgccttgaaccgcgccagctgctccggcgtatagccgccttcgctcgggtcggtgtgcgccatgatatcgacgccggccgcgatcaccgtctcgacaccggtcttgttctgcggatgggcaaacgccggtttgccttgtgcatgcgccacgtcgaccgcagccttggcgatcgccgggtccatgttcacgaccggcttgttgcccttgaagacaccggtgaacagtttcacgccatccagattgaggtccatgtagctgcgcgccagttgcgtggcctcgtcaggggtcgatgcctcgggcagctgcatatcggcgggcagataggccggatggccgtccttcggaaagatgctgccggcgaggaagatgttcggaccggcgacctctccggcggcgatgcgcttgcgcaatgggaggatgtttcgcggatcggagccgaggtcccagacggtggtaaatccccagcgcgtcagcatctcctgcatgtgctgcgtcagcggcgcggccggcgcttcgccggcgaggtgccagacgtgctcggtgaaatgcacatggctgttccagaacccggcaaccacggtcttgccgctgcaatcgatgacccgcgcatccgacggcaccttgacctcgccggacttgccgaccgcgctgatgacgccgtccgagatcacgatcaccgcatcgggcagcgccgccgcatcggcggatgcgtagagcgtaccgccgcggagcaccacggtctcggcttgcgccgctccagcggcgacagccgagccgatgaggaagagcgcgacgcgtagccaggtccgggtcatggtcagcctctctgatgattgcataccggcaacgaccggcgcgcggcaacatagaggccgtgcgcggcacggtttgatcgttcttgctgtcgcgacggatattgcagggcggccggcccgtcactcctcgggcgcgttctcgatcgggtcgaaccggtcggcctcgagcccgagcagattccaggattgcagcatgtgcggcggcagcggcgcgctgacatcgatcacgccgccgcgcggatgcggaatcacgatgcggcgggccagcagatgcagccggttctgcaggccgcccggcagctgccagttctccttgttgaagtatttcgggtcacccacgatcgcgtgatcgatatgcgccatgtgggcgcgcaattgatgggtacggccggtgaccggcttgagcgagacccaggcgagcttggtcgcggaggcctcgaccacggcgtaataggtcaccgcgtggctggcgccctcgtcgccatgctcggcgatccgcatgatgctgtcctcctcgctctcctccttggcgaggtaggtcgagatccggccctgcttcggcttcggcacgccggcgaccagcgcccagtagatcttgcgcgcggagcgatggcggaacgcgccggtgaggaacgatgcagcgaaacgcgtcttggcgatcagcaggcagccggaggtctcgcggtcgatacgatgcacgaggcgcggcttctgccccttggggtcgcgcatcacctccagcatctggtcgacatggcgcgtcataccggagccgccctgcacggcgaggccggccggcttgttcagcaccagcacgtcgtcgtcctcgtacagcgtcatgtccttcagcgcctgcagcgtcttcgcctcggcctccgagagcgcgcctgacgtcttcggcgtgtcgagccgcagcggcggaatccgcacgctctggccctcctccagccggtccttggaatcggcgcgcttgccgttgacccgaagctcgcccttccggacgatgcgctggatatgggagaacgacaggccgggaaaccgcgcctcgaggaagcggtcgacccgcataccgttctcgtctgccgtgacgacgacggtctgcaccttggtcggcaatggctgctcggccgcctgcttctcggcgcgaggctcgacccgctcctcgcggtcgcggcgtggctcggcaaagcgcggcggcttggcggcggtacgctgcgagaacgggcgatcaccggacttgcgctcgtcgggcttgcggccgcgaggcccggccgcggccttaccacgatcctgatcgcgatccctgtcacgccccttcgcggaccccttcgcacccgctttggtacggtcgcgcggcgatatggttctcttgatacggcggctcatggtggtttttcggctccagacctgcattgtgcctagcgcaaatgccgcgaatcgtcacggcgaaatcggtgtaaatccgctgccgcatcggccatgttcggccgcttccggccatcgggcagagcctcggaaggagccctggaatgcgacggacgacatcggctttggcggcggcccctgatgctcacgggtccgtcgcagcgggcgttggaaaaatatcgaaaacaaccccatgcaaagcagccagcggcgggcgttcgaccaaacaacttgacacgtcgggcaactcagggatattcttctattattccgaaatcgcgaaagtaccgccgtcattgcgaggagcgatagcgacgaagcaatccatagctccgcatattcggctagatggattgcttcgcttcgctcgcaatgacgagcgctacggcccgccccgctccttgcgtagccgcgcccaatagtcgagccgcttgcggatctcgcgctcgaagccgcggtcgggcggatcgtagaaagtctggcggcccagcgcttccgggaaatagtcctggccggagaacgcgtcgggctgatcgtggtcatactgataaccggtgccgtagccttccgacttcatcagcttggtcggcgaattcaaaatgtgcttcggcggcagcagcgagccgccctgcttggcggtctgcatcgcagcgccgaacgcagtgtacaccgcgttcgatttcggcgcggtggcgagatagaccacggcctgcgcgatcgcgagctcaccctccggcgagcccaggaaatcataggcatccttggcggcgttgcagaccgccagcgcctgcggatcggccagcccgatgtcctcgaccgccatccgcaccacacgccgcgccaggaacagcggatcctcgccggcatcgaacatccgcgccagatagtacagcgccgcatccggatcggaaccgcgcaccgacttgtgcagcgccgagatcaaattgtaatggccgtcggccgacttgtcgtagatcggcgcgcggcgctgcaggatggcctgcaactgctcggcattgaacacctcgcccttgcgcgcggcgcgccagacctcttcggccaatgtcagcgaggcgcggccgtcgccgtcggccatccgcaccagcacggcgcgcgcctcggcatcgagcggcaggctcttgccttcgatcttctcggcattggcaaacagccgttcgatcgcagcggtatcgagcgagtgaaacaccagcacgcgggcgcgcgacagcaacgccgcattgagctcgaaggacgggttttccgtggtggcgccgaccagcaccaccgtgccgtcctccatcacgggcaggaaggaatcctgctgcgcgcggttgaacctgtgcacctcgtcgacgaacagcagcgtgcccttgcccatctcgcggcgggcacgggcggcatcgaacgccttcttgagatcggcgacaccggagaacaccgcggagatctgctcgaaatgcagctcggttgcgtcggccaaaagccgcgccacggtggtcttgccggtgccgggcgggccccagaacaccagcgagcccaaggtgcgcgtctccagcatgcgggtcagcgcgccgtcggggccgaggatgtgatcctggccgacgacgtcggccagcgtgcgcggccgcaaccggtccggcagcgggtgtggcgcgtcctgctccatccccgccgcggcgaacaggttgccagcctcgcgcggttgctttgcgctcattccttggggctcatccgccgagcgtcacgttgatctgctggccgccgcgcaccagcgtgatgcgccagatccgcgagcccgccttggatgccttgtcgaggtcgctggtccggacgatcttctcgttgttgaccgcgaggatgatgtcgcccttctggaagccgacattggcggcggtgccgtcatcggcgagctcggtcaccaccacgccctcggcgccggcatcgagatgcagctcgtcggccagcgccggcgagatgttggcgacccgcgcgccctggaacggcgagcgcgcggtcagcacgatctcgtcacggttggtgtcgggcgcggtctccagcggcacggtcagcttcaccggcttgccggcgcgctgcacctcgatctcggcgttgccgccgagcggacgggtcgcgaagcgatagtcgaacgcgttggggtcgtcgatggactgcccgtcgatcccgacgatcaggtcggacagtttgagcccggccttcgccgcggggctgttcggcgcgacattggcgaccagcgcgccggtcggtagcttcagtcccagcgtctcggcgatctcgggcgtgaccgcctgcagccgcgcgccgagccatggccgcttcaccgccttgccgccgctcttcgcggaagccaccacgacgcgcaccatgttggccgggatcgcaaagccgatgccttgcgaaccgccggagcgcgagaagatcgcggtgttgatgccggcgagccgtccggtcatgtcgaccagcgcgccgcccgaattgccgggattgatcgcagcgtcggtctgaatgaagaattgataatccgtgatcccgacttgagtacgcgccaaggccgagatgatgccgtgcgtcacggtttggccgacgccgaacgggttgccgatcgcgagcaccacgtcgccgacctgcagctgatcggaattcgcgaagtcgagcgtcgtgaatttttccttgttggtgcccttcaggcgcagcaccgcgaggtcggtgcggctgtccttcagcacgatctcggcctcgaactcacgcttgtcggagagcgagaccttcacctggtcggcgccctcgatcacgtgattgtttgtcaccacgaggccggagccgtcgaccatcacgccggagccgagcgagcgctgcatctgctccggctgctgccccggcacgccgaagaagcggcggaagatcgggtcgtccaggaacggattgcggttctgcacggttttggcggcgtagacattgaccaccgccggctgcacccgctgcacgatcggcgcataggacagctggagctcggcctgggaggacggcacgcgacggtcctgggccgccagcggggagagattccccatgaaaaccaacgtgcacagagcggatagggcagccaagcggacaggtcggagcattctcacctctcgtggaaacgccggaatataggcgtgttcgccgggcaattgaagggcgcggcgccggataactgcccccctgccgaccggtgcaaaaccggcggcagccaagttgaagcgccccgccaagcttctatgatggctgtcatctcactgcgccgctccgcttgttgcctgcggacaacaagcggaactgcgaagcctggaagcgctgtcgtgcgtcggtcacgatcaactcctaggacgtttcagtgagtgagtggggaagtcaaacacaacaggggtacacaatgggtgcgacaaaagttggtgcaatcgccatcgggcttgcgggggcgctcgccgcctcgccggcctattcgcaatcggcaggcggcggcggtgatgccgagatcgcgctgctcaagcagcagctgaagatgctggagcagaagctcgacaagctgcagaagcagaccaacgccaatacggcgaccgcggccagcgcaaatgccaacgccaaggcggcggatgccaaggccgcgcgcgtcgcaagcgccaatgccgcgatcccggtgaagggcccggtcgcaccgtccggcgtcgtggtgacgatgccgaacaaccggccgacgatctgtaccgccgacgaacagaattgcgtcgcgatcacgagccgcgtgcactgggacgtcggcggctacgactatcgtccgaacaccgcagccacctcgccgcagaagctcgacagcggcgagaacctgcgccgcgcccgcatcggcatcgtcggcaagttcttcggcgactggaattacgcgctgatctacgacttcggcggctcgtccgacggcttcggtggcgcggcaccgggatcgctgcccggcggcggcacctccggcgtcgagaatgcctatctgagctacaccggcttcaggccgttcggcggcaagatggcgatcgaaggcggcatcatggacctgctgtggacgatggatgagtccacgagctccaatgatatcctgttcatggagcgcgcctcggccggcatcatcgcccagaacgtcgcggccggagacttccgttcggccgccggcacccgctggtggaacgaccagctctggatcggcggctacgtcaccggaccgaccacgggcgcgatccactccgcgtcatcagccgcgccggccggaacgtccgagcagtatggcggcgttgttcgcgtcgccggcaatccgatcagcggcaaggactactcggtgcatatcggcgccgatgcggaatggctggtgcagccgccgcgcaaccagctgacgcaggcgcagacgctgacgctgagcgaccggcctgagctgcgcatcgatccgacgacgctgatctcaaccggtgcgatcgccaacgtctcgggcgcgcaggtctacggcgtcgaggcggcggcgacctatggtccgttcatcgcacagggcgagtattactggttcaatgtcgaccgctccgcgaataccgggctgccgccgttcggcgcgccgagcctgaaattcgatggcggctacgcgcaggtcggctacgtgctgaccggcgagaaccacgcctacaacacttcaaccgcctcctatggcggtatcaagcctcacgatccgttctcgctcgccggcggcggcatcggcgcctgggaaatcgccggccgcgtcagcacgatgaacctcaacgaccaggtcggccaggcggtcggcatcgccggtgggcggcagaccgtctacaccgccgcgctgaactggtacgtcaacaacaacgtccgcttcatgctgaactatctgcacggcgacgtcgccaagcaggcctcggcgacctccgccgcggataccggctcgaagttcgacgcggtcgcgctgcgcacgcaggtggcgttctgacgtaacttacctctccctatggggagaggtcgaattgcgaagcaattcgggtgaggggtgccgcttcttcggtgcagcgtgatccctcacccggatcgcatcatgcgatgcgatccgacctctccctccgggagaggtgaagcgcgaacacccatcaggccgcgcgcttcttcttcacgacgacctccggcgccggtgcgcaggacagccgctcctgatggccctcgccccaggctttcagaatatcgatcaccggacgcaggctctcgccgagttcggacagcgtgtattcgacccgcggcggcacctcggcatagaccttgcggatcacgaggccgtcgtcctcgagcgcgcgcagctgcttggtcagcatgcgctgggtgatgccgggcatccgccgccgcagctcgccgaagcgctgggtgccggcctgcaaatgatacaggatcacgcccttccatttgccgtctatcagatcgagcgcggcctcgaccgcgcagcccggccggcgggcaaaattcttccgtttcatcggtaatttcccaatagtatacaaacagggactagttccctgtttttacagtacttgccaaaaggacgccagcgcgacaggtaagatggcaggcaatcgcccaccacggagaccaggcatgaaggccgtcggataccaaaagtcgctgccgatcgaggcggcggattcgctcgtcgatttcgagatcgccaagcctgagccgaaaggacgcgacatccgcgtcgcggtgaaggccatctcggccaaccccgtcgactacaaggtgcgcaagcgcgcggcgccgaccgatggcggcaccaagatcctcggcttcgatgcggccggcgtggtcgaggccgtcgggcccgacgtgtcgctgttcaagcccggcgacgaggtgttctacgcgggctcgatcctgcgccagggcaccaactcggaattccatctggtcgacgaacgcatcgtcggcaacaagccggcgtcgctgtctttcgcgcaggccgccgccctgcccctgacctcgattaccgcatgggagctgctgttcgaccggctcggcgcggtgccgggcaagagcctcgatccgcgcacgctcctgatcaccggtggtgccggcggcgtcggctcgatcctgatccagttggcgcgccggctcacgggcctgaccgtggttgcgaccgcgacccggccggagtcgcagaagtggtgcctcgatctcggcgcccatgcggtgatcgaccactcgcagccgatgaaggagcagatcgagaaattgaagctgccgccggtcggccttgtcgcgagcctcaccttcaccgaccagcactacaagtcgatcgccgacttcatcgcgcctcagggcaagttcggcctgatcgacgatcccgccgagttcaacgttgccgccttcaagggcaaggcggtgtcggtgcactgggaatcgatgttcacgcgctcgtcgttccagacgcctgacatgatcgcgcagcatcatctgctcaacgacgtcgcagatttgatcgacaagggcgtgctgcgcaccacgctcgaccagactttcggcaccatcaacgcagcgaatctcaagcgcgcccacgcgctgctcgaaagcggcaaatcacgcggcaagatcgtgctggaaggctggtaggccctcccgttcgtacggtgggtcggcatcagtgtaaccgaccctacccgccctgcgcacctcgcgttatccccactggccggcgcgtggcttttgccaaagccacgatcgcctgtatgatttgcgtaacgatcaccccgtcctcaatccggccgcgcaagacgcggccggaacggtggtgacgccccaagaggatacaaggggatgggaggacgccgatgagtttgctcacggccgatccgtcgcggatcgatccggagtggatgacgcaggcgctgcgcggagccggcttgatcgaccaggccagggtcatcgatctcgcatgcaagccggtcggcaacggcctcgtcggcgacagctatcgatttcacctgacctatgccggcaatgagccgaacgcacccgcgagcgtcgtcggaaaatttccggcggcagatcccgacagccgccgctccggttccgcgcacacgctttacatccgcgaggtcgcattctatcgcgagctggcggcgaccgtcgccattcacaccccgcggccaattctcgccgagattgatccggcgaccgacgacttcacgctgatcctggaagatctggcgccggcgcgcccgggcgaccagctcgccggatgcgcgatcgaggattgcctgacggcgatgcgtgaggccgccgcactgcatgcgccgcgatggaacgacccgacgctcgccgcagcgcattgcttcacggttgccgcgagccggcgcagagaccttcgcgcggtgctgccgggcattatcggtcactacaaggagcgatatcttggcgtgatcgagccggagttcctcgatctgatcgaccggcttccggacgcgatcccgcgctaccagtcggagcaatcgacgccgcgaaccctgcagcatgcggacttcaggttggacaacatcctctttgacgtccgtggcaatacccgaccgatggcgacgctggactggcagacattcacggtggggccaggcatcgtcgacgtcgcctatttcctgtcggccggcatcgagccgtccgagcggcgattgcatgaagccgatctggtgcggttctatcattcggagctgatccgccgcggcgtgcaggactatggctgggaccagtgctggcgggattaccggcgctacacgctgcacgggatcatgatgggcgtggtctccgcgctcagcgtgcagcgctccgagcgcggcgacgcgctgttcctaaaaatgacccgcggcgcctgcgcgcaagccctggatcacgacagctttgcatactggcaggactgaagcgttttcgagcgaagtgggtaccggttcgcgcgaagaaaacgcgtcaagaagaagtcaaaggactatcgaaaggggcccgtgtgctcaacaagcttgacgacttcccgatccaccagaccccggagccgatcgcggttcccgtcaccagcgaccgcaatgtctatgaccggacctggttcaacggctacaccgccgacggcgcgtattatttcggcatcgggattgcgatctacccgcaccgcaggatcctcgattgcgcgttcagcgtggtggagcgcggcggacggcagcactgcttctacgggtcgcggcgggcgccgctcgagcgcaccgagatgcaggtcggcccgttccggctcgaggtgatcgagccgatgctgcggacccgggtcgtgctcgacgacaatgcgacgggccttgcctgtgacctgaccttctccgcgcgcacggccgcgatccaggaagcgcggcagacgctgtggtcgggcgaccgccgcgcgatggactcgacccggttcgaccagttcggccgctggcacggcgtggtgcgtcaccccgatggagagatcaaggtcgacgatcgcacctgctacggcaccaaggatcgctcctggggcgtgcgcaatgtcggcgagcgcgacgtcggcggcgcgccgatgccgctgccgagcgtgttcttcctgtgggcaccgctggtctgggacgaccacatctcgcacgcgatcttcttcgacggcactcaaggcgaggcgctggtccgcgagggcatcaccgcgccgctctaccgcagcgaggccgagatccccggcgtcgtcgatggcctcgaccgccgcatggcgactgcccggcaccgcgtcaaatatgtgccgaacacccggctggcgcagtcggccgaaatcgacctcgtcgacatcgacggccataccacgaccatcgcgctcgacccgatcctgaaattccagatgaagggcctcggctacggccatccgcaatggggccagggcatgtggaagggcgagctcgaaatcggcggcgaatcgttcgatcccgcgacgctcgacccgctggcgcgggagaacgtgcacgtgcaacaggtggtgcgcgcccgtcagggcgaccggacagggatcggcgtgctggagcagatatgcttcggcccctaccgcccggcagggttcagcgagtttctcgacggcgccaagggatagcccgttagactggcggcacgccctcgacgaagatcagccggcggtccagcgcggtccgccgatgcttgagcgcctcggcatattccggcgacgcgtaccattcgcgcagccgcgccatcgaggggaactcgacgacgatgatggtcttcggcgacggccccccttcagccacatcggccgcaccgccacgcacgagataacgtccgccatatagcgcgatggtcctggcggccaaggtacgataggcctcgaagcctgccgcatccttcacgtcgacctcggagatcacgtaggctgacatggccgcgcctcacgcgatcgtttggacgataccaccctcggcgcgcagcgcggcgccgttggtggcggaggcctgcttcgagcagacatagaccacgagattggcgatctcctcggtgctggcaaagcgctgcagcagcgaggtcggccggtgctgcttgacgaaattggaggccgcctcctcgaccgactggccgttctgcttggcgagatccttgacgaaggtctcgacgccctcggacatggtcggtcccggcagcacggagttgacggtcactgcggtgcccttggtgagctcggcgagcccccgcgcgatcgcaagctgcgcggtcttggtggtgccgtaatggatcatctcggtcgggatgttgaggccggattccgaggagatgaagacgatgcggccccagttgcgcttcagcatgccctgcatgtagccgcgcgacagccgcacgcccgacatcacattgacctcgaagaagcggctccaatcctcatcgggaatgtcgaagaagcccttcggctcgaagatgccggcattgttgacgaggatgtcgacgtccggcagcgccgcgagcagcgccttgcagccggccgcggtcgagacgtcggcggcgatgccgcgcaccttggcgcccggcaccgccttggcgatcgcagcaatcgctgcatcgaccttggcctgaccgcggccgttgaccacgacctcggcgccggtcgcggccagccccttggcgatggcgttgccgatgcccgcggtcgagccggtcaccagcgcagtctttccggaaaggtcgattttcattgggaggtctcctgtcagtcgtacctgacatatctcaatgcgggtacgcggatgcaaccagggtttgggcagccgcatgcaaaagttcgcggccgtgcggaccggcatctcagcaccgcccgatgccgatgacaaccatgtcgtgcggatgacgcgcgaggcacggtgcgcagtttcgccgcgagtcaaatcgccgcgcgcaatgttggttgatgcatcgtcactgcggccttcatccaatcttcacatgaaacatcgcgtgcgcgctgaacgctttcacacattgtcaattcgccgccgctaagcgtcgccgcaaacagcgcgagctgttgtgttggcaaccggacccgacttttcttcaacgacgacgtccggagccctgcgactgacaggaatgcatcagatgttcgttgtgtccaggatgaagccgttcgccgctgatatcctgaagcgatttcgcccgagcctcaagaaccagatcgcgatgctcgggatcggcggcgtcgccatcatcagcgtcacctgccttgcgggcctcgactacgccgccaatgtgcagcgcgagtcggacgacagcatgcgcttcagggcgcagctctccgagctctcggacggcttccttgagacgcagcagatcgcggcccgcttcctgaaatcgcgcgatgagggtttagcgaagaagctttccgctcgcgttgccgacgagatcgccctgctcgacaagctcgaagctttcgcgatggctgcgccggacggtgatccgatccggcaagtcgcctcgctgcggagcggcatcaatctctacgcaacgcgcttccagaacatcgtcggcgcccagcgcatcctcggcatgaccccgacagacggcctgcagggcaagctgcgcagcgcggtccagcaattcgaagccagggttgcacaggtcgatcagccgcgcctcaccgtcctgctgctgacaatgcgccggcttgaaaaggatttcgcattgagtggcgaagagcggttcggcgaccagctcaacgagcgcgaggacgagttcgagaccgcgctggcggcatccaccctcgccacgaacgtgaagactgaactgctcggtctcgcccacgcctacaagcttgctttcgccggcttcctggtttcgcgccagacgctcgacgaccagctcgacgacctcagccagattttcgaccgcacccggccggcgctggtcaaggtcgcggacgccgccaacgtccgtgccgaactcgcgcagcgcagggccgacgcgttccggcaggccttcagctggctgatcggcatcgttgcgttcgtgctgacgctgtttgcgatcttgttcggccggcgggtcgcgggcctgatcagccggatgagtgcggcgatgcgccggctcgccgaaggagatttcgacgtcgtgctgcccggcctcgagcgcagcgacgagatcggcggcatggcgcgcgccgtggaaagcttcaagacccgggcgcaggacaaggcgcgcgccgagctcgacgcgcggcgcgaggaagaccgccgcgcggccgatcggcacaaggccgagctggcgcggctcgcggaagcgttcgaggcgagcgccggcaatgtcatcgcaaccgtctcggcggcatctgaagagctcgcggcatcggcccgcgatctgagcgacaccgcccatcacacccaggacctgtccgccaacgtcgcggcggcctccgaggaggcctccgacaatgtcaggcgggtcgcggcggcgaccgaacagatgatcgcatcggcttccgagatcggacgccaggtcagcgaatcggccgacatcgccagcgacgccgtcgcgcaggcgcaacagaccgacgcgcggatggcgcagctcgcatccgctgccgaccgcatcggcaacgtggtgcagctgatcgctgcgatcgcgcggcagaccaatttgctcgcactcaacgcgacgatcgaggcggcgcgcgcaggcaccgcgggttccggctttgccgtggtcgcgcaggaggtcaagacgctcgccaggcagaccgcggaggcgaccgaagacatccgcgcacagatcgccgatatccaggctgcgacacgggagtccgccggtgcgatcagcgatatcgccggcatcatccagcggatcgcgcagatcgcctccgatgtggccgacgccatcgatgcgcaaggcagcgcgacgcggagcatcgcggaaaacgttcaggtcgcttcggaacgaacctcgcaggtcgcggtcagcatcggacaggtcgccagcggcgcctccaggaccggcagcgcctcgtcccaggtgctgagctcgtcgcggctgctgtcggacggcaacggccgcctgaagcaggaactcgacaatttcatcgccaccatccgcgcgggctagcgcaacaaacaaaaacggcgcccgaaggcgccgttttcaaaacctgggctcgagattggcttacgccgcctcggcttccttgtcctgggcgggaccggagtcctggcccttggcgtcgacgtcgcgatcgacgaactcgatcacggccatcgcggcgttgtcgccgtagcggaagccggccttgatgatgcgggtgtagccgccttggcggtccttgtagcgggtcgccagcgtgtcgaacagcttcttgacctgatcctggtcgcgcagctccgagatcgcctggcggcgcagggccagcccacccttcttgccgagggtgacgagcttctcgacgatcggccgcagctccttggccttcggcagcgtggtgacgatctgctcgtgcttgatcagcgcggccgccatgttggcgaacatcgcacgccggtgctcggcggtgcggttgagcttccgatgaaccttgccgtgacgcattgacttcttccttcttcaattctgtcgcggtggttcagcgacaagtgcaggtgggcatcctgcgttcgcccggtagaatcatggacgggacagcccggccatgatgattgaatcggatcagtagtgatcctcgaagcgcttggcgagctcgtcgatgttctccggcggccagcccggcacttccatgccgaggtgcagacccatctgggccagcacttccttgatctcgttcagcgacttgcggccgaagttcggggtgcggagcatttccgcttccgacttctgcacgaggtcgccgatgtagacgatgttgtcgttcttcaggcagttcgccgaacgcaccgacagctcgagctcgtcgaccttcttgaggaacgccgggttgaacgcgagatcggggatgatctcctgcgtgacttccttgcgcggctcttcgaagttgacgaacacgttgagctgatcctgcaggatgcgcgcggcataggccaccgcgtcctccggcgtgatcgcgccgttggtctcgatcgtcatggtcagcttgtcgtagtcgaggatctggccctcacgggtgttctcgaccttgtaggagaccttgcggaccggcgagaacaggctgtcgaccgggatcaggccgatcggcgcgtcctcgggacggttgcgctcggcggcgacgtagcccttgccggtcgtgaccgtgaactccatgcggatctcggcgccgtcgtccagcgtgcagagctgcaaatcggggttgagcacggtgacgtcgccgacagtctggatgtcgccggcagtgacggcgcccgggccctgcttcttcacgaccatgcgcttcgggccttcgccctgcatcttgatcgagatgtcctttatgttgagcacgatgtcggtgacgtcttcacggacaccggcgatcgaggagaattcgtgcagcacgccgtcgatgtgcaccgactgcaccgccgcgccctgcagcgaggacagcaggatgcggcgcagcgcgttgccgagcgtctggccgaagccgcgctcgagcggctcggcgaccacggtggcgaaccggctcgcgtccgagcccggcgtcacctgcagcttgttcggtcgaatgagttcttgccaatttttctggatcgtcactttttcaccctttgccggtcatcgggccaatcgatcggccaaacctggcgttggagatcgcggatcagtccgcgcggtcaattccaaaaaccatcgcggagcggctggacgccgcccgcgacttacagatcaaacgcgccgacgcttgcgcggacggcagccattgtgcgggatcgtggtcacgtcgcggatcgaggtgacggtgaagcccgcggcctgcagcgcacgaagcgccgactcacggcccgaacccgggccggccacttcaacctccagcgtgcgcatgccgtgttcctgcgccttcttggagacgtcttccgccgcgacctgcgcggcatagggggtcgacttgcgcgagcccttgaagcccatcgtgccggccgacgaccaggcgatggtgttgccctgcgcgtcggtgatggtaatggtcgtgttgttgaacgacgaattcacgtgcgcgatgccggaggcgatgttcttgcgttcgcggcggcgtacgcgggtggcttccttgcccatttcaaacctttcctgtgatctcaacgccgccgtagtgccagcggctacacctcaaaacgcaaatggcgagtagcgaatttcgattcgctactccccacctgcaattcgcaaaacttacttcttcttgccggcgatcgccttggccggccccttgcgcgtgcgcgcgttggtatgggtgcgctggccgcgcaccggcagaccgcggcgatgacgcaggccgcgatagcagccgaggtccatcagccgcttgatgttgatgccgacctcgcgacggaggtcgccctcgaccagatagtcgcggtcgatgacttcgcggatctggaggacctcctggtcggtcaactggttgacgcgacggtccacggggatcttcaccttctccatgatatcggcagcgttcttctggccgatgccatggatgtactgaagcgcgatcagcacgcgcttgttggtcggaatgttcacgccggcaatacgggccacggacttctctcctgtcgccgctccatcacggatacgggcttctcaagttcttgctctctgcgggcttgtgtccacaaacgcgaacacgacgcccttcccctcatgtccttcggggcccggcatcgtcataaaactatccaacttggatgcggggcttattaaaggattcatgtcggtttcgtcaaccgctcctagcgtttagctcgctttttcgtgagcttttttgctgcctttttgggggcttttgcccccttccgggcattcgcggcgctggcggccttctttgcagccttcttggcggctttcttcgtccccgtggccttggcggccgccttggtggccttccgggccggtctggcggccttcttggccgatttggcggctttcttggtcgccctcttcgcggtcttcttggccgtcttggaggccttcgaggcgctcttggcagcccgcttgggctcctcgtgctccttcggttccagcgcgccgagcgcggtcaggatccggttgatctcgcgggtgacgtgctcgatggtcatcatgccatcgacggtcaaaagcttccgccgctccgagtaatagtgaatcagcggctccgtcatcgaacggtactgcgccaggcgcttggtcagcacttccggcgtgtcgtcgaggcggacttcctcaccgcgcgcgcgggtttcctcggcgcgcttctcgacgcgggccagcagcgcgctctcattgacgcgcaattcgatgacggcatcgagcttgaggtgcttcttgcggagcagctcgtcgagcgcctccgcctgcggcacggtgcgcgggaagccgtcgaggatgaaacccttcttggcatcgggctcctcgattcggtcggcgatgattcccaccacgacctcgtcgggaaccaggccgccattggccatgacctccttggcctgcaggccgaccggggtgcccgcggcaaccgcggcacgcagcatctcgccggtcgagagctggacgatgccatgccggtgcaccagccgctgcgcctgggttcccttgcccgagcccggcggtcccaaaaggatcaatctcatatctgcttcgccccccggctaggtgggcgaattccgcacacctgtgttttgagtttggcgccgcgccgcgatcagcggcggcggcctcccctgagcttcgacttcctgatcagcccctcatactgatgggcgagcagataaccctgaacttgcgacaccgtatccatcgttacactgacgacgatcaaaagagaggtgccaccaaagtagaatgggaccgaggcgtaggaaatcagaatttcaggaatcaggcagacgatcgccagatagatcgcgccgagcaccgtgatgcgcgacagcacgtagtcgatatattccgcggtgcgctcaccgggccggatgcccgggatgaagccgccatgcttcttcagattgtccgcggtctcggtcggattgaacacgatcgccgtgtagaagaaggcgaagaacacgatcagcgcgagatacatcagcaggaacagcggacggccgtggctgagctgggtggtgagccactggaaccactccggccctttgccggcgttgaagttcgcgaccgtggtcggcagcagcagcagcgacgaggcgaagatcggcggaatcacgccggaggtgttgagcttgagcggcagatgcgaggactggccctcgaacatcttgttgccgacctggcgcttcggatactggatcagcagccggcgctgggcgcgctccatgaacacgatgaaggcgatcacggcgaccgccatcacgatgacgatcaggatcaggccggtcgacatcgcgccctggcggccgagttccagcatgttggcgagcgccgacggcagctcggcgacgatgccggacaggatgatcagcgagataccgttgccgatgccgcgcgaggtgatctgctcgccgagccacatcaggaacatggtgccgccggtcagcgtgatcgcggtcgagatccggaagaacatgccggggtcgctgacgacattaccggcgccttcgaggccgatcgcgatgccgtaggactggaacagcgccaggatcaccgtcaaatagcgggtgtactggtttagcgtcttgcggcccgcctcgccttccttcttcagcgcctcgagctgcggcgacacggtggtcagcagctggacgatgatcgatgccgagatgtacggcatgatgttcagcgcgaagatcgccatgcggtggatgccgccgccggcgaacatgttgaacatgccgaggatgccgccggactggctgcggaacacctgctcccagatgttgggatcgatgcccggcagcgggatgtaggtgcccagccgataaacaagcagcgcacccagggtgaaccagatgcgcttcttcagctcgtcggctttcgccagctgtccgaaattgaggttggcggcaagttgttcggctgctgagaccatgttcggctttctcccggagcccgcttcgccgacgccccaagaactcgttctatcggggcgatcggcagacaccggacattatctggtgctcggcctcgataagtccatcattcgatctgcggattgcccgcgccgcgcgcgggcaatgacgcagatgttacgccgcctcgccttcttccttggcgggggcaaagatcttgaccgagccgccggccttctccaccgcggcaatggccgacttggaagcgccgtgcgcttcgatggtcagcttggtcttgatctcgccgcggccgagcagccgcaggccgtccttggcgcggcgcagcacgccggccttgaccagcgtctcgacggtcacggtctcgctggcgttgaccagcttgttgtcgatcgcttcctgcagacggtcgagattgatctcggcgaagtcgagccggaagatgttgttgaagccgcgcttcggcagacggcgatgcatcggcatctggccgccttcgaaacccttgatgcggacacccgaacgcgcggtctggcccttgccgccgcgacccgaggtcttgcccttgccggaaccgatgccacggccgacacgcatgcgcttcttgcgcgagccggcgttgtcggcgatatcgctgagcttcatcgcccttctccttatctctgcttactcgccgacgacgcggacgagatgctgaaccttgctgatcatgccgcgaacttcaggggtgtcctgcagctcggcaacccggccgatcttgttgagcttgaggccgatcagcgtcgaacgctgcgagtgatggcggcggattgcgctgccggtctgctcgaccttgatcgtcttgctggccttggccatcgtcttgaactccagaaagcgctggtcgcgcgggttattccgccaccacttcggcatcgccgccgacgcggcgcgactgcagggtggagaccttgatgttgcggcgggcggccaccgagcgcggcgaatcctgatgcttcagcgcgtcgaaggtcgcgcgaaccatgttgtagggattcgacgagccgatcgacttcgccaccacgtcctggatgccgagcgtctcgaacaccgcgcgcatcgggccgccggcgatgatgccggtacccgccggagcggtacgcagatagacgcggccggcgccgtgacgaccggcgacgtcgtgatgcagcgtgcggccttcgcgcagcgcgacgcgggtcaggttgcgcttcgccgactcggtcgccttgcggatcgcctcgggcacttcgcgcgccttgccgtggccgaacccgacccggcccttctgatcgccgatcacgaccagcgccgcaaagccgaagcgcttgccgcccttgacgaccttcgccacgcgattgatgtggacgagcttgtcgacgaactcgctgtcgcgctcctcgcgctccctgctccgttcgcgtccgccgcgttcgcgttcacctgccatggtgttttccaatctctaggaggcccgaagcctctttccttgtaatcgttcgattcgtttagaagctcaatccgccttcacgcgccgcatccgcgagcgccttgacgcgcccgtgatagatgtaggcgccgcgatcgaacacgacttccttgacacccttctgcgccgcgcgttccgccagcagcttgccgacggccttcgcagcatcgatgtcggcgccggtcttgccggcgtcgcgcatggtcttctccagcgacgaggcggaggcgagcgtctcgcccttctggtcgtcgatgacctgggcgtagatgtgcttggacgagcggaacaccgacagccgcggacggccgcctgccgagcggcgaagcgcaaggcgcacgcgctgcttgcgccgggcattcgtaaccttgagtgacatgaccggctccgttacttcttcttgccttccttgcggaagatgaattcgttggcgtacttcacgcccttgcccttgtagggctccggcggacggtaggcgcggatctccgcggcgacctggccgacgcgctgcggatcgttgccggtgatcgtgatctcggtcggcttcggcaccgcaatggtgatgccttccgggatcgcgtagaccacgtcgtggctgtagccgagcgcgagctgcaggttcttgccctgcatcgcggcgcggtaaccaacgccggtgatctcgagcttcttctcgaagcccttggtgacgccctcgacgaggttggcgacctgcgcgcgcgcggtgccgtacatcgcctgcgcgcggttggtcttgacgcgcggagcgaccttgacctggccgttctcgaacttcacctcgacgtcgtcatgcacgacgaactgaagcgcgcccttcggccccttcaccttcaccgtctggccctcgacagtcgccgtcacacccgacgggatcgtcaccggccgcttgccgatacgtgacatgctaaatccttcctcagaacaccgtgaagagaacttcgccgcccacattggcgtcgcgcgcctcgtggtcagccatgattcccttcggcgtcgacaacaccgaaatgccgagaccgttgttcacgcgcggcaggttcttcaccgaggcgtaaacgcggcggcccggcttcgacacccgctcgatctcgcggatgacgggctcgccgtcgaaatacttcagctcgatctcaagctcgctgcggcccgaggcatgctcgacgctggcgtaaccgcggatgtaaccctcggacttcagcacctcgagcacgttggcgcgcatcttcgagccggggctcgagaccttggacttcgaacgcatctgcgcgttgcggatgcgggtgatgagatcgctgatcggatcgtgcgtagacattgttccgaccctccccttaccagctcgacttcacgaggccgggaaccaggcccttggagccgagttcacgcagcgcgatgcgcgagagcttgttcttgcgatagttcgagcgcggacgcccggtcagctcgcaacggttgcggatgcgcgtcggcgacgagttgcgcggcatctcggcgagcttcagcgtcgccgcgaaacgctcttccatcggcttggtcttgtcggcgatgatcgccttcagcttctcgcggcgcgggccggcgttcttcgccatccgcttgcgccggttgttcttctcgactgaactcttctttgccatgcttggctcctgggtatccgcgtttgagtggctttggctcagctactcactgccggaacgggaaattgaaagcggtcaacaaggcacgcgcctcgtcgtcggtcttggcggtggtgcagaccgtgatgtccatgccacgcgcttccgagaccttgtcgaagtcgatctcggggaaaatgatgtgctccttgatgccgagcgaatagttgccgcggccgtcgaagctcttcgggttcaggccgcggaagtcgcggacgcgaggcagcgccacgttcaccaggcggtcgatgaactcgtacatatgggccttgcgcagcgtgaccttgcagccgatcggctggttctcacgcagcttgaaggtcgcgatcgcgatccgcgaataggtcacgatcgccttctggccggcgatctggctcagctcggcagcggcggtctcggccttcttgcggtcgttgacggaatcgcccacgcccatgttgagcacgaccttgtcgaggcgcggcacctgcatcacgttggcataaccgaacttctcggtcatcatgccgcggatcttcttgtcgtactccgcgcgcagacgcggcgtgtaagctgtatcagccatcgatctctgctcccgagctcttggcaacacgaaccttcttgccatcggcctgaatcttgaacccgatgcgggtcggctttccgtccttgccgacatacgcgacgttggacaggtcgatcggcatctccttggagatgatgccgccttcctgggcctgggtctgcttctggtgacgcttcaccatgttgatgccgcgaacgagagccttgttctcgtccggacgcacctcgaacacctcgccggtgcgacccttgtcgcggccggtgagcacgatcaccttgtcgcccttgcggatcttggcagccatcacagcacctccggcgcgagcgaaatgatcttcatgtggttcttggcgcgcagctcgcgcggcaccggcccgaagatacgggtgccgaccggctcggactgattgttgatcagcacggcggcgttgcgatcgaagcggatgaccgaaccgtcggcgcggcggatgtccttgcggacccggaccacgacggccttcatcacgtcgcccttcttcaccttgccacgcggaatggcttccttgatcgacacaacgataacgtcgcccacggtggcatagcggcgcttggaacctccaagaaccttgatgcacatgacacggcgtgcgccagaattatcggccacgtcgaggttggtctgcatctgaatcattgatgcacctcgtcctctttctgcgctttagcgcgctcaaaatttccctgaagtacttcggccaggccgaggtaatcaggccgttttcttgtgttcgccccggaccacggtccagcgcttcagcttcgagatcggcttcgattcctcgatccagaccatgtcgcccggcttgaactggttgttctcgtcgtgcgcgtggtagttcttggaacggcggatcgtcttcttgtagatcgggtgggtgaagcgtcgatcgacgcgcaccacgatggtcttggcttgcttgtcgctgacgaccacgccctgcagagtacgtttcggcataggcttgccccttacttcttcttcgcgcgcagctgcgcggcgatggtcttgatacgagcgatgtcgcggcgggcttcccgcatccgcgaggtgttctccagctgcccggtggcgcgctggaaacgcaggttgaagcgttccttcttcaggttcaggaccgcgtcttcccgctggtcgtcgctcatcgcgcgaatgtcttcaactttcatctcggccatggcgattactccgcaatgcgcgcaacgaagcgcgtcttgatcggcagcttggcggcggcaagcgacagcgcctccttggcggtctgcaccggcacgccgtcgatttcgaacatcacgcggcctggcttgatccggaccacccacaattccggggcacccttgccggagcccatgcggacttcggcgggcttcttcgacaccggcacgtccgggaacacgcggatccagacgcggccggcgcgcttcatgtgacgggtcagcgcgcggcgggcggcttcgatctgacgggcggtgacgcgctcaggctccatcgccttcaggccgaactggccgaacgccaacgtcgcgccagaggtcgcaacgccgtggatacggcccttatgcgccttccggaacttcgttttcttaggttgcatcatggctttaagccctcaaattcctgctttgcctcaagcggcgtcgcggcgcgaacgcggcgtgttgtcgccttccgccatcttcttgtcctgggccatcggatcgtgctcgaggatctcgcccttgaagatccagaccttgacgccgcaggtgccgaaggtcgtgaacgcggtggcgacgccgtagtcgacgtcggcgcgcagcgtgtgcagcggcacgcgaccttcgcgataccactccatgcgcgcgatttcggcgccgccgagacggcccgagcagttgatgcggatgccctcggcgccgagacgcatcgccgactgcacggcgcgcttcatggcgcggcggaacgcgacgcggcgctcgagctgctgggcgatcgattcagcgaccagggtcgcgtcgagctccggcttgcggatttcgacgatgttgatcacgacgtccgacgaggtgatgtcggcgaccttcttgcgcagcttgtcgatgtcggcgcccttcttgccgatcacgacacccggacgggccgagtggatcgtcacgcggcacttcttgtgcggacgctcgatcacgatgcgggcgacagccgcctgcttgagctccttgtgcaggatctcgcggatcttgacgtcctcgtgcaggagcttgccgtattcctgcttgccggcgaaccaacgggagtcccaggtccggttgatgccgagacgcagcccgattggattgatcttttgacccatcgtcttctcctgcgcccttcttaggcgcttgcctcggcctcgacctgacgaaccacgatggtcaggtgcgagaacggtttgaacacacggcccgaacggccacggccgcgcggagcaaaacgcttcatcacgatgccgttgccgacatgcgcctcggcaacgacgagatcgtcgacttcgaggtcatggttgttctcggcgttggcgatcgccgattccaggcacttcttgacgtcgaccgcgatccgcttgcgcgagaactgcaggtcggcgagcgcagcggacgccttgcggccgcggatcagctgcgccaccaggttgagcttctgcgggctgacgcgcagcatgcgggcgacggccttggcctcattgtccgcgaggctacgttcgcgctttggtttgctcatggtctaatcctcaagccttcttggctttcttgtcgcccgaatggccgtggaaggtccgggtcggcgagaactcgccgaacttgtggcccaccatttcctcgttgatcgccaccggcacatgcttctggccgttgtagacgccgaaggtcaggccgacgaactgcggcaggatggtggagcggcggctccagatcttgatgacgtcgtgacggccggacgcgcgggcggcatctgccttcttgagcagagaaccctcgacgaacgggcctttccagactgaacgaaccatgtccggcgttccttacttcttccgcttgtggcggctgaggagaatgaatttgttggtcgacttgttggtgcgggtcttcttgcccttggtcggcttgccccacggagtaaccgggtggcgaccgccggaggtacgaccttcaccaccgccgtgcggatggtcgatcgggttcatgacgacgccgcggttgtgcggacgccagccgagccagcgggtacgaccggccttgccgatcgagatgttcatgtgatccgggttggagacggcgccgatcgtgcctcggcaacggccgtgcaccagacgctgctcgcccgagttcagacggacgatcacgtagtcctggtcgcggccgacgatctgggcgtaggtgccggcggagcgcgccagctggccgcccttgccgatcttcagctcgatgttgtgcacgatcgtgccgaccggcatgttgccgagcggcatgacgttgcccggcttcacgtcgacgtagttgccggcgacgacggtgtcgcccgccgccagacgctgcggcgccaggatataggcgagctcgccgtcctggtacttgatcagcgcgatgaacgcggtgcggttcggatcgtactcgagccgctccacgaccgccggcatgtccaccttgtcgcggcggaagtcgacggtgcggtaggccttcttgtggccgccgccgcggaaacgcacggtgatgcggccggtgttgttgcgaccgccattgccgagcttgccctcggtcagggtcttcaccggcttgcccttgtagagcgccgaacgatcgaccatgaccagctggcgctggcccggcgtcgtgggattgtaggttttcaatgccatcgtcgttgcgccttatagtccggtagtcacgtcgatgcggtggccctcttccagggtcacgatcgcgcgcttggtgtccgactgcgagccgagattgccgcggaacaccttggtcttgcccttgcggacgagcgtgttgacgctcttcaccttgacgtcgaacagcttctcgaccgcttccttgatctgcggcttggtcgccttgccggcgaccttgaacagcaccttgttgtgctcggaggcgagcgtcgccttttccgtcacgaccggcgagatgatgacgtcgtagtggcgcggatcgatgttcttcatttgaagcgcgcctccagcgcatcaaccgcagccttggtcagcaccagcttgtggcggcggagaatgtcgtagacgttgatgccctggatcggcagcacgtcgatgttcgggatgttgcgggccgcagtcgcgaaaccgttgttcagctcggcgccgtcgatgatcagcgcattggtcaggccaaggcccgagaagtgaccgagcagcgccttggtcttggcggcctcgagctgcgcattgtcgatcacgatcagcccgccgtccttggccttggccgacagcgcatgcttcagcgcgagcgcacgcaccttcttcggcaggtcggtcgcatgggagcgaaccaccggaccgaacgcacggccaccgccgcggaactgcggcacgcgggccgagccgtgacgggcgccgccggtgcccttctgcttgtacatcttcttgccggtgcgccagacatcggcgcggccctgggccttgtgggtgccggcctgacgcttgttcagctgccactgcacgcagcgctggatgatgtccttgcgcggctcgagaccgaagatctcgtccgagagctggaccgagccagcttccttgccttcaagggtggtgactttcagttccatctcacacaccctccttctcggccgaagcctcgagagcctcaccgccggcaaccttgaacttgccgggcttcggggcttccttcggcagcggcttcttgaccgcgtcgcgcaccgagatccagccgcccttggagccgggaacggcgccttcgacgaggatcaggccgcgctcaacgtcggtctgcaccacgcgcagattgagcgtggtgatgcggtcgacacccatatgaccgggcatcttcttgttcttgaacgtcttgccgggatcctgacgaccgccggtcgaaccgatcgaacggtgcgagatcgacacaccgtgggtggcgcgcagaccgccgaaattccagcgcttcatgccgccggcgaaacccttaccgatcgaggtgccggtcacgtcgacgaactggccgaccacgaaatggtccgcctggatttccgcgccgaccgggatcagcgcatcctcggacacgcggaactcggcgaccttgcgcttcggctcgaccttggcgaccgcgaactggccgcgttcggccttgggcatgtacacggtcttgcgggcgcccgagccgagctgaagcgcgacatagccgttcttctcggtcgtgcggtggcccagcacctggcagttgcccaacttcagcacggtcacagggatatgttcgccggtctccgtaaagacccgcgtcatcccgaccttctgtgcgatcactccggagcgcatcggcgtgcttcctgtctttctgtccgcaagcggcggacgtaaaaatccaaaaccttagagcttgatctcgacgtcgacaccggcggccaggtcgagcttcatcagcgcatcgacggtctgcggggtcgggtcgacaatgtcgaggaggcgcttgtgagtgcgcatctcgaattgctcgcggctcttcttgtcaacgtgcggcgaacggttgacggtgaacttctcgatgcgggtcggcagcggaatcggtccgcgaacctgcgcaccggtgcgcttcgccgtgttcacgatctcgcgggtcgacgtatcgaggattcgatggtcgaacgccttgagacggatgcgaatattttggccgttcattgccgtattctttctttagtgagtggcgagtagcgaatagcgaatggtgacccacccgctactcgccattccctatcgcatacttactcgatgatcgcggcgacgacgccggcgccgacggtgcggccgccttcgcggatcgcgaagcgcagcttctcttccatcgcgatcggcacgatcaggtgcacttccatcgcgatgttgtcgcccggcatcaccatctcggtgccttccggcaggtgcacgacaccggtcacgtcggtggtgcggaagtagaactgcggacggtagttggtgaagaacggggtgtgacgaccgccctcttccttggtgaggatgtaggcctcagccttgaacttggtgtgcggcttgaccgaaccgggcttgcacagcacctggccacgctcgacttcctcgcgcttggtgccgcggagcagcgcaccgatgttgtcgccggcctggccctgatcgagcagcttgcggaacatttcgacgccggtgacgatggtcttctgggtgtcgcggataccgacgatttcgatttcctcgccgaccttgatcacgccgcgctcgacacggccggtgacgacggtgccgcggcccgagatcgagaacacgtcttcgaccggcatcaggaacggctggtcgatcggacgctccggctgcgggatgtactcgtcgacattgcgcatcagctcgaggatggcgtcgtggccgagcttcttgtccttgtcttcgagggcggcgagcgccgagcccttgatgatcggaatgtcatcgcccgggaattcgtacttcgagagcagttcgcgaacttccatctcgacgagctcgagcagctccggatcgtcgaccatgtcgcacttgttgaggaacacgacgagcgcgggaacgccgacctggcgggcgagcaggatgtgctcgcgggtctgcggcatcgggccgtcggcagccgacacgaccaggatcgcgccgtccatctgggcggcgccggtgatcatgttcttcacgtagtcggcgtggccggggcagtcgacgtgagcgtagtggcggttctgcgtctcgtactcgacgtgagcggtcgagatcgtgatgccgcgcgccttctcttccggcgccttgtcgatctggtcgtaggcggtgaacgtcgcgccgccggtttctgcgagcaccttggtgatcgctgcggtcagcgaggtcttgccatggtcgacgtgaccgatggtgccgatgttgcagtggggcttgttacgttcgaatttagctttggccatttgactctccgttcaatcgttgactgccgtcaacgacaatcaggcaaacttcttctggacttcagccgacacgttcgccggagcttcggcgtagtgatcgaactgcatggtgaaggtcgcgcgaccctggctcatcgagcgcaggttgttcacgtaaccgaacatgttcatgagcggcaccatcgcgttgatgacgttggcgttgccgcgcatgtcttggccctggatctggccgcgccgggaattcaggtcgccgatgaccgaaccggtgtagtcttccggggtcaccacctcgaccttcatgatcggctcgagcagaacggacttgcccatctgcagcgcctcgcggaagcaggcgcgcgtggcgatttcgaaggccagcgccgacgagtcgacgtcgtgatacttgccgtcgatcagctgcaccttgacgtcgacgatcgggaagcccgcgaccacgccggaggacagcacgctctcgaggcccttttcgacgcctgggatgtactccttcggcaccgcgccgccgacgatcttcgattcgaactcgtagcccttcccggcttcgttcggctcgacgatgatcgtcacggccgcgaactggccggtaccgccggtctgcttcttgtgggtgtagctgtgctcgacccgcttggtgacacgctcacggaacgccacctgcggcgcgccgatgttggcgtcgaccttgtaggtgcgcttgaggatgtcgaccttgatgtcgagatgcagttcgcccatgcccttgaggatggtctggccggactcgtggtcggtcgacacgcggaaggacggatcctccgcggcgagcttggccagcgccacgcccagcttttcctggtctgccttcgacttcggctcgatcgcgatctcgatcaccggctccgggaattccatcttctcgaggatgaccggcttgttgggatcgcacagcgtgtcgccggtgcgcgcttccttcaggccagccagcgcgacgatgtcgccggcataggcttccttgatgtcttcgcggttgttcgcatgcatcagcagcatgcggccgatacgctctttcttctcgcgggtcgagttgacgacaccggtgcccgactgcagcacgccggaatagatgcggcagaaggtgatggtgccgacgaaagggtcgtccatgatcttgaacgcgagcagagccagcggctccttgtcgtccgccttgcgcacgacctcgttgccgtcctcatcggtgcccttgatcgcgggcacgtcgatcggcgacgggaggtagtcgacgacggcgtcgagcagcggctgcacgcccttgttcttgaacgccgagccgcacagcaccggatagaaggcgccggtcagcaccgccttgcggatcaggcgcttcagggtcgcctcgtccggctccttgccgtcgaggaacgcagcgagagcgtcgtcgtcgagctcgacggcggcttccaccatcttctcgcgatattccttggcctgctcgaccagatcttccgggatgtcgacatagtcgaacttggcgccgagcgattcatcgttccagatgacgcccttcatcttcacgaggtcgacgaggcccttgaagttgttctcggcgccgatcggaagctggatcgcgatcggcttggcgccgaggcggtcgacgatgtcggccagacacttgaagaagtcggcaccggtcttgtccatcttgttggcgaagacgatgcgcggaaccttgtacttgtcgccctggcgccagacggtctcggtctgcggctcgacgccctggttggagtcgagcacgcaaacggcgccgtcgagcacgcgcagcgaacgctcgacttcgatggtgaagtcgacgtggccgggggtgtcgatgatgttcaggcgcttgccgttccagaacgcggtggtcgcagccgaggtgatcgtgatgccacgctcctgctcctgctccatccagtccatcgtcgcggcaccctcgtgcacttcgccgatcttgtggctcttgccggtgtaatacaggatgcgttcggtggtcgtggtcttgccggcgtcgatatgcgccatgataccgaagttgcggtagtcctcgatggcatgttggcggggcatgagactgttccttagattccgttgatcgccttaccagcgatagtgcgagaaggcgcggttggcttccgccatccggtgtacgtcttcacgcttcttgaccgcgttgccgcggttgttcgaggcgtcgagcagctccgccgacagacgctccgtcatggtcttctcgttgcgctcacgagcggccgagatcagccagcggatgcccagcgcctgacggcgcaccgagcggacttccaccggcacctggtaggtcgcgccgccgacgcggcgggagcgaacctcgatggtcggcatcacgttctcgagcgcctgctcgaacacgccgagcgggggctgcttggtcttggcctcgatcatgccgagcgcaccgtaaacgatgttttcggcgaccgacttcttcccggcgtacatcaccgagttcatgaacttcgtaatgatgatgttcccgaacttgggatccggaagaacttcacgcttctcggcagaatggcgacgcgacatctgatcgtttcctgcttacttcggacgcttcgcgccgtacttcgaacgacgctgcttacggttcttgacgccctgggtatccagcacgccgcggaggatgtggtagcgcacgccgggcaagtccttgacgcgaccgccgcggatcatgaccaccgagtgctcctgcaggttatggccctcacccgggatgtagccgatcacctcgaagccgttggtcaggcgcaccttggcgaccttacgaagcgccgagttcggcttcttcggggtcgtggtgtagacgcgcgtgcacacgccgcgcttctgcggcgactgctgcagcgccggcaccttcttacgcgacttctgcacttcacgcggatttgcgatcagctggttgatcgtcggcatgcagccttcaccctttagttcacgcgagaaccttgaatggctccgcaaatttcttctcgggactagccgccccgcacggcccgctcgacgcgaatcaaatacccgcgcaaagcgaaatcgcgccaaccactcatcgctgagcggaaagcgcttcgacgccacagaggaccgcgattccgagccgttcagcgttcgctgtccggcccgccaccgaggtcatgcatccgaattcactctcaagaggacgagctcaagagaaccaaaatcgtcctggcattgcctagctatcatcgacagcgtttgagcggcattcgtcgaggttggtgcccgtccggcgcctgaaaaagggccttcgggtgttccgttccgacgctggcgtagctcaccgcctgtcgttaagtgggcgccttgtataatcgagagatgatgaagtcaagcaaaacgataagcgaagaaacgcctctggcacttgcggattttgcatttcgccgatgctcttcgggcgatgaattgtgacaacgttcacgccttccctcgctccaatccgaatctcccgcacatcgtcgcggccatattatatccgggtaaaatatgaatagaaacaattctccacaacttaggcctgaaggcgaatttcgaaactaagcctttatttgccattagcagcgcaaaaatcgcgatctacggccacggaatctctcatgcgatacaccgacatcgcgatcatcggcggaggtcttgcgggctcgaccgcagccgccatgctcggccgtgccggggttccgaccgtcttgatcgacccccatcaggtttatccgttcgatttccgcgtcgagaagatcggcggcgacctccagctcgagcgattcgccagaaccggccttgccgaatccgtgctccgctcggcgacgctggacggcgagaactggatcgcgcgattcggccatctgctcgaccggcagccgagccggcaatacggcatcatgtatgacgcgctgatcaccgcggttcgggacgagatcgcgcggccggcggaattcatctgcgacaaggtcgtcaatatcgcgaccagctccgagcggcagcggctcgtcctctcgggcggcgaagagatctcggcgcgcctcgtggtgctcgccaacgggctgaatgtcgggctgcgccggatgctcggcatcgagcggctggtcaccagcttctgccactcgatctcgctgggcttcgatttcgtccccgtcggccgtcccgccttcccgttcgcggccatgacctatttctcggagcggccgagcgaccgtatcccctacatcacgctgtttccgatcggaaaccggatgcgcgccaacctgttcacctaccgccaggccgacgatccgtggctgcgcgcgatgcggcgcaacccggtcgagacgctgaacgccgcgctgccgcggctgcgccggctcaccggcgaattcagcgtcgccggcgacatcaagatccggcccgccgacatctatgtcagcaccggctatcggcaggccggcgtcgtgctggtcggtgatgccttcgccagcacctgccccgtcagcgggaccgggaccgacaaggtgttcaccgacgtgtcccagctctgcaacgtccacatcccggcctggcttgcgaccgacggcatgggcgaggagaagatcaccgcgttctacgacgatccggtcaagacggaatgcgacgcctggtcgaacgccaaggccttcaacttccgcgaggtgtcgatcgggagcggaccctactggcaggcccagcgctgggcgcgcttcctcagctatctcggccggggctcgctgcgccggctgcaacgcccgcaggcggtcgcggcgacacggacgggcaatcagttccggcaacgtccacaggcggcggaccgggcctaaagcatgatccggaaaagtgcgaagcggttttccgaaaagatcatgctcagacaacaagctaaagcgcgatgatgattcaatctaatctcatcgcgctttagcggccggacgtcatcggcgacgaggtgccggcgtcacgcctcctcgtcttcgccctcatcctcatcgtcctcatcgtcttcatcatcatcgtccgtgtcgtcgtcttcgtcgtccgcgtcatgatgcacatgtccctggtcgtcccacagcttgcggtagacgccattcttggccagcagttcctcgtgcgagccgcgctcgatcgcccggccacccgagatcacgatgatctcgtccatctcgaccaccgaggtcaggcggtgcgtcgaccagatcatggtgcggccctcggcgaccttgagcagcgtgcggttgatcgcggcctccgtggtctggtctagcgccgaggtcgcctcgtcgagcagcagcacggacggattgcggatgatcgcgcgcgcgatcgcgatgcgctggcgctggccgcccgacagcgtgtcgccgcgctcgccgaccggcgtgtcgtagcgctgcggcaggctcatgatgtagcgatggatctcggccttcttcgcggcgtcctcgacctccgcgtcggtggccccttccttgccgagccggatgttctcgcggatcgacatgttgaacagcatgttctcctggaacacgaccgccatgctggcccgcagcgactcgcgcgtcacccggcggatatcgacgccgtcgatggcgacgcggccctcgtccggcacgtagagccgcaggatcaggttgatcagcgtgctcttgccggagccgctcggaccgacgatcgcgatgctcttgccggcattgagcttgaggctaagattgtccagcaccggcgtctgcgccccgtcatactggaaggtcacgcgctcgaacgagatgtcgttggtgatgcgcggcagatccggcgcgccgggacggtcggcgccgcgggtcggctcatcgagcagttcctggatgtgccgcaccgccgccgcagacgagatcgacaccggaatgaaatgcatcaaatgggcgatgttgtaggacacctcccagaatgcgctctcgaaggtcacgaaggtgccgaccgtgatctgccccttggtggcgagataggcgccgatcgccagcaccacgaggtggagcagcagcaccgcgatggtgacggtgcgctccaccatggtcgacaggaacatggccgacgcggccttggcgcggacgtcgcggttgcgcagcgtgaaccagcccagcgcccggcgctgcagattgaacgccttcaccaccgcctgggcagcgacattctcctgcacggttccgagcagcgcggcttcgttctgcttctgctcgtaattggcctgcaccgccttcggcgtcaggatgcgcggcccgatcagcgtgatcggaaacaccagcagggcgaccgcggccagttgccagttcaggaacagcatcaggatgatgccggcgatcaactcgaagaacggcaacgccgcgctgttggcgaaggtcttgaccgagccctcgaaggccgacagatcgatcgagaagcgcgacaagatctcgccgcgcttggtgcgggcgaaataggctgacggcaggttctggacgtgctcgaagattcgggtccggacgtcggcgataacgccggcggcaagccgcgcatcccagcgctcgtaccagaccgcgatgatcgaggtgacgatgccggccaccgcgagcacaccgaggatcttgtagagcgcctggaaatcctcctcgccgagcgcgtcgtcgatcaggaatttcaggctgagcggcatgatgacgttgaacaacgtctcgaccaccaccccgaaggtgacgaaggccagcggcttccggtagttcgccaggatcggcttgacgaagccgaaaatcgtcgacagcgcgccggcggcttccttggcggtgaagacgacgagatcctcgtcatcatcgtcgtcatcgagctcgaactcgtcgtcctcgtcgtcgtcttcttcgtcagccggcggcgcagcgggtttcgcggaggctggcgtcgcggcggaaccggcaacgggcgcgggcttcttcttcagctcgggatcgtcgggcgccgatctcgtcggatcgtctgatccaggaggtcttgatgcaggaggtcttggcgccatgaaaccaaccgatgctccacggccggcatgaccgcaaatcgaaaccgcagctgacgacgctgcagctgcaatcctatgcgatcaagatgaattcggcaaagcgtttggaaccgcacgacgcgcggtcacgccgccgagtggattcgggatcacggcacggccgccgcttgacggctggtcggcgcaaggccgatcgccttgcgtcagaagtcgactgttgccgccgctagtcgtcgaggtcggcgtcgaccttgtcgaagaaggaataacgcaggctgtcggagtcggcgtaccactgccccggccccttgttggcggcgagcgtcagcgtccacagcgcatcggtgcagtcgcggcggtgcatggacaggtcgaagccgttgccgaagaacagttccgaccactcccaccaggtgccgagcttcttcacgccgcgcagcaggtcgtagcgatcgatcaccgccggcgccatgtccgaggtcaccgacgcgaacacgacgccggtcttgaccacccgattgagctcgcgcaccccgcgcacgacctgcttctcgccgagatggcacagcgaggtctcgaacacgaagtcgaactcttcgtccttgaacggcatgtcggcgatcgagccgagcttgttgtacttcttgagtgccttcggcgtcttgccgtggatgtagcggttgttctcgatgccccaggcgtcgatgccgcgctcgcgcagcgccccgaccagctcgccgctggcggagccggcgatcagcagcttgtagcccttcgccctgccccagaccgtcttgatcaggtcggtcagataggccgggtcggtgaaggtgcgccagacttcgccgtaggggccgacgccgcggtaattgtcgaaatagccacgatcgatcttgtccgacagcgcgccttcgtcctgcgcgcgggcacggcgcagccgcatcatctcggtgacgacgatgtcggtcgcggcgtcggaggaatcgagcagcccgttcagggtcgaatcgaacagatagtcgcccaccaccacgatgccgggatgctccttcggctcggggcggtggttggtcatgacgtcacgcaccggcaggccgcccggcagcgcgttgaccgaggacagccagcggtggatcttgccttcgaggaaatgcgcgcgggcatcgccgagcgaggccggcagcgacttcagcgcggcgtcgatcagctcctcgtcgctgagattggcgtaggcgagcgcgtcggagccggcgatcagccagttcaacacgccgtgcttgccgacatcgtggcgcgcgccctcattgtagacgcagcagccgccgaacgcctccgacatgaaccaggcacccgggatcttctcaccccagaacggctcgtcgaacaggatcgagacgcgcagatagtgcgcaggacgatcgaaataggcgacgtgcttgaccatcgacttgcgcagctgctcgccgtcccagcgcatggtcgcaagccaggagtgcggcaggcagaccagcacgaggtcgaaatcgcgcgtctcgggccccttgccgttcatcatgttgagctggtagcggccttcggcggtcttgccgaccttgaggacgcgatggttgagctggatgtcggcactgacttccgagcgcaggcaatcgatcagctgctcgttgccgttctggatcgaatacaggccgatatagccgtcgacatccatcacgtagttcttcagcgcgttgaggccgttggtgttgtggctctcggtcgcaaggtcggagcgcgccatcaccttgaagaaccgcttggcggtcgcgtcctcgacctcctcgtcgaggatctgctcggcggtcttgtaggcccaggggtgttcgttgtcgtgggcgccgacgccctcgtaatactcgatcggcgacaccagctcggcgcaacgcttgcggaacgcctcgatcgcggctgcggtcttggcgccgtatttgcggcgcatgccgggaacatcggcgagcaactcgccgtcgagttgcacctgctcggcatccatcgggatcgtctgcaggccgaaatgctggatcagctcgcgcagcgggtcgggtccggtcatcgagtagtcgtagatctcggcaacgccggcctcgtacatcgcgggcgcgctgtcgaatttgcgcgtgacgatcttgccgccgaggcggttcgacgcctcgaagatggtgacgcggcagaggtcgccgagtttgcgcttcaaataccaggcgctcatcagccccccggggccgccgcctacgatagccaagtcgagcatatgaattccgtcgtctccggcactgtcaaacagccggtctaagtcaccctaacaaaggcacttttttgcctgaagggaagatgaacaaactgcgtccctgcaccgcagcaggagaagaaagcagcaaaaaggccggcagaacgccggccttctcgttgttaccgtagtcttgcggaggcctattccgccggcggcagcgccagcggctccgcttccggagccgtcggcacgatcgccgcctgctgcttctcgcgctcgtcgaggatcagcttgtcgcgcttgaccgcgacttcgcggatccgcgccatcgaggcgccggtgccggccgggatcaggcggccgacaatgacgttctccttgaggccctcgagcgggtcgatcttgccattgacggcagcctcggtgagcacgcgcgtggtctcctggaacgacgccgccgagaagaacgagcgggtctgcaagctcgccttggtgatgccgagcagaaccggcgtacccgtggcgggcttcttgccctcctccttggccttgacgttgagcgcgtcgaactcgatcttgtcgacctgctcgcccgagatcatgtcggtgtcgccctggtcggtgacctcgaccttctgcagcatctgacggacaatcacctcgatgtgcttgtcgttgatgagcacgccctgcaaccggtagacctcctggatttcgttgaccagataggcagcgagttcctcgatgcccttgatcgccaggatgtcgtgcggcgccggattgccttcgacgatgaaatcgcccttttcgacgatgtcgccgtcctgaagatggatgtgcttgcccttcgggatcaggtactcgcgcggctcctcggtcttgtccatcggctcgatcgagatgcggcgcttgttcttgtagtcgcggccgaagcggatcgttcccgcggtctccgcgatgatcgccgcatccttcggcttgcgagcctcgaacagttccgccacccgcggcagaccgccggtgatgtcacgcgtcttggcgctctcggtcgagatacgcgccaggatgtcgccgggcatcaccttggcgccgatgtcgaccgacagaatgccgtcgaccgacagcatgtagcgggcatcgccgccacgcgcgagcttcagcaccttgccgtccttgcccttgaccacgatggccggacgcaggtccgagccgccgcgcgtcgtgcgccagtcgatgaccacgcgcttggcaataccggtcgattcgtcgagcgtttccgagatcgactggccttcgaccagatcctcgaacccgatcgtgccctcgacttcggtgagcaccgggcgggtatagggatcccactccgcgatgcgctggccgcgcttgaccatgtcgccgtcgtcgacgtgcatcttcgaaccgtactgaatacggtgggttgcgcgctcggtgccgtcggcatcgacaatcgcaacgaccatgttgcgcaccatcgcgaccagattgccttcactgttgcgggcgatggccttgttccggatcacgatcttgccgtcgaagttcgattcgacgaacgactgctcgttgagctgcgcggcgccgccgatgtggaacgtgcgcatcgtcagctgcgtgccgggctcaccgatcgactgcgccgcgatgacgccgacggcctcaccgtggttgaccggggtgccgcgggccagatcgcggccgtagcacttggcgcagatgccgttgaccaactcgcaggtcagtgccgagcggatcttcacctcctggatgccggcctgctggatcaggtcgacgtggctctcctccatcaaggtgtcgcgcttgatgacgacctcgttggtggcgggatcacgcacgtcgtcgcaggccgtacggcccaggatgcgcgagccgagcgaggcgaccacggtgccggcgtcgacgatggcgcgcatcttgatgccgagcttggtgccgcaatcggtctgcgtgatgatgcagtcctgcgcgacgtcgaccaggcgacgcgtcaggtagcccgagttcgccgtcttcaacgcggtgtccgccagacccttgcgggcgccgtgcgtcgagttgaagtactcgagcaccgacagaccttccttgaagttggaaatgatcggcgtctcgatgatctcgcccgacggcttggccatcaggccgcgcatgccggcgagctggcgcatctgggccggcgaaccacgcgcaccggagtgcgccatcatgtagatcgagttgatgtcggcatccgcgcccgccgccgtcttcttggtcgacgagatctccttcatcatcgccttggcgacttcttcaccggccttcgaccaggcgtcgacgaccttgttgtacttctcgccatgggtgattaggccgtcattgtactgctgctcgaaatccttcgccagcgtacgggtctggtccacgatcttccacttcgacgccggcacgaccatgtcgtccttgccgaacgagatgcccgccttgaaggcgttgtagaagccgagtgccatgatgcggtcgcagaagatcacggtctccttctgaccgcagtgccggtagacctggtcgatcacgccggaaatctcgcgcttggtcatcagcttgttgatgatgtcgtacgagatcttggtgctcttcggcagcagattgccgagcatgacacggccggcggtggtctcgatccagcgcttggattgcttgccttcctcgtcgatgccttcccaccggtacttgatcttggtgtggaggtggatgaccttcgaatgcagcgcgtgctcgagctcggccatgtcgccgaagatcttgccctcgccgggcaggccttcgcgcatgatcgagacgtagtagaggccgagcacgatgtcctgcgacggtacgatgatcggctggccgttcgccggatgcaggatgttgttggtcgacatcatcagcacgcgcgcttccagctgcgcttcgagcgacagcggaacgtgcacggccatctggtcgccgtcgaagtcggcgttgaaggcggcgcagaccaacgggtgcagctggatcgccttgccctcgatcagcaccggctcgaacgcctggatgccgaggcgatgcagcgtcggcgcgcggttcagcagcaccggatgctcgcggatcacctcgtcgaggatatcccagacctccggacgctccttctcgaccagcttcttggcctgcttcaccgtggtggacaggcccttggcgtcgagccgcgagtagatgaacggcttgaacagttcgagcgccatcttcttcggcaggccgcactgatgcaggcgcagctcgggaccgaccacgatcaccgaacggcccgaatagtcgacgcgcttgccgagcaggttctggcggaaccggccctgcttacccttcagcatgtcggcgagcgacttcagcgggcgcttgttggcacccgtgatgacgcggccgcggcggccgttgtcgaacagcgcgtcgacggcctcctgcagcatgcgcttttcgttgcggatgatgatgtcgggcgcgcgcagctccatcagccgcttcagacggttgttgcggttgataacgcggcggtagaggtcgttgaggtccgaggtcgcgaaccggccgccgtcgagcggcaccagcggacgcaggtccggcggaatcaccggcaccaccgtcatgatcatccattccggcttgttgccggagacgcggaaggcctcgacgatcttcagacgcttggcgagcttcttgtgcttgatgtcggagtcggtctccgccatgtcggcgcgcagcgtcgcctcgagcttctcgagctcgagccccttcagcagctcgcggatcgcctcggcgccgatcatggcggtgaagctgtcctggccgtactcgtcctgcgccttcagatactcgtcttccgacagcagctgacggtccttcagcgcggtcagacccggctcgagcacgacgtagtattcgaagtacaggatccgctcgagatccttcagcgtcatgtcgagcaggaggccgatgcgcgacggcagcgacttcaggaaccagatgtgggcgaccggtgccgccagctcgatatggcccatgcgctcgcgccggacgcgcgacagcgtcacctcgaccgagcacttctcgcagatgatgcccttgtacttcatccgcttgtacttgccgcacaagcactcgtagtccttgatcggcccgaagatgcgcgcgcagaacaggccgtcacgctccggcttgaaggtacggtagttgatggtctcgggcttcttgatctcgccgtacgaccaggacagaatcttctccggagacgcgatcgaaatccgaatctggtcgaagacctgagccggcgtcgtcggattgaaaagattcataatctcttgattcatggtcttctcctcgcgtgccgatcgtcaccggcagcaaattcgaaagtttttgtcagcgcgcgccccgctcaacgtccgagaagggtgcgaaggcccggcgcggttcgcgccgggcataaatcacagcgttactcggccgcttccgacgtcggcgccggtcccaccttggaattgtgcagatcgacgttgaggccgagcgagcgcatttccttgaccagcacgttgaacgattccggaataccggcctcgaaggtgtcgtcgccgcgcacgatcgcctcgtacaccttggtacggccggcgacgtcgtccgacttcacggtcagcatctcctgcagcgtgtaggcggcgccgtaggcttccagcgcccagacctccatttcgccgaagcgctggccgccgaactgcgccttgccgcccagcggctgctgggtgacgagcgagtacggaccgatcgaacgcgcgtggatcttgtcgtccacgagatggtgcagcttgagcatgtagatgtagcccatcgtcaccttgcgatcgaacgcatcgccggttcggccgtcatagacggtcgactggccggaggcgtcgaagcccgcgagcttcagcatctcctcgatgtccgcttccttggcgccgtcgaacaccggcgttgcgatcggcacgccgtggctgaggttgcggccaagctcgagcagctcgttgtcgttcagcgacttgatggtttcatcctcgccgtagatcttcttcagggtctcgcgcagcggcttgagatcctgcctctgataataggcgtcgatggtctggccgatgcgcttgccgaggccggcgcaggcccaaccgagatgcgtctcgaggatctggccgacgttcatgcgcgagggcacgccgagcgggttgagcacgatgtcggcatgcgtaccgtcctcgaggaacggcatgtcctcgatcggcacgatcttcgacaccacgcccttgttgccgtgacggccggccatcttgtcgccgggctggatcttgcgcttcaccgcgacgaagaccttgaccatcttcatcacgccgggcggcagctcgtcgccgcgctgcagcttctcgaccttgtcgaggaagcgctgttcgaggcccttcttcgactcgtcgtactgcttccgcatggcctcgatctcggccatcagcttgtcgttcggcgaggcgaacagccaccactgcgacttcggatactcgtcgagcaccgcgcgggtgatcttggtatccttcttgaagcccttggggccggcaatgccctggcggttctccaggagctcggcgaggcggttatagacgttgcggtccaggatcgcctgctcgtcgtcgcggtccttggccagacgctcgatctcctcgcgctcgatcgccagcgcacgctcgtccttgtcgacgccgtggcggttgaacacgcggacttccacgatggtgccctgcacgcccggaggcacgcgcagcgaggtatcgcggacgtcggaggccttctcgccgaagatggcgcggagcagcttctcttccggcgtcatcgggctctcgcccttcggcgtgatcttgccgaccaggatgtcgccggcgcggacttccgcaccgatgtagacgatgccggcttcgtcgaggttcttcagcgcttcttccgagacgttcggaatgtcgcgggtgatttcctcagggccgagcttggtgtcgcgagccatcacctcgaattcttcaatatgaattgaggtaaacacgtcgtccttcacgatccgctcggagagcaggatcgagtcttcgaagttgtagccgttccacggcatgaacgcgaccagcacgttgcggccgagcgcgagctcgccgagatcggtcgacggaccgtcagcgatgatgtcgcccttcttgacgatgtcgccgaccttcaccagcggacgctggttgatgcaggtcgactggttcgagcgctggtacttcatcagccggtagatatcgacgcccgacttggtcggatcgagatcctcggtggcgcggatcacgacgcgggtggcgtcgatctggtcgatcacgcccgaacggcgggctgcgatcgcagcaccggagtcacgggcgaccacgccttccatgccggtgccgacgaacggcgcctcggcacgaaccagcggcaccgcctggcgctgcatgttcgagcccatcagcgcgcggttggcgtcgtcgttctcgaggaacgggatcagcgccgcggcgaccgaaaccagctgcttcggcgacacgtccatgtagtcgaccttgtccggcgtcaccggcagcacttcgccggcatgacggcagaccaccagatcgtcggtgaagcggcccttggcatcgagcggcacgttggcctgcgcgacgcggtagcggccctcttccatcgccgacagatagaccacctcatcggtgacccggccgtccttgatcttgcgatagggcgtctcgacgaagccgtatttgttgacgcgcgcgaacgtcgccagcgagttgatcaggccgatgttcggaccttccggcgtctcgatcgggcagatccggccgtaatgcgtcggatgcacgtcgcggacttcgaagccggcacgctcgcgggtcagaccacccgggccgagcgccgacaggcgccgcttgtgggtgatctccgacagcgggttggtctggtccatgaactgcgacagctgcgaggaaccgaagaactcgcgcaccgcggcagccgcgggcttggcgttgatcagatcctgcggcatcacggtgtcgatatcgacgctcgacatgcgctccttgatggcgcgctccatgcggagcaggccgatccggtactggttctccatgagctcgccgaccgagcgcacccggcggttgccgaggtggtcgatgtcgtcgatctcgcccttgccgtcgcgcaggtcgaccagcgtcttgatgaccgccaggatgtcttccttgcgcagcgtgcgatgggtgtcgggcgcatcgagctcgaggcgcatgttcatcttgacgcggccgaccgcggacaggtcgtagcgttctgcatcgaagaacagcgactggaacatcgcctgcgccgaatccagcgtcggcggctcgcccggacgcatcacgcggtagatgtcgaacagcgcgtcctcacgcgtcatattcttgtcggccgacagcgtgttgcggatgtaggcgccgacattgacgtggtcgatgtcgagcagcggcaggtccttgtagccctgctcgttcagcaccttcatcgacttctcggtgatctcctcgccggcttcggcgtagatttcaccggtcttcgggttgacgagatcctcggcgagatagttgccgaccagctcctcgtccgacatgcgcagggccttgaggcccttctcctgcagctggcgcgcctggcgcacggtcagcttcttgccggcctcgagcaccaccttgccggtgtcggcgtcgatcaggtcgttgacggtcgaatagccgcggaaacggttggcgtcgaacggcacgcgccagccttccttggtccgcttgtaggtgatcttcttgtagaaggtcgacaggatctgctcgccgtcgagaccgagcgcgtacatcagcgaggtcaccggcagcttgcggcggcggtcgatgcgcgcgaacacgatgtccttggcgtcgaactcgatgtcgagccaggaaccgcgatacggaatcacgcgcgcggcaaacagcagcttgccggacgaatgggtcttgcccttgtcgtggtcgaagaacacgccgggcgaacggtgcatctgcgagacgatgacgcgctcggtgccgttgacgacgaaggtgccgttcatcgtcatgagcgggatgtcgcccatgtagacgtcctgctccttgatgtccttcaccgacttggcgccggtttcctcgtcgatatcgaacacgatgaggcgcagcgtcaccttgagcggcgcagcgaaggtcatgccgcgctggcggcactcgtcgacgtcatatttcggctgctcgaactcatagcggacgaactcgagcatcgaggtgccggagaaatccgagatcgggaacaccgagcggaacaccgcctgcaggccctcgtcgaggcgaccgccggcgggctcgtcaaccatcaggaactggtcataggacgccttctgaacctcgatgaggttcggcatctcggcgacttccttgatgtgaccgaaaaacttgcgtacgcgtttgcgaccggtgaatgtctgctgcgccatcgtggcctctcattttcgtcgcctttgtggggcgaaccttccgggaacgactgccatcggccccgggttgaatttcgaatcgtctcgaaggaacgaagcgcaaagtcaggaattaaatcccggtcccggccccaaccaccttcaaaacgcaaaacaacgcgcggggcgcatcactgcacccgcccgtccaaacactccgctttacggactgaaaaagcccgaaatctgactgtctcccaacggcttccgccagggaccctgccgcccccgtcgcctaccgtgtttttccgctgccaacccgatatgggatggcaataaaggagattcgagggttaagtccacggatccccacacttttttgtgtccaacacgccacgcgacaacctgtcgcacgccgtttgcatggcccgggagcgccctgcggcgctcccggatcgcgcattacttgagctcgaccttggcgccagccttctcgagctgggccttgatcttgtctgcttcttccttgttgacgccttccttgacgggcttcggagcgccttcgacgaggtccttggcttccttcaggcccaggccggtgatggcgcggacttccttgatgacttcgatcttcttgtcgccggcagcagccagcacgacggtgaattcggtcttctcttcagccggagcagcggcagcaccaccagcagccggaccagccaccgcaacggcggcagcggcggacacgccccacttttcttcgaggagcttggcgagttcagccgcttcgagcacggtgaggctcgagaggtcgtcgacgattttctgcagatcagccattgttcagttccttaaacgtttggttcgaaccaggtttgagattagcgaaggggtcaggccgcttcgccctttgaggcatgagcctgaatgacgcgcgcgagcttggccgcaggcgcgttggagagctgagcaagcttggtcgccggcgccacgaggaggccaacgatcttgccgcgcagttcgtcgagcgacggcagtgaggcgagcgccttcacgctgtcgacattcaggacggttttacccatcgagccgccgaggatgacgaacttctcgttcgccttggcgaattcgatggcaacctttggcgccgcaaccggatcgttcgaagtagcgatcacggtcggccccttcagcagggagccgatggcagcgacgtcagtgccttcaagagcaattttggcgagacggttcttcgagaccttcaccgatgcgcccgcctgcttcatctgcatgcgcagcttctgcatctgggccacggtgaggccggaatagtgagcaacgatcgcaaccgacgtggtcttgaagacctcgttaagttgttcgaccgactctttttttgccgctcgttccacagcaagctctttccggttggcggcctttccgcgaaggcaggaccgccgggttgcacccatcgtcccgccctaaacctgatccggagggtccaagaccctcggacatgccgggcaagacgacatctagaagcctgccctcccagagccttacggccatgggctgtcgaggttcgaaccaaaccagccttccagccgcgaacatgccgcgacgtgaagcgcaaaatccggtcttcacccgtctatgcaggccatgcgattaagccgttgaaaacatgaagttctcgcgggcgcctgcagtcttggacaggatcgaggcacttcagcacgctgaagccccctgctctcactccgatccgaggcgacgggtccccttcctttcgagcatccttgcgggcatgcggaaaggaatgatctcctatcaactcaggttttcggaatgcgagcacagacatgccagcaagtgccagcacgcccggaaggcgctatgtagccggtcctgcctggcttgccaagagcaaatattggaccagtttcatatgacggacggggagccggctccggtcacggagccggtagctgctcaggtgccactcaccttatagggcagcggcgtaccggcaaagaacgcgtcgagattggcgagcacgcagtcctgcatcgcgacgtgcgattccagagtgtggccgccgagatgcggtgacagcaccacgttcggcagcgcggtcagcgcgtccggcgcatgcggctcctgggcaaacacgtcgaggccggcgccggcgatggttccgtcagtcagagccgcaaccagcgccttctcgtcgatgaccgagccgcgcgagatgttgacgacgtgcccgtcgccgccgagccgacgcaggatgtcggcgtcgatcacattgacattgtcggcgccggcgcggaccgcgatgacaagcacgctgcaccagtcggccagcgcctcgaggctcggcaggtactgatacggcaggtcatatttggtacggctgaaatagccgacctcggtctcgaaggccgcaacgcggctcgcgatcttgcggccgatctcgcccatgccgtagacgccgaccttgcggccgcgcatgccggcctgcggtcgcatcatcggcgacggttttgcaccggcccagtcgccgctgcggacataattgtcggcgaccggcagacgccgcaccgatgccagcatcaaggtcagcgcgatgtcggcgaccgaggccgcattggcgccggggctgtggccgacagcgatgccgcgcctggcggcggcggcgagatcgacgccgtcatagccggtgccgtagcagacgatcgcgccgagcttcggcagcatgtccatggcatcgccccggagcggcgtgccgcccgcggtgatcatggcgctgacgtcggcgagctcggccaccgggaacgcttcgtccagccgcttgcctgccgcgttgagcagctcatagcgctcgccgaagcggatcagctgggccttgggaaagcgtgaatagaccaggaccttatcgggcattgttcttgtttcctgcgagaggcttcacctggagccttttccattccaattgaagcggaacgcggctctcgattctcgttctgacgcgtttgctccgctcgaaaacgctccgggaaaaacaaagggcggaaccggttgcccgatcccgcccctctttatctcgtcacggccaaagatatcagccgaggatggtgcccggctcgaccttcacgcccgggcccatggtggaggaaaccgccacgcgctggatgtaggtgcccttggagcccgccggcttcgccttggagaccgcgtcggcgagcgccttgacgttctcgaccagcttgtcctcggagaacgaggccttgccgatgccggcctgcacgatgccggccttctcgacgcggaactcgaccgagccacccttggcgcccttcacggcgttggtgacgtccatggtcacggtgccgatcttcgggttcggcatcatgccgcgcggaccgagcaccttaccgaggcggccgaccagcggcatcatgtcgggggtcgcgatacaacgatcaaagtcgatcgcaccgccctgcaccttctcgaccaggtcttcggcgccgacgacgtcggcgccggcagccttggcttcctcagccttggcgccgcgcgcgaacacgccgacgcgcagcgtgcggccggtgccgttcggcaggttgacgacgccgcggaccatctggtcggcgtggcgcgggtcgacgccgagattgatcgcgatctcgatcgtctcgtcgaacttcgacttggcgcgctccttgaccatcttgatggcgtccgcgagcgggtagagcttctcgcgatcaacaccctcacgggccttcttcagacgctttccgattgtcatggcccgttaccccgcaacttccagacccatcgaacgggcagagccctcgaccatcttcatggccgattcaatggtatcgcaattcaagtccttcatcttcttctcggcgatctcgcgcacctgcgccttggtcaccttgccggccttgtcgcggcccggcgccttcgatccggactggatcttggcggcctgcttgaggaagtaggacatcggaggggtcttcatctcgaaggtgaaggaccggtccgcatagatcgtgatgatcaccgggatcggggtgttcttctcttccttctgggtctgcgcgttgaacgccttgcagaactccatgatgttcaggccgcgctgaccaagcgcggggccgatcgggggcgaaggattcgccgcaccggccgggacctgaagcttcaggtatccggtcactttctttgccatctatcactcctgttgtgccggacggggccggcggtttcaggttccgtggttcggttggaggggctggcgaccgcctcctccctcccacggcctcaattgacgcgagccatataccccgcgccgtccggtcagaccaccttttcgacctgaccgaattccagttccacgggcgttgcgcggccgaagatcgacaccgcgaccttcacgcgcgaacgcgcctcgtcgatttcttccaccacgccggagaacgaggcgaacgggccgtcggccacgcgcacattctcgccgatttcgaacgacaccgacgccttcggacgctccacgccctcctgcacctggtgcaggatccgcatcgcctcggcttccgagatcggcatcggcttgttttccgcgccgaggaagccggtgaccttcggcgtgttcttgatcagatggaacgcctcgtcggtcagcttcatcttcaccagcacatagcccgggaagaacttgcgttcggcgtcgatcttgcggccgcggcgcacctcggtgaccttctcggtcggcaccaggatctgctcgaacagctcttcgagcccgcgctgcttggcctgctcgcggatcgattcctgaaccttcttctcgaagttcgaataggcgtggacgatgtaccagcgcttgtccatcaattgggtgctcatcagtggatgcccagtatcagggtaatcagatagcggatgatttggtccgcggcgaagaagaagatcgaggccagcgccaccatcacgaacaccatgatggtggtgatggtcgtctcgcggcgcgtcggccaggtgaccttggcggtctccgagcgcacttcctgcaggaatttgaacgggctgaaagccatcgtgagatccgcgtccgtctccggacgattgcaacgtttcaaggaatccgaacagccgaccttgcggacccagccctcgtttggaaggttgagccgataaacgagctcgaatgttcggggaattaggccgcgccggatatccgccatcaaagcgggccgactgcgagtgccggggtatctactgcgagaggagccaaacgtcaaggtcggcaccgtcgcggcccgccccggccgcagctcggggaaaccgggactgagcccctcaattcaagcacttagcggggcgaccggcggttcgcctccccgccgtcggcggcggcggccgggtcgattacccggcaaagctcttctgaacagcctgatccagcgtggcgccgccgacatagcgctgccgcaactcgcgcttcagcagcttgccgctcgggttcttcggcagggcatccacgaagatgacccgcttcggcaccttgaaatgggccatcgacgccgcgcagtgcttgatgacggcgtcggcatcgaggtcctggccggccttgaccacgacgatcgcggtcacggcctcgatccagcgcgggtcgggcagcccgaccaccgcaacctccgacacctcgggcagccggtagatcatctcctcgacctcgcggcttgcgacgttctcgccgccgctcttgatcatgtccttcacccgatcgaccacggtgatgtagccactggcatcgacggtcgcgagatcgccggaatgaaaccagccgccggcaaacgccgccgcggtcttgaccggatcgttgtagtaaccggacaacagatgcggcgagcggtgcacgatctcgccgacctcccccaccccgacatcggtcatgtcagccttgaccacccgcgtctcgacattgatcgcgggcttgccggccgagccggccctcggcagctggtcctgcggtgcgagcaccgtcgcgagcggcgcgatctcggtttggccgtagaaattccagaacttcacgtcgggcagccggcgctgcaattcgagcagcacctcgaccggcatgatcgaggcgccgtaatagcccttgcgcagggtcgagagatcggtgcggtcgaacgacggcgaacgcagcatcgcgatccagatcgtcggcggcgcgaagaacgaattgatcttgtgcttcgcgatcagcgccaggacattgtcgggcaccggcttgccggtgatcagactggtggcgccgagatagatcgcgggccccaggaaaacgtcgagctgtgcgcaatgatagagcggcagcgcgtgcagcacggtgtcgtcggtcgccatgctgccgtcgatgatgcagctgacatattgccacatcacggcttcatgggtgaggatcgcgcctttcggctgcgactccgtgccgctggtgtagatgatctgcgcggggtcacggctgtccaccgctacgtccggcgccgacgcgtcgctgttcagcaggttgtcgaacgtcgtgattccgtctggcgcggtcgcgggatcttcaccgggcagccagatcagggtctcgacggccgagcccttggcggcggcggcgtgcgccgtgtccacgaaatcggggccgaccgcgagcagcttggcgccggaattggccaggatgaaattgatctcgtcgggattgagcatgaagttgatcggcaccaggatcgcgccgatccgcgccacggcgaagcgtagcgcggcgaagccgtgcgagttgcgcgacagcaccgcaacgcggtcgcccttcgcgatgccgaggccgagcaagccgcgtccgagccgattgcagatcgcgtccatctccgcaaaggtccagctcacctcgccgcagatcagcgcggtcttgccgggatagcgcttcgcggaccggcgcagcagatcgccaatgctgtgctcgcgggcgcgctggatggtcgctgcgatggtgtcgctcatgaagtccctcccgaacgtgttttttgtcgttgtctcgttgtcgccgcgccgtcgctattggcgtgcggcgtaggcgtgttccatgtaggtgtgctcgaccgagcgatcgagcgaggcgatcttctcgaagccgcgccgccagtcctgcaaatgccgccgggtccacagcacgccggcctccttatcgcgccgcctgatcgcatcgaggatgtggcgatgcgcctcgacgagccgcgcgccgccctcgggcacgccgccgacgatcatctcggtggtcggaaagaacagctgcgcggccggctcgcgggcgagttgcagcacgcggttctgcgaggccttggccatcagcacgtggaattccgcatccagctcggcgagctcggcgggattgccgacgacatcagagctgcgctcgagattgccggcgagctcggcgatgttctcctcggtcgcgcgctcgaccgcgccttcgacgctcgcgacctccagcgtcatcgacgcctcgaacagttcgcggaacgtgacctcgtgcaggatcaacgcacgcgacagtcgcgtggcgagcttgttgtagcgcggcaggcaggcctgcaggcggcgactggaatcgcggcggatcagcccgccctcctcgagcacgcgaatgccttcgcgcaccgtcgagcggttgacgccgaactgcgcgaccagctgctgctcggtgccgatcggctcgccgggtttgatccggccgttgatgatctcgcgctcgatcgcgtcggcgaccttctggtaggccggcgcgacgtcgatgcgtcggaacagtggtgtggcgggcaccttgggctcccgattgtcgtttgtcggacaaaggataggagaaggcgccaagagcgtcaaatgggccgttctaagccggattgtcgcacccggatggccagaattgacactggaaccgggcaaatctagctttgtcggacaaaccgataagaacatcctgggaggacgcatcaccatgaaatccatcgccacgagtctatccgccgccggcctgctcgccgcagtgctggcggggcccgcgctcgcacaacagacgccgctcaagatcggcgtgctgaccgatttccagtcggtctattccgacatcggcggcgccgggaatgtcgaggccaccaagatggcgatcgaggagttcggcggctcgatattcggcaagccgatcgagctcgtcaccgccgacgccctcaacaaggccaacgtcgccgccaccatcacccgcaaatggtacgaggccgagaatgtcgacatgatcatcgacatgccgacctcggcgaccgcgctcgccggcatggagatgtcgaagcagtttgagaagatcatgatcgtgacggacgcggcgagctccgacatcaccggaaaatcctgctcgccctacacgctgcactggacctacgacacctacgccaacgcccacaccgtcggcagcgcgatcgtgaagaacggcggcgacacctggttcttcatcaccgccgactatgtgttcggccattccatcgagcgcgacaccggcgacgtggtccgcgcggccggcggcaaggtgctcggcagcgcgcggcatccgctcaatacgccggacttctcctcattcctgctgcaggcgcagtcgtccaaggccaagatcgtcggcctcgccaatggcggcggcgacaccatcaacgcgatcaagcaggccgccgaattcggcatcgtcgcgggcgggcagaatctcgccggcatcgtgatgttcatctccgacatccacagcctcgggctgaagctcgcgcagggcctgatcatcaccgaggcctattactgggacctcaacgaccgcacccgcgccttcggcaagcgcttcttcgagcgcatgaagcggatgccgaccatgaaccaggccgcgacctacagcgccacactgcactacctcaacgcggtcaaggccgccggcaccaaggagaccaagcccgtgctggcgaagatgcgcgccactccagtgcgcgacgccttcaccgacaatggcgtggtgcgcgaggacggccgcatggtgcattcgatgttcctgttcgaggtcaagaaacccgaggaatcgaaggcgccgtgggattactacaaggtgctcgccgaggtacccggcgaccaggcattccggccgctcaaggacggtggctgcccgctgatcaagtaactgaaaatgatcatggccggggtccaggacctcggccaaggcattcaaattgttggctaaaagctggcaggagtggcagggctcgaacctgcgacccccggttttggagaccggtgctctaccaattgagctacactcctgcagggaaccggcgtcgccgccggttcgcgccgtttcaagcacagggcatggccggtttgcaagggcgaagcggcgaaccttctgttcattgcaaaacttctgcgccagacttcagccatcactccaagatcacctcattgccggcgctccgccgcaagaatcaagaaccagggagagaccatgaacgctcaaaccgccaccaagcactccgccacccagaccaccccgtccctcccgctcgccaaacccgaatcgatcggactgtcgggcgcgcggctgcaggcattgtccgacaccttcaagcgcgaggtcgacaagggaaccgcgcccggcttcacggtgctggtggcgcggcgcggccagatcggctggttcgacgcgatcggccggcagagcccgaccgccgcggcgccgatgacgcatgacacgatcttccgcatcttctcgatgaccaagccgatcgtctcggtcggtatcatgcagctgctggaggacggccacttcctgctcaacgaccccgtcgcgaaattcatccccgaattcgccgagaccaaggtcggcgtcgagcataacggcaagctcgagctggtccccgtgcagcggcagatgacgatccaggacctgctgcgccacacctccggcttgacgtatgaccacaccggcaacggcccggtgcaggagctctacaagcagtcgcggctgcgcagccgcaagatcaccaatgccgagcacgccaccatgctcgccgccatgccgctggtctgccagcccggcgccgagtggaactacagccgctccaccgacatcctcggccgcatcatcgaagtcgtcagcggcaagacgctcggcgcgttcctcactgagcgcatcctctcaccgctgcagatgaacgagaccgccttccataccccggaagccaatgccggccggctggccgaggcgtttgccaacgatccctggagcaacgagaaggtgcagctgttcaacatgctggagaagccggcgatggaatccggcggcggcggcctagtgtcgaccacgatggactatgcccgcttcgcgcagatgctgctcaatggcggatcgctcgacggcaccaggatcatcggccgcaagacgctcgaattcatggcctccgatcaccttggtgccggcgtcaagatccaaggcacgctggtgtcgccgggccacagtttcggcctcggcttcgccgtgcgtatgcagcagggcatcgcgccgttctccggctcggtcggccagtacttctggagcggcatggccggcacgttcttctggatcgatccgcacgaagacctgatcgcggtgttcatgatgcagggcccgggccagcgcgaatacacccgctcgctggtgcgcaacggagtgtatgcggctgtggagtgaggccatttgctgctcgagatcccgggttcgcgctaacgcgcgccccgggatgacgcttcgcgtcagctgatcgtcgcgccgccgtcgatcaccacggtctggccggtcatgaagtcaccggcgcgtgaacccatgaacacggcggcgcccgcgatctcgtccggcacgccgatgcgcagcagtggcgagcgcgcggtcgaggccttcagattgtccggattgtcccacagcgccttggcgaagtcggtcttgatcaggcccggcgcgatgcagttcacgcggatattgtgcttgccgtactcgcaggcgaggttgcgcgcgagctgcatgtcggcggccttcgagatcgcgtaggctccgaggatggtcgagcccttcaggccaccgatcgaggacacgatgatgatggagccatccttgcgctcaatcatctgcggcaccaccatcgagatcagccagttgttggcgacgatgttgttgtcgaggatcttgcggaactgatcgtcggagatgccggcgagcgggccatagtagggattggatgccgcgttgcagaccagcacatcgatcttgccgaaggcacggttgctctcgtccacgaggttctgcaggttttccttcgaggagatgttggctgcgatcgcgaccgcggtgcccttgccgtagctggtgttgatctccttggccacctcttcgcagacatcggccttgcgcgaggagatcacgaccttggcgccgtgctcggccatccgctcggcgatcgcgcgtccgatgccgcgcgtcgagccggtgatgacggcgacttttcccttcatgtcgaacaaggtcatggttctctccctgatgtaaggcgtttgaattctgcgttgagcttaggcagtggttgtgtgttgcgatagcgccatcacgcaagcttgctcgccggcctgacttccggtccggccggctgatgcatcgcggcgtgtcggggatcggcaatccacggctgctggttcaccatcggcagccgccaggtcgacaggccgacgcctgcgatgtgatcgagccgcgtcaccgagacgttatcgacgtcgaaggacaatccgcgatccggctggccgccgagtgcaaggccgaccgcggcgcggatcacgccgccatggccgaccgcgatgatgttcctgcccgcttccgcagccgtgatccgcacgatcgtgcggcagacccgcgtgtagagatccatgaaactctcgccgcccggcgcgggctcattgacgtcggcaaaccagctcctgccgggcggctggctcgcgagcagcgcggcgcggttcatgccctgccatcggccgagatgctgctcggcgaagtcgcgctcctgcgtcatgctggccggcttcggatagccggcggcccagatcgcctccgcggtcttgtgcgtgcgcttgagattgctcgaataccagacagcatcgcgcggcagcatcttggcgaccgcctcgaacacttcgacatcgccggtgtcgcagtcgatgtcctcctgcccgtagatgttgccgccgtcgctgcgtaccggcgcgtggcggacccaccaccagcgcgtcaccgtcacgacaggcctgtctggattggacatcggatgagcccttcaatagtgtcccgtcacgctgtacgtcacgccgcacatcgtctcaagtgcttctgacgtttgaaattttgtttgaattccgtcgcgcggcaggcgtgccacggatcatgtgaacagggagaaaaacgtgaccaagaacttgggccgcctcgaaggcaaatccgtcatcatcaccggcgcgggcagcggcatcggccgcgcggcctcgctgctgttcaccaaggaaggcgccaagctgatcgcagtcgatcgcaccgacggcgtcaacgagaccgccaagctggtgcgcgatgccggcggcacggtcgaagccgtcactgcggacgcaggatcggagagcgacgtgaaggcgttcatcgagaaggcggtttcgaagtacggcaagctcgatgcgatctgggccaatgccggcgtcagcggcggcctcgttccgctcgccgaccagactccggaacattggcaggaggtgctgcgcgtcaatctgatcggcccgttcctcgcgatcaagcattcgatcccgcacatgaccaagcagggcttcggctcgatcatccttaccgcatcggttgcgggcctgaaggccggcgccagcggacatccttacggcgcaagcaaggccggcgtcatcagcctggtgcagaccaccgcctactcgctctccggcaccggcgtgcgcgtcaacgcggtgtgcccgggcctgatcgagaccggcatgaccaagccggtgttcgaccgcgccaaggagcgcggcacccaggacaagatcggccagctcaatccgttgaagcgccccggccagccgcacgagctcgccgcgatgggactgtttttggcgagcgacgaagcgtcctatgtcaacggccaggccatccctgtcgacggcggcctgacggcgtcgatgccgtatacgggcaagccgatttagcaacgctgctcgcctttcgcggaacggcgaggtttgcgttggcgcgatgacgccgccacatccaccactgtcgtcccggcgaaggccgggacccataagccgcggcaggtgtggtggaaaggacacgtcgttccagcgtcgttcaacaatgaccatcggtggttgggtccctgctttcgcagggacgacgatgaggatgggttctcgattcatcgtctcgcatcgcgcggtgccatcacctcgcgaaagcgggtgatccaccccggcgcgccgaagcttcaacggaggcggcaagccgggcgatgacagctgaggatgtaacggtccgaatattgcctggcctcggcgcgcaaacgaactgttatagttccctggcaggatcgccccctcacccccctcgcaaacgaacaggccatgcaaaatcaacgacccgaccgtatccgcaagctgttggccgacctcgtcgcgttcgacaccgtcagcgaccgcagcaatttgccactgatcgattacatcgagcgctatctcgcttcgctcggcgtcagcggccagcgaatcgtggatgacaccgggcagaaatcctcgctgtgggtcacgatcggcccgcaagacaaggcaggcctggttctgtcggggcacaccgacgtcgtgccggtcgcgggacaggactggacccacaacccgtttgaattggtcgagcgcgacggaaagctgtacggccgcggcaccaccgacatgaagggctttgtcgcggtctgtctcgctatggtgccggagatggtcgaggtcaacctgaagacgccgatccatcttgcgatctcctatgacgaggaggtcggctgcgtcggtgtccgtccgatgctgcgcgaggtcgcgcgcaagagcgtgaagccgctcggctgcttcgtcggcgagccgacccggatgcaggtgatcatcggccacaagggcaagcacggcgtgcgcgccacgttccgcgggctcgcccgccactcctcgatcgcgcccgacggcgtcaacgcgatcgagtatgcggccgacctgatcaccgagattcgccgccgcgcggccttgctcgtggtggatgccgagcgagacagcctctacgacgtcccgcactcgaccctgctcaccagcatcgtccgcggcggcgccgcgctgaacatcgttcccgaccaatgcgtggtggaattcgaatgccgcggcatcgggatcaccgagtccagagaggtgacggacgcgatcgtcgcctgggccaaggccgaggtcgagccgaagatgcgcgcgcggtacccggactgcggcatcgatttcgaggaaatcctcgactatcccgcgctcgataccgccgccgacgccccgatcgtcacgctcgccaagcaattcgccggtcgcaacgaccacgccaaggtcgcgttcggcaccgaggccagcctgttcaccagcatggcggacgtgccgtcggtggtggtcggccccggcgggatcgcgcaggcgcatacgccggacgaattcgtcgaaatgtcgcagctcgaggcgtgcggggatttcgtcgcgcggctgatcgcgcattgcgcgaagtgaggctgccaattgtagggcggattagccgaagtgtaatccgccctacaagctattcacagcccatccggcggcaggcccggacctgtcgcggccgggcgaagcttgtcgcgcttgcgctcgcggtagaaggcgtagaggccggaggcgacgatgatcgtggcacccgcgagcatcgcgccgtcgggcttgtggccgaaggtgagatagcctgtcagcatcgcccatagcagcgcggtgtagcggaacggcgccaccgccgagatgtcgccggtgcgcagcgacacgatgatgcactgatagccgatcaggatcagcaccgcggcaaatgtaagcaggccgagcgcctggccggacggcggccgccagccgccgagcggcaccagcacggcggcgcccgcggtcgtcaccgtcacggtcgtcagcagcgtgatgaacacggtcggcaggtccttcgggatgcgccgggtggcgagatcgcgcaccgtgcagaagccgaccgacgccagcgccagcagcgcggcctggttgaagccttccgcgccgggccggacgatgaccagcacgccgatgaagccggccgcgatcgccagccagcgccgccagccgaccggctcgccgaacaccagcgcagcgcccagcgtgatgaccagcggcagcgcctggaagatcgccgaggcgttggcgagcgggatttgcgagatcgccgacagataggtcagcgtgccgccgatctcgccgatcacgcgcaagccgaccggccagatcaacagcgcgccgaaactgcgcagggcgtcgcggtaccaggctagtgccgcgaccagcaccatcgcgaccacgccgcggaccagcaagatctccccgatgttgagctccgccgacaccgccttggtgatggtgtcgttggccgtgaaggtggccatggcagcagccatgaacaggctgccgcgaagattcgaggaaaggggcaagatgaaattgtccgatcaggaccaggcgggcgttgaccggatggacttgccaaagcggcgctgcgaactcaaatcacagatggctacaatacggaaacatgccgcatctcgcagttgcggcgcgagccctgtgggatcgcgccgcgttctcagatcaggttgcgccggccttctgcgcgtattcccatgacgccttcgacaacggcacggtgcgcgcggctgactcgagggccttggcgttggcggccgtgccgtcgcggacgcggcccgcgatgccctgcgtgatgccggcgaggcggaacagattgtacgagaaataccagttgagatccggcacggccatgccggtgacgttgcaatagatctgcgcggcctcatcctggctcgggatgttcaatgccttgaggtcagcattggcgaggcccggcatggtccactgcatcaacagataggtgaagtcggccatgggatcgccgagcgtcgacaattcccagtccagcaccgcctgcacccgcggctcggtggcgtggaagatcatgttgtcgaggcgatagtcgccatgcacgaccgagacgcgcttctgctccggcaccgtcttcggcagccactcagcgagcttctcgaactcgggaatgtgctgcgtctcggacgcgcggtactgcttggtccagcgatcgacctgccgcgcaaaatagttgccgggcttgccgaaatcgccgaggccgatcttttccggatcgaggatgtgcagcttcgccagcgtctcgatcttgctggtgaagattttccgccgcgcgtccggctcctggctcggcaaggtcggatcccagaacacccgcccctcctccatcgacatgatgtagaaggccgagccgatcaccgcatcgtcggtgcacagcgcataggctttcgcgaccgggaaattctgcttgccgagcgccgcaatcacgcggaactctcgatcgaccgcatgggccgacggcaacagcttaccaaacggacggcggcgcatcacgtagttgcggccgggggtttcgagcttgtacgtcgggttggactggccgcccttgaactgcaggaccttgagcgggccctgatagccctcgacgtgttgcttcatccaggcatcgaggctcgcctcgttgacgcgatggcgctcctcgacttcccgtgttccggaaaattcttcgtctttcctgacgccgtccgccacgatgacgctccctcaactcggttttgttgggagcgccgtcggacgctcccaattgtctttttcattctgagcacgatgtacgcgggaacgccatgcgttccgcatcatgctcaatgcgacgtgtttgcatacttccgaacttcaagccttgcaatggcgcggttgtgcacctcgtccggaccgtcggcgagacggagcgttcggatgtgggcataggccttcgcgagcccggcgtcgtcggagacaccgccgccgccaaacgcctggatcgcttggtcgatgatcttcagcgccatattgggcgctgcgaccttgatcatcgcgatctcggcctgcgcggtcttgttgccgaccttgtccatcatgtcggcggccttgaggcacagcaggcgattcatctcgatgtcggtgcgggcctcgccgatgcgctgctcccagaccgaatgctcgatgatcttcttgccgaacgcggtgcgcgaggcgagccgcttcaccatcttctccagcgcttcctcggcctggccgatggtgcgcatgcagtgatggatacggcccgggccgagacggccctgcgcgatctcgaagccgcggccctcgccgagcaggatgttctccttcggcacgcggacgttctcgagcagcacctgggcatggccgtgcggcgcatcgtcgaagccgaacaccggcagcatcttctcgaccttgatgccgggggtgtcgagcggcaccaggatctgcgactgctgctggtgcttggcggcgttgaaatcggtcttgcccatcaggatcgcgaccttgcagcgcggatcgccgacaccggacgaccaccatttgcggccgttgatgacgtagtgatcgccatccttctcgatgcgggtttcgatgttggtggcgtcagacgaagccaccgcgggctcggtcatcaggaaggcggagcggatctcgccgtccatcagcgggcgcagccatttgcgcttctgctccttggtgccgtagcggataaacacttccatgttgccggtatcgggcgcggaacagttgaacacttccgacgcccaggagatgtggcccatctcctccgacagcagcgcgtattccaggttggtcagtcccgcgccgtggaactcgtcgtcctcatgcgaggacggcggcatgaacatgttccagaggccttcggccttcgccttcttcttcagatcctcgaggatcgggatcaccttccagcgcggaccttccgcgtcctgcttctcgtagatcggcaccgccgggcggacatgcgctttcatgaaggcctgaacgcgctcaagccactccttctgcctggccgacatcgtgaaatccatgggacgctcctcgtttcctagactttgggccgcactgtccacccggcgcccggacgccgcaagggcgttcgcgggaccggcgcggtggtgtgccagaatgccgcccgcgttgttgcggattgacattgccggctgttcaaacgatagtttcatacaaatgtttgaaaatcaactccccgtcgtcttcgtcattccccggcacaccgcggaataacggaaaggctctcagccatggccagcgaccagacccgatccgccattctcgccgccgccgagcggctctatgccgaccgcggcttcggcgacgtcacgctgcgcgacatcgtcgcggaggcgaacgtcaacctcgcggcggtgaactatcatttcggctccaaggacgaattgatcgcggagctgttcgtcacccgcagcatccagaccaaccgcgaacgcctcaacgaactgaaggccgccgaggaagccggcggcggccgcgccgcgatcgaggacatcatgcgcgccctcgtcggccccactctgcgcggctgcctcgggcccgatcgcgagggctcgaccgcggcgcgcttcatgatccgcgcctcgatcgaatccgtgccgccgatccgccgcatcaagaaccgcgaggtcgatcatctgcgcaagtttgccgccgcgatgcgccgcgcgatgcccggccgcgacgacaccgagctgtattggggcctgcacttcgcgctggcgatggcgcaccacaccatccgcgagaaggaacgcctgctgcggctgtcggaaggcaaatgcgacctcgacgacgtccgtgccatcatcgatcgcgtggtcacggtctcggtgatggcactgaccatgggcgacacgccgagcaagccggccgcgcggccggtcctggtgcacggccggctcacgcggcaggatctgtgagcggcggcgcaacggcgcggtctcaatcaatgaagtagaacggattgggcaccttgaaggtcatctcggcatgtccgccgaccagatcgctgttctggtcgccgacattggcaatgatgacaaatcccagcttgtcctcgatctcggtgcgcgccgcggtcttgtggatgctgaccgagccggtcgaagccggatcacgcatgtagagatgatcgcgcgcgatgccgtcgaagcccgcgagttgaagattgcgcagcgtccagacgctcgccatctcgtcgttgtgcgcctgctcgcgccgcccggtgacgaagaacacatcgaccttggtgcatgaggcagcctgctcgatgcagcgggcgagcttgtagagcgcaagtgtcgggccgatcgcggcggcccgcgcgctctgctgccagtcgaggtcgccgcagggatcgccgacctggacaaaatcgcagtgaccgccggggacgctcgggatgtaggcgtagtcgtcctggtagatgcgcggccagttgagcagcgaggtctcgtcgatatccaacacgatggccggacgctggacctcgccggcccgcgccgccacccatttccgcgccttgccgagcacctcggcgatatcgttctcataggcggtgcaacgataggccaagagccgccgcttgaagagatcgatattgtcgggctcacgcaggtcgagcggcggcgcggtgccggccttgtcgcagccgagccttggatcgaccggcgcgccggtctgggctgaagccgggttgccggcaagagcaatcatcgcaatgagagcatagagacaacgcagagcaatttgcagcatcggatcatctcccggtgaaaaccgggagaatacgatcacaagttgtacggatttacgacagacgcggggcgcggccgccctcgcccgcctcacaccatcgcgatgcagtcgatctcgatatcgaacggcccggtccattccggaatgcagacgaagatccgcgccggcagatcatccgcgaaatatttgcggtaaattgcgttgaaggtggcgaagtgcttcgccgaggtgcagaagatattgcacttcatcacattgtcgaacgaggcgccggcggcctccaggcactcccggagctgctccatgacgagctcgctctgccgctcgatcgaggccccggcggcgatctcgccggtcgcgggatcgaacggcggcaggccggagacgaagatcatgttgccggcgcgggttaccgccgacgccggcgccttccagcgctccagccagcttgagatcggttcgacgcggatcacttcccgtttcatgattggcaccttcgatagggggatcgatggcgccaatctagcaggcgggcgtcaatgatgcttcgatacaggtcgaagtgttgcagtaaatgcggaacccggctcagaccgtcatcctgagaggccgcaaagcggcagtctcgaagggtcgacggcccggccgttggccgtcgacccttcgagacgcgcttcgcgctcctcagcgtgacggaaaagagagcagcgggaaggctcttcgcgtggcttcgagcccctacagaatcccctgcgccttcagcccttcgaccttggcgtcgtcatagccgatggtcgccagcacgtccttggtgtcggcgccgagcagcggcggggcgcggtagtcggtgatcggggtgcccgagaaggtcagcgcgttgcggatcagcgacaggttcggctcgaaggggtgatcgaccttcacccgcatgccgcgcgactgcacgtgcgggtcgctgaacacctgctcgaaattgttgatcgggcctgacggcacgccggcctcctcgagcttttcgagccagtacgcgacggggtgcttcaggaacaggccggcgaagatcgccatgatctccttgccgtgcacgacgcggtcgttgttcttgacgaagcgcttgtcattggcgagctcgggttcgccgagcacggcgcaggtgcgctggaactggccgtcattgccgaccaccagcatcaattcgccgtcggtgcagcggaacacgccggccggcatgccgccattgccccaggtcccgcggcgcggcggggtcttgccgttgacgaggtagatctgcagccaatgcgacagcgaggcgatcacggtatcgaacaggcagacgtcgatatgctgcccttccccgttattggcgtcgcggtggtagagcgccgcgaggatcccgatcgaggtgttcattccggtcatgtagtcgacgatcgaggggccgaccttcatcgggccctcgcctggctcgccgtcgatatggccggtgacgctcatcaatccgcccatcgcctgcaggatcgcgtcgtagccggcgcgcggcgcgtagggtccggtctggccgaagccggtcaccgagcaatagatgatgccggggttgagctgcttgatggtctcgtagtcgaggccgtagcgcttgaggtcgccgaccttgtagttctccatcatcacgtcggccgatttggcgagctcgcggatgatcgcctgcccttcgggcttggcgatattgacggtgaccgacttcttgttgcggttggcgcagaggtagaacgaattgttgttgttctgcttgccttcggggtcggcgaggtagggcgggccaaaggcgcgggcatcgtcgccaccgccgggccgctcgatcttgataacctcggcgccgagatccgccagcatctgggccgacagcgggcccgcgagcacccgcgtcaggtcgagaatcttgatgcccgagagtggcagagccgacatgaagcattcctccgatatcttgctaaatcttgattgtccggcgccggaccgcgtcctaacggtgaccctggcgcgccagagcttgccgatacaccattttgatgccgcgagcactgcattgtcggcatgaagccatccccggacggcctacgtgcgtcgcgctggccgaaccgtgggggaaccggcggcgagaaccgcgccgattgccgccacgcgaaattgtgaataggcccgacaccgatttgccgtagcgcctgcggtattttgcctccgatgaggagaagaccatgcggacgatcacgacggtcggggtggtgctgacgctgcttgcggccgcaaggccgccagcggatgcgcgcggcggccatggccatggcggcggacacggtcacggcatgcatgccggcggcgccatgcgcggcggcgggtttgccgccgacaagcgccacagcgacgatgcctataccaaggcggcctcagacgaagctgaccgcctgctgaacagcaagctgaagagtatctgccgcggctgttaggctttggccgccatcagtggacgcgacggcctctgccccgcaccgcccgcaaaggcggtgcagcggacagcagcacgatgatgcccagctgagagatgcggcaggaggtattaccgaagacggtcggcgagagcgccgcaattttcgtgtcgctcgaccgtacgctagcgcctctgaggcttcttgacgtcaacgaccttgaacgagaagctcgatgtctccggtaactccttctggaggccggtcccgagaccccgcatgctgtcatcgcccggcctgacgtgccactcgatctcgatcgaccggcggtcgctcttctcggcggcgatgtcgttgaggtccttcatcaggttgaacagaggtgtgacggccgaggtgatcacctgatcgagctcgacgatgatcttccagtcgaacgcctcatcctgccgcgcgcgcttggcaagatattcggcggcgcgcctgaacgactcgcccttcaggtcgtgcaggccggacgtcccccagatccggcccgtcctgccgtcggcaaacgtcaaatcaacgcccggaatctggatcttcctgtcttgcttcatgccgacgcagcctgcaccgtcgagcgcaacgcgaacgaggaatgctccctcgccgcgttcaatttgaaccagagcggcttgctcgatagggcggcaatggtgagcatgcccacgcctgcgccgcgcagcttgctgggctcggacgacgcacgcctcatcagctcgatattgcgtcgctcgagcagcggttcgcggtggtcgggcggcgtggcgtatgatctgatctcacgaatgataccgaacagccggtcgacctcgctgttcaggccgtagccgaacagccagatctgcacattctcgccgcgccggttcacgaccagcaattcctgctcggtgcgcgcgccggtgccgtgaagcagggtattgcctgcgagctccatcacgatgttcttcaccgcgtagacggtgcgatcctcgacatgcgtggcgcgcaatgcctgctccagcatgtcgagcaccatctcgaggcgctcgccgtcgatcaaatccgcccggactgcagcgatcagcacgtcctcgtccggatcgagatcggaggcgatgccgtaggtccgcaccatctcctgtattcgcctgtgatagatcgtcatcgggccttccgcggattttccagcgatgaaatcgacgaacttcgcgggccttgcgatgcaccgccggctcccaggccggccaaagggcaccactggctgcgcgccggtcaggccgggggcagcttggctgactttactacagcttaggtgattcacggtatgcatttcgttaaagccccaacgttctccgcagcctgtgatgccctgccggcgccgatccggagggcatccgggacgggtaccagcgcggccgcctcggcttcggtctccgccattcgccagaccgcgccgagatcgacaaccacgaccagccgatggtcgtcatcgtagtccttcggggggccgccttcgcggaaccgctttgccgattcagtcaacgcgtcggcgatgcgttccgcaggacacacggcggccgatccggcagccgccgccttgtagccgcggcgcaacgcccgcttgactccgcgaaggccaaacgattcatccccccccgacttgcctcgcccgcgcctcgcggcgcgaacgcgtcgcttcaagccgtgaaagccatcggtggcgacaacaagaaaacatgcctttctcgcggcgatctcgccgacctggcgcttgctcttggcctgctcgccagcctggcggaactggacgcggttgaactcgttgaatgctccgtattcgtccaggtccgggcccagcgcgtagaccggcaaccccgcgctggcaaacctgatactactcggcgcggccatgtcgatacggatcaaaaccagctgcgcgcccccaaggtcctcagtcggcgattgcgtcgcgatcgaaaaccacgcgtccacttgcttcagtatcttggtcggcgacagcagtgtcttctcgcgctcgcacttctcgaagaggcgagtcagcatggtggccatgtacagtttcaggccgccggcatgggcgtgatggcccgtcgcatcgccgacgaccagatagatgctgttgtcgatccgacgcgcgaagtagaagtcgccctgcgcgggcaagtgcaacagctccgacgatttgggagcggcgctgtcgaacctggcaacgagcacatcgcccggaagcccggcactaccgacgatgaccggaaagatcacacgattgagctcggcgagatgacgcagatcgttctcgagagcggtgatcgcccgccccagcatcttcaccttggacgatttcgcggtacctcgaccgcgcttcggtttcgcgctgttcttcatgctcaggcctgcatgtcgtgccggatgaatttctgccggatgtgtgcgcgataatctcgtacaagcaaatgacttcaacgaaaggttgcgtgatattcagccccccggtagacttgtgtcaagagaattgcaccccgggcgtgtatgatggacgtcgacagttacatcgactcgatcgccagagcgctggcgcaacggggcggtcggggtggcggtcgagccaccgcgatgatcggtgcaggattcagccgcaacgcggagaagcggaccgaaggcgcgcgcaatttcccgctctggcgcgacatcgtgcgccccctgatcgacgagttgctgccgccttgcccagaatgcgcgggcggcgggaagtgcccgacgggcagcggcaaccatcgcgacatttgcaggcggcgcgagcatctattcgcagacgcctccggagcgtcggggatgatggcgcttggcgacaagttcgaggccaagaaagggtcagctcgcctgcgtgcggcgctggagtcagcggtacctgaccgcgactacgctcccggccacgcacatcaattgctggtacgcctgccatgggccgatattctcaccaccaactgggattccctgctcgagcgcgccgtcgatgcttacgaccgctcctatgacacggtgatcaccgtcaagcagatcgcctcggcgatcgccccgcggatcgtcaagctgcatggctgcgcgcgttccgggaccgatctcatcttcaccgaggaaagcttcaggacctacccgaaggaatacgcaccattcgtgtcactggtgcagcagagcctgatggagaacgtcatcgtactcttcgggttttccggcgccgatccgaatttccgagcatggcatggctgggtgcgggaccatttgggcagcaatctgcagcccatctacatggtttcgctgcgaccgaccgagccggtcgacgtcaacctgatggccggccggttgatcacgcatatcgacctgtccgagaaatggcccaatctcgacgagcaacggaagatcgagacgtttctcgagcagatccagaagcggctgcgcaatctaaacgtcaatctcgattggccctccgaccatcgggtctggcgcgatcgcgaggccgtcacacgtacgccggatccgcatgactggtggcaacgccagcgcgcctatccgggttggctcgttgcaccggcgcagaatcgggccgatctgatcgagcatctcgacgaggccatcgtcaacgcctacgacaggaatccgctagcgggcggccttgctgcgcttgtcgagcccagcacagccgatgatccccagggcggttccagtgcttccggcagcgcgctcgccaagcccgaggaagcagctctcatcgtcgccaatgcgctgcgtgtagcgatggcgcgccctggcgacaagctgttgatgaccctgcaggacattctggccggcgcgctattgcgccgatttgcaatcgtcttcagcgaaattgatcccgtcgacagcgcacccagccagcagcccatggaacagctgctcggtatcatcgacgagggggtgctgaaaccgatcgaagtcgatcgcctgctgcttcgtgacccggagaggcggagcgaggccgcgctgatcgaggctatcgatgaagcgaaagccaagctgttgcagggtgatcaggacgggcgcgtacgcgacctggtttcctcattgctgccgatcattgaggtcgtcgagcgcgaggcacgcctgcgcggtgacgactggactgcgctgaagctacgttgcgtactctacctcggagacaacaactccgcccgcgaactcgccgtgcgtggcgcgctggtctgcgcactggagacgatcaatcttcgggaaatccagctgctgcttcgcctctggcccgaccagcaatatgacgcctcgagcaatctgcggcatgcagccatcctgcgggagatcggtaaggtccgcgaggcctatcgcgagatatcgaaaacggtcacccggttgcgctcgctcggcaacgagcggcgcagcggcgttgcggaagcgtcgcgggaagcctgggccttctttgcctacgccgaccttatcgaacgcaatctgcgcgagctcaaggccgcgctggcgccgcagtccaacaatctcggcctcgacgatgtccacgatgaattgcacgaacggctcgacgagctggaaaccaatcgctgcgatccgcgcagggagatggcacgcctggcccgcgacctggaggctgcgacggagcaaacacgcctgatgcgaatggtgccgaacaccgctcagcccgccagcaccggctctttccagcacgtgcttgccgaccccgcgaacactttcatcatcctgacggagacggtcggcgtcaccattctccaggtgagccgaggccatcagctcggcttgatggcttgccgcctgctcgcggcgaccagccgcaacctggcgatcaacctgcttctgcgcgcggcgacgccggatgaccttcccttccccggccagtcggcaggaaggactgggacagcgggcagcagcgactggttcacgaccgagattgtgttcgacaagagccacgccgacgaagatttcggcatgctgtgccggttgcttgagaacctggctgcaccctcgccgcaactgtccagcgatttcatcgagtccgtatatctcgatcgcaagtttcgcctgcttcagcacctcgttgcagggttcatcacgcgcgaaactggagagcgggccgtggacctggccagccgcggcttcgaacttgcctgcaagatcgcttactcgccggtcgtggcgaccacccatgccggctggtcgaccagcctctcagtgtacgaggcggcgctttccctgtttccgttcggccgaccgggctacgaaatcctcaccaagttgctcgacttgccgatcccaacagaatccaatgatgccgtgaccaacggatggccggatcccatccgcctgctagccgcggcctggcctcgcaagtccggcatccgtcccggcgtacgatcgccactggatagcgaactgacgccgctcggacagaagatggttgccgcggtgcggatggagatggccggcaacgagacgctgcgctcggtgttgctcgatcacagccgcagatggcaggcgatgatggaagtcagcggcccgtcccgctcgctgatcgtagaacgacggcttgcgttgatccgcgaactgatgccagcgcgggccgacggcagcaccgcaacgccgcagccggcctagcctgcctcgatcgcgccgatatgctcacgacaccagcaacggctgcggcccagtcggccgtgcaacggcaccgatcagcttgccgatctcgggcttgcagccgccgcaattggtgccggccttcaggcagcggccgatcgcctcgacgctggcggcgcccttcctgatctcggcggtgatctggtgtcgcccgatgctgaagcaggagcagacgatcggcccgacatcctcgccggcgccgaacggccgccccgccagcagcgacatccgcgcattggccgacaattgcgtttcggcgaacagcccggtcagccaggcccgcgacggcagcgtgtgatccggcgcgatgaacacgcagccttcgagccggccgtcgcgcaccgccgcgtagcggaagcggccggccgccggatcgcgataggcgatccattcgatctcgacgccgtcgaggccgagctgcgccctcgcccagtcgcgccagctctccgggcgggtatcgagcgcaagctccagccgggtgccatcgccggccttgccgtaaacccaatagcctgacgccggacgcttgatcgcgtcgcggctcaggatgaacgcgtgccatttcggtgcgtagggatcggccttgaccggcgtgtgtttggattccggctggccggacagcggatcgaccgccggattgaccagtgcgttgacgcgcccctcgccggcgaactgctcgttccagtgcatcggcacgaacacacagccgcggcgctggtcggcgctgaccacgacccgcgcgatcatctcgccccagccagaggtcagccgcaccaacccgtcgttctgcaagcctgcctgccgcgcgtcctcgggatgaaactcggcatagggctcgaagatatgcgatagcagccgtccggttttcccggtccgggtcatggtgtgccactgatcgcggacgcggcccgtgttcagcaccagcggaaaatcccggctggtggcgttgcgcgccgcgcgcggtacgaccggcacgaagcgcgccttgcggtcgggcgtgaagaatgcctggctctcgaacatccgcggcgtaccggccggatgctccgatgtcaccggccactgcaccggcgccaacgcgtcataggcgccgtcgtcgagcgccgccagcgccgagatatcgaaatcgcgccggccgtcattctcgaagcccgatagctcggcatgttcgcgaaacacttccgccgccgaggcgtagtcgaagccggcatatcccatgcggatggcgacgtcgcagatgatgcgccagtccgcgcgcgcctcgccgggcgccgacaggaacggccgctgccgcgagatccggcgctcggaattggtgacggtgccgtccttctcgccccacgccagtgccggcaacagcacgtcggcatgccgcgtggtgtcggtgtcgcgcatgcaatccgtcaccacgacgagctcgcaggcgtcgagcgcggcccgtgcgcgatcggcatcgggcaggctcaccaccggattggtcgagatgatccacaccgccttgatgcggccgtcggcgatcgcgtcgaacatgtcgacggccttcagcccggccttctccgcgatcacgggcgcgcgccagaaccgctgcaccagttcgcgatgcgccggattctcgatctccatatgcgcagccagctggttggcgagcccgccaacctcgcggccgcccatcgcattgggctggccggtcagcgagaacggccccatgccgggacgtccgatgcgtccggtcaagagatggcagttgatgatggcgttgaccttgtcgacgccgctcgatgactggttgatgccttgcgaatacagcgtgacgacgcgttcggtccgggtaaaccagtcgaagaacagcccgacggcgccttcagtaagaccacaggtcgcagccgtttgcgccacggtctggccggccacctgcttgagcgcatcgaccacgccggtggtgcaattgccgacgaagccgcggtcgaccgcattgctgccggcgaggaatgcgaacagcccgttgaacagcacgctatcgctgccggaacgcagcggcagatgcagatcggcgccctcgcaggtcgcggtacggcgcggatcgatcaccacgatcttgcacgccgggttcttctccttcgccgccagcatgcgttggtgcaggatcggatggcaccaggcggcgttggagccgaccagcaccagcagatccgcctgctcgaggtcttcgtagcagcccggcacggtgtcgctgccgaaggcgcgcttgtgcccggcgacgctcgaagccatgcagagccgcgaattggtatcgatattggcggtgccgacgaagcccttggcgagcttgttgatgacgtaatagtcctcggtcaggagctggccggagacatagaaggcgaccgcgtcgggcccgtgctccctgatgatgcggtcaaagccgccggcgacgcgatcgagcgcgtcgtcccacgtggccggcgcaccgtcgacaacaggctcgagcaaacggccgtcgagatcgatggtctcggcgagcgccgagcccttgctgcacagccggccgaaattggccggatgctgcttgtcgccctcgacccggacgacgcccgccgcgtccctcgacgcgatgacgccacaaccgacgccgcaatagggacacgtggtcttgatggacatgcttgctcagctcaccgcaatcgcctgccgcactgacagccagaccacgccgttctcgactttggccggatgggtatgcgtgcagccctcgtcgggtgcgacggcctccccgctcgaaagctcgatgacgaaattatgcagcggacaggtcacgcgcttgttgtgcacgatgccctgcgacagcggcccgcccttgtgcgggcagcggtcgtcgagcgcgaacacctcgtcgctctcggtgcggaacaccgcgatgttgccacggggcgtgcgcacgacgcgcgagccgagccgcggaatatcgtcgagcgcaccgatctcgatccagctggtcatgcgagctccaattcggcgagaggcgcgaactcgttgcggtcgacgccgcggctggcgcgctcggcccaaggatcggtctgggcgaactgctgcgaatgggcaaagcgggcgaacagcgccttgcggttcttgacgtcgtcgaccacccgtttccggatctgctcgagaccgacgcggtcgcaccatttgtacatgcgttcgagataccaaccctcctcacggtagagctgcgtcagcgcgacgatcacctcgatcgtctcgtcctcggtctcgaccttggtcaggaactctgtgcccttgatgtgcaagcccgcggcgccggcgaaatggatctcgtagccggaatcgacacagaccacgccgacgtccttgcaggtcgcttccgcgcagttgcgcgggcagccggagacgccgagcttgaccttggccggcgtccaggagccccacatgaacttctcgagcttgacgccgaggccggtggaatcctgagtgccgaagcggcaccattcggagccgacgcaggtcttcaccgtgcgcaggcccttggcgtaggcgtggcccgacaccatgccggcgtcgttgagatcggcccacaccgccggcaggtcctccttcttgacgccgagcaggtcgatgcgctggccgccggtgaccttcaccgtcgggatgttgaacttctcggcgacgtcggcgatggcgcgcagctcgcccggcgtggtgacgccgccccacatccgcggcaccaccgaataggtgccgtccttctggatattggcgtggacgcgctcgttgatgaagcgcgactgctggtcgtcgcgatattcgcccggccaggtcgctagcagatagtaattcagcgccggacggcaggaatggcagccgttcagcgtcttccactccatgaagcgcatcacggccggaatcgtcttgagctgctgctcgacgatgacgcggcggacgtcgtcgtggctgtgatcggtgcacttgcacagcggcttgaccttcggcgccgccgaatagtcgccgccgagcgtgaaggccagcacctgctcgacgagcccggtgcaggagccgcaggacgacgacgccttggtatgcgcccggacgtcgtcgagcgtgaacagcttcttgtccgagatcgccttgacgatcgcgcccttgcagacgccgttgcagccgcagatctcggtctcatcgctcatcgcggccaccgagttctggccgctgacgccgccatcgccgagattggcggcgccgaacaccaggcgctcgcgcatgtgcgagacgtcggtgccgtcacgcagatgctggaagtaccacgggccgtcgatggtgtcgccatagagcacggcgccgacgatcttcttgtccttcaggatgatgcgcttgtagacgccgcggttggcgtcctgcagcacgatctcctccttgtccggtcccggcgcgaagtcgccggccgagaacaggtcgatgccggtgaccttcagcttggtcgaggtgaccgagccgtcataggtggcaaagcccttcatcgcgaggtgattggcgcagaccttggcctgctcgaacagcggcgccaccaggccatagacctggcggcggtgctgcacgcattcgccgaccgcatagatgcgaccgtcataggtctgcatggtgtcggagacgacgatgccgcgctcgcaatagagcccggccttcttggcgagctcgaaattcgggcggatgccgaccgccatcacgacgagatcggccggcagctcggtgccgtcgccgaagcgcacgccggtgacgcggtcctcgccgaggatcgcctgggtctgcgccggcatcttgaacaccatgccgcgctcttccagtgacttgcgcaggagaccgccggccaccggatcgagctggcgctccatcagggtgtcgagcagatgcacgaccgtgacgttcatgccgcgcttcatcagcccgttggcggcttcgaggccgagcaggccgccgccgatcacgactgcgttgcgatagtcggtcgaggccttgatcatgcgatcgacatcatagatgtcgcggaagccgatcacgcccggcagctccttacccggcagcggcagcacgatcgggttcgagcccgtcgcaatcaacagacggtcgtagggaacgcgatcgccggcatcggtgacgacctcgcaggtgcgacggtcgatcatgctgaccgtctcgcccttgcgcagcgtgatgttgttgtcctcgtaccagtcgacggtgttgagcatgatgtcgtcgacggtcttctcgccggcgagcaccggcgacagcaggatgcggttgtaattgccgtagggctcggagccgaacactgtgatgtcgtagagatcgggcgcgcgttcgagcagcgcctccacggtgcggatgccggccatcccgttgccgatcaccacgagcttctgcttgatcaccttgtcgagcatggtctgcctttcaaatccgacggctgtgctcagcgacgcggcgcgcgtcgtcgatcgacaccgatagaggtttggagttgttaggaagcccagccgcgggcgcagaccgtcctcaatgacgatcgatgttccgttacgaactgatattcaaaacgcgtgccaattcgacgcgggccgattttgctgcaaaatcaattggttttcagcaacatcgaatcggcctgatggcgcgccggcgagatcgccggccgattttttagccacgccgatgatctcttgtgcatcacagcatcgacgtcaatgatggcgatcgcgggtcagttaatcgatccgccgtcgcatgccgatggcgcatcgcacaagaaagcatcagcatgcgcgtttgcgcggcggcgcctgctgcgggccagccaattccgatcgccgaacgcggatcgagaacacgcggcaacgccttgcgactgcacggcaaagcgacgcgatcgactcgatggcacgcaaattgctgacctcttctgttgccggagtgcggctcaacgacgagcgcgctcacgctttcacccacattcgatttatctgcgtctgagatcgccgcgcgtctgcggccctccgccgcatcaccgcgagacgattgcgatgaaacttgccgagttcaagaaagccggtcactggccgacactgctcgccgcgttcctgtacttcgacatcagtttcatggcgtgggtcgcgctcggaccattgatcgtctacatcgcgcgcgacatgaatctcgccgtgaacgagaagttcaccctcgtcgccatacccgtgctggccggcgcattgctgcgcgtgccgatgggcattctcgccgacgtcatcggcgccaagcgcaccggcatcattgcccagctcgtggtgatttcagcgaccgcttcggtctggcatttcgggttgaccagcaagctcgcaatcgaattgttcgggcttgcgctcggcgtcggcggcgcctcgttcgccgtcgccctgccccaggcgagccgctggtatcccccgcaatatcagggcgtggtgatgggcatcgccggcgccggcaacatgggcgtcgtgctcgacacgctgcttgccccgtccattgcagaacattggggctggcaggccgttttcggatgcctgctgattccgatgctgatggtgctggcctattacacattcgccgccaaggacgcgccgggggaccgcaagccgatttcgctgaaagcctatggcacgctgttgaaggactccgatacccgctggttcatgttcttctacttcatcactttcggcggcttcgtcggcctcgccaacgcgttgccgctctattttacggtgcagtatcacgtctcgggtgtcgcagccggcatgctggtcgcgctgatcgtcgccttcggctccggatttcgccctgtcggcggcatgatcgccgaccggatcggcggcatccgttcgctgtcgatcctgttcggcgtcgtcgttgccgcctatgtcgtgatcgccttcatgcccgaaggcccaggggcggcgacgccgggcggctgggcgctgaccgagctgccgcgcatcgcctggatctcggtgctgttgttctcgatcggcgtgttggcgctcggcatgggcaatggcgccgtattccagctgatcccgctgcgcttccgtcacgagatcggcctgatgaccgggctggtcggttgcgccggcggcgtcggcggcttcttcctcgcccagacactcggttacgccaagggcatgaccggcggcttcggcgcgggcttcctgttcttcggcgcgctggcgttgcttggcttcatcggacttgccatggtcaaggtccgctggcgcaccacctggggcgccgtgtcgggagcgcgcgtctgacggccggtgtgggaactggacatgaagttgggccgaggtgcagcagcgtcggcagtccacctctccccttgtgggagaggtcggatcgcaccgacagatgtgatccgggtgaggggttgcgctctctcgtgggacctgaaccccctcacccggcgctttgcgccgacctctccccgatggggagaggtgatctccgcggccagactacctcaactcgctaacggccggccgagatagacgtggcgaatggcgcacaaccggacttgggcgttcgcgtcggcttcgccagcgagaccggcaagcgcgccgccaatgaggactatgtcgcggcctgcctgggccagccgagcacgcttcaccgcgatatcgtcgcggcggtcgccgacggcgtcggcggccacaagggcggacgtgaggcagcggaggtcgcggtccgcagcttcatcgacgcctattattcgctgcccgagacgctcggcgtccgccgccgcgccgcgcgggcgctcgaatccgccaacagctggatctacggccagggccgcgtcgacgccgcgcgcagcggcatggcttgcgcgttctcctccatcatcctgtcgcggcggcaatgccatgtgatccatatcggtgacacccgcgcctaccgcctcagcgagggacggctggagcgcctgacgcaggaccatatcgccggccgcggcgaccttgcgcatatgctgagccgcgccatcggcttcgaggagttcgcccgcttcgactacacctcggtggggctgcggcagcatgaccgtctcctgatctgcagcgacggcgttcacggcgcgctgggcgatccccgcctccggcaattgttggaagaacgcacgccgcccgacgagtcggcacgcagaatcgtcgaggccgggctcgcggccggcagcagcgacaatacgaccgcgctggtgctcgacatcgtcgacctgccgccggcggatcgcgacgatcttacgcacgcgattgcgacgctgccgattctcgatctgcccgacagcggcgacaccgtcgacgattttgcgctctctgacgtgctgtccgacgggcgctacagccgtctgttcaaggcgaccgacaagcgcgccggccgcgacgtggtgctgaaattcccgcatccgcgggtcgcgagcgaagggtcctatcgcctcgccttcgtgcgcgaggcctgggtcgccgcgcgcgtgcgcagcctgtggatcggcgagatcatcgaggtgccggccgagcggcagacccggctctattcggcaatgccgctttacgagggcgaaacgctggagcaacggctcaagcgcgcgccgcggctgtcgctcaccgagggcatcgcgatcgcgaccaagctggtgcgcgcggtcaccgcgctgcaccgcgccggcatcatccatcgcgacatcaagcccgacaatgtgatcctgctgaaagacggcggattgcgcctcgtcgacctcggcgtcgcgcgcgtccccctgctggaggactttcccgccgaagacgttccgggcaccgcgagctacatggcgccagaactgttcggcggcaaggccggcgacgaggcctccgacctgttcgcgctcggcgtcacggtctaccggatgttcaccgcgaactatccgttcggcgagatcgagccgttctcgcggccgcgcttcggcaagccggcgccgctctcacgctatcggccggacctgccggcctggctcgatgcggtgatcggcaaggcgctcagcgtcgagcccgcgcagcgcttcggcgacgccatcgagttcgcgcacgaactggagaacggcgcgacatgggctggccctgccgtcgccacccgcaagtcgctgcacgaccgcgatcccctgacgttctggagagtgctgtgcgcgatcctggcgctgatcgtcgtggtgctgctggcgcggcattaaagcgcgatgcgattgggttgaataatcatcgcgctttggctccttgtttgagcatgaacttttcggaaaaccgcttcagatttttccggatcatgctctagccgctcaagacccggcgcgccggatcgtgatcctgctctcgtcggtcatgtccttgagctccttgttcggctcacgatagagatgccgctcgatctcgacggtccggccatcggtcgtctttgtgcacttctcgtcgacaaagacgccgccgacctcctgcttgtcggcgcccggctttgcctccgagcaggtccagccatcctcgccgtagcgcgacttcgcctgcaggccgagcaggaacgccttcttgcgcagatagagccgcgccttcggatcggtctcgatggtcagcgcggcaatcctggcgtccttgtcgatcatcacggtcaggatcgccggatggccgccgaccatggtgccttcgcgcgcggtctcgcgatcatactcaaagcgaatgccgcgcaactggtccggcccttccgggcagttcgaccactgcgcccattccgccaatctgtgggcggtcttctcgccggcacaggtcaggttgatgtagcctgcgtcgggcacgcttgatatcgccatgccgacattgatgtcgcgcaggtctcccgcggtcgccatcgccggcacggccgctccgactgacgcggcgaagaccagtgcgcggatcgtcgttctctgcttgctcatggcttggccttctcgttctgatcggacggcgcggcggcgtggccggcctccttgtaaatgttgcagacgcgcgagccctcgccgaagaaggcgagacactcgtcatagttcggctcacccttgcccttgacatgggcgagcacataatccgccacggcctcgatctcgttcggccgcaggaacacgttcgcctccggcggcatgcggtcggcgacatcctgccgggtcatctcgtagcatttcgtggtgtcataggagccgcgcacgaagaacggcatgccggtgcccggccgcccgcacgttacggtctcgatgatctgttccttcgtcagctcggtcttgcgcagcgacagcgcgtcgccgccatagccgccgccgccattgccgtgccatttgtggcagcccatgcaattgccgcgcttgaacaccgccttgcctgcatcggtcggatcgcttgccgactgtgcatgcgccatgcctgcaaatcccgtcaccagcgcgcagccgagccacgcgccaatcagccatgtttgtttcatttgttccgtttctgttggcgagatcgacgcgggaggcccctcactgaggcctcccgcacgtgcgatgtcagagcgcgaacacgtagagcatcgagcccggctgcatccgcttcagctcgggcgtggcatcgatgaaccacttgtcccaggcaccgccgaggcccaccaggaccgcgacatactgcttgccgtcgaccgagaacgtcatcggcggcgcgttgagaccgccgccggtgttgaactcccacagcttctgcaacgacttcgcgtcataggcgatcatctcgcccgagggctgtcctgagaacaccaggtcaggcgttgccaggatgccgccgagattcgggaattgcgtctccgccttccctgccaccttgccggtggtgacgtcgatcgcggtcacgctgccggtgatcttgacgttctggctcggtccgccgcccgtccagaactcacgcgctttcagcttgtcctgctgcgactcctcgaccttgatatggttgcagctctcgatcacggggatgtaccagagcttcaggttcggattgtacgcagtcggcggccagttcttgccgcccatgttgccggggcagatatccgtttccttgttgctgcggctcggcgtgaccgacgcgttgtacttctgcacgccctgcttcggatcatactccaccggcttgccggactccggatcgagccccttggtccaggtcaccttcttgacgaagggcagaccccagacgaacttgccgctgttgcgatcgaccgcataggcaaagccgttgcggtcggcctcgagcgcgagcttcagcgtcgtgttgttcggaccggggacgtcgaccagcacgttttccgccacgctgtcatagtcgtagggatcgttcggcgtgtgctggtggtgccacttgatcttgccggtgtcggcatcgagaccgagcgaggagtcggtgtagaggttgtcaccgggccggtattcattgtcccagtccggtccgggattgccgacgccccagacgatggtgttggtcgaggggtcgtagcttccggtgacccaggtcgaaccaccgccgctcgccttggcgttcttgtcatccttccaggtctccgcacccggctcatccttgcccgggatggtgtgggtgcgccagacttccttctggctgttcaggtcggtcgcagcgatccagccgcgaatgccgtattccgcaccggcgacgcctgatatcgccctatccttgacgatcagcggtgcgccggtgatcacctcgcccttgtcgggatcggcgacctgacgctgccaggcgacctgcccggtctccttgttggtcgcgaccaggcgaccgtcgagcgtatgcgagatgacgaggttgttccacaacgcgacaccgcgattgtcgacgccgcagcaggcgaccgcgccggcccagtcatggtcggtcttgggatccatcttccagaccagcacgcctttgccgccatgcgcatcgatcttgtagaccgagccccagccgtcggtgacgtatatgaatccgttctcgacgatcggagttccctccaggccgccatgcgcccagatgccaccgccctcgacgccgccgagatgcatggtccaggcgaccttcagattcttgatggtgtccttgttgatgtcggccagcgacgagaagcgcgtcgccgagtagttcttgtgatgatgcagccagttgcctgcttccttgtcagcattgagcagacggtcctggctgacatcctcggcgagcgcaaacgagcccgcaaaggtcgcagcggatgctactgccgccgcgagcatgtgagactttacccaattcatccttgtcatagattcatttcctccggatctagcattcttcattgatcgaaccgcccgtcacatacggacaagtcgcgcgagaagccttgagtcccggcgatcggctgtgccgcccgccgcattcctggtcacttgcttctggtcacttctggaccgttacctccgtctcgatggttccagctttctgaaaaacgaccgcgcatttgaacgtctcgccgggagcgagcgcctggcgcaactgcagcagcatcacatgatagccgtcgcgcttcagttcgagcgttcccttggctggaactggtatattggatatcgagcgcatggcgggcgcgccctcgccgcgatcgacggtgtgccgctcggaaaaattcgcgacggggcagcggacacgtagcagcgcatcggcgctctcggcctcgttcttgatcgtcatcgtcaagggaaggtccccgcccgctgtgtcgaccgccggtacgcgagcatccaggatcgccagggattcgttcgcgacggcgctacgcatcactccgaacgtgccgatcaggcagaataatggtaacgcgatccatgcgttgcgcttaatgcttctgcacgcaacggcgcgatgcaactcccgcacgaacgacatcaagttttctcccgacatgatttttgcggcattgtttcatgcttcgtcgtgcgcatccagcgattgaatgccgggaaccatgcatcaatgcgacttcggcacgcataacggtcatgctaactttttgcgcaagagtgctctcgacccacttccgcctgccgagcgcgatgcagcacatgccgcactgcgtgaggtgatcggcacggcaacgatcgacgccgtcacatccgtctcgggtgttgccacggcggcgcggctattccggatcgatgcaggtcgcgagacatatttgcttcgaatcggcgcggaagcgcagatcacggccgcggatcgcgaaggacggctggtggtgtgagaccgccgtgctcttcagcggcgcagttcactacggcactggatgtagccgcgcaagctgatcgagcgacaaaccggcttcgcgatcgctcaggggaaagcggacaataatgtcctggcgggccagttgtccccacagcgcgtccgacgaccacttctgcggctcgggtccgcgcggcccatcaatccagatgaaataccattccgccatggccgcgaccaagctccctctcggcaagattgatccttcgccggtcaatccgcaacgcccgatttcgcgccgacgcggcggttcggaatcctactcgtaaggccggccgtccttatgcaggaagcggccatcggagctcgggctcatcatgtcgatgtcggagcaggtgatgacgtcggcgcgcgagcgcgagccgacctcgagataggtggcggtcatctgcgacctgttgaccatgtgatgcccgttgccggaattcttcgggaatgccgcgcaatcgccggcgcgcagcaccgtctcgccgccgtcctcgatcagcaccacctcgcctgcgagcacgtagacgaattcgtcttcgtcggaatgccagtggcgctggctcgaccaattgcccggcggcaagcgcatcagattgacgccgaaatcgccgagcccggcggcgtcaccaaggcgctgccgcacccgctcggcgcatggcgcggcgaactcggccggatagccggtccccttgcgttccggcacctttgtcagatcgatcttcggcatggcgacgtcctggcgatgtgatgagcggctgcccattcctatcgcgatcgccagtcggaaatgtgtcgcacggcttgaagccgtcagctccgcccgaccaaatcctttgccatcaggatgtcgtcatagtagcggccgtcgatcttcagggcatgcttctccagcccgtactcgacaaaccccatgctctgatagagccgaagcgccggctcgttgcccttcactacgacgagttgcaccaattcgaccgatttcgcggcgagcctgagcaaggcatcgaccagcagccggccgacgccggcgcgccgcgcctgccgccgcacatacatcccgaccagcatacccttgtgctgccgcttcggcccttccgccgcaatgaagccgacaatgccggcgagttcgccgcctcgaaacgccccgaggatcaccgccccgcggtccagccgctccgcgaaccagccgacgggatggatgctctccgtctcatacgcactgccgaacgcctcggggctcaagcgcagcgcttccagtcggatgtcgcgatagagcgacgcgtccgccggcaagaggcgtcgaatctcgatgagctgcgtcgtcatttcgtgtcctgtcttcctcgcggcagcatggccgatcgatcggcacgtcggcatctgtcgcgcggccagcccattccaaagcgaattggagtgggaaagggaagccatccctcgtatcccgggtttcggccgccgtacagaggtagactcagcatgacgcttgcccgacactgcgcatcgaggagaggtctatggttttttggatagcgagtgcagtaggccttctggctgcgtatctgttcggctcgacgcccgcgggctatctggcggggaaactgctcaagggcatcgacatccgccagcacggctccagatccaccggcgcaaccaacgtcctgcgaaccctcgggacgtggcccgcgttggcggtcctcctggtggatgtgctgaaaggcgcggcggcgatcgcatttgcccgctggttttatccctggctctacacattgccatcggtcacgccaccgacggccgttgacctgcaaaccttgctgccttgggcggtctgcctggcgggacttgccgcgttgttggggcacggccgctcgatctggttgaattttaccggcggcaaatccgcagcaacggggctcggcgtgttgctggcaatgtcctggccggtcggcctgggcgcagccctcgtctttggcgttgtgctggcaatgtcccggattgtgtcgctgagttcgatgtcggcggcgctcgctgcgattgccctcgtctgcgccatggagcagccgttgccttatcggctgttggtcatcgcgggtggcctctacgtgatcgcgcgccatcgcgccaacattcagcggctgctggcagggacggagccgcgccttggatcaggcggacaggaagccacggcttgcccggatgtcaccggtgctgctggacgtgctcctgaaccgcatcgatgacgtcagacgaatgcgtcacgaagccgaagcatttcttgacgttgaacagggttgcttcgacacagaagccaggtgaggtcgtcgcgcagcagtcctcgaccaggacgcagccatagcccaggaagtttgcgtcggtcagcgaatgcagcacgcattgatcggtgttgacgccggcaaacaggatggtcttggtgccgagattgcgcaggatgctgtccagcggcgtgtcccagaagccgctgatccggtacttgtcgacgtgaatgtcctcgggctcctgtttcagctcatcaacgacggccgcggcccagctgtccttctgcaacacgcgcgcgccgctgcccggcaacggctcgcccagaccgatgcctgtgcccttcggcttgtacagatggagctggttgggcgccatgttcttgagatcgggccgattgccccagttcagccagatgacgtgcacgccggcattcctcaacaccgggagcagcttttgcagcggctcgatcggcgcccgatccggggtgtgatcgaggccgagatggtcgacccatccgcccttcgcgcagaagtcgttctgcatgtcgacgacgatgaggacggtgcggttcaggtcgatagtcaccgtctgaggctgcgcgtcgatcgtcaccaccctgggcggcggcagcgccatcgccatgttgacgttgttgtcgtcgaccagccatttgtagccgggagcagacccaagaggattggcggcgctggacgcagcggacgccgctgccttcgctaaattggaactcgtcatcggattttcctcacctgcttttgctttcttgaaatcggttgcgatcagccgccgcgttcgaacggaatggtcaaggccgagggctgcctgctcttgccgacaaagcccgcgatggcgaccagcgccagcagatacggcagcaacaacagcagcgcgaccggcacgtcgagctgcagcgccggtaccagaaattgcagcgcggtcgcaaagccgaacagcaggcacgccgccagcgtgtaccagggattccagccgccgaagatcaccgccgtgatcgcgagatagcctgcgcccttggtcatgttctcggtgaacgtattgctgtccgcgaccgacatgaaggcgccgccgaggcccgccaggatgccggcatagagcacgccgagatagcgcgtcctcgccacgccgatgccggccttgtcggcggcgcgcggatcctcgccgaccgcccgcaccgccagcccgaacgacgtgtacttcaggatcaaccaggtcacgacgaccatcaggatgctgacataggcaaggccggtctggttcgccaatgccggcccgatcaccgggatatgtgcgagccacggcagattgagctgcgcgaagccggggatcggatcgcgcgacagcggcccgaagatctcgcggtagagaaacgtcgtcgtgcccagcgccaggatgttgaacccgattccgaccaccagttgattggcgcgcaacgtcacgctcagcacggcctgcaccgcggccaccgcggtcgcgaccaatacgccggccgcgacgccgagcagcggcgaaccggtcgcccacgatgccagcgccgccgtgaaggccgacatcagcatcatgccgtcgaggctgagattgagcacgccggcgcgctcgctcagcatctcgccggttgcggcgaaaatgattgggaccgcgaggcgaagtccggagccgatgaacacggccatctgttcgtcaatcatcgggtcaccttccggttggtgaggatcgcagagcccgcaatgacgatgacgatcaggccctggcagatcagcacgacggcggacgggacgtgcgccgagatctccatgttgatggatcccgatcgcaggaatccgaacagcagcgcgccgatcacgacgccgacggccgagccacgcgacaacaggccgaccaccaggccgtcgaatccgtaacccgacgagaaatcgctcgtcagatagaattgctggccgaggatcatgatcgcgccgccgagaccgccgaggccgccggacaccgtcatggccaggatcacatagaaactggtccgcatccccgcgcggcgggaagccatcgcgttcaagccgaccgcgcgcagtcgcaagccgagcgagctgtgcctgagcaccagccacacgaccactaccgccaccgccgcaatcagcagtccgatatgcagcggcgatccattgtccgggaacagcagcggaagcttggtcgagtcagggatctccgccgattccggcagcgacgacacatcgctgatcggcttgcgcagcaggtggaaggactcgacggaccagtacaccagcggcagtgcgatgaagctcagcagcaatgtgctgatcacctcgttggtgccgcgtgccgccttgagaacaccagcaaggccgccccaaacggctccggcgagggttccgaccgcgagcggcacgatgaacgccagtcccagcggcaggccgccggcgccatgcagggcggctgcggttgcgaacatgccgcccatcgcgatctgcccctcgccgcccacattggtcaggttggcacggctggcaaagatgaagccgagaccgaccagcgcgaggctgatggcgcgattgatcgaggctccgatgttgaaatcgcttcccgccataccgtcccagaacgcttcgatcgcctcgacgaccgacgcaccggtggctgcgatgatgagcaggccgatcccgagcgcgatcacggtcgagaccaccggaaccagcacctgcagcggcacgagctcgagtcttgtgccctgcgcgacccgcgccagcttcggatttttcatgaccatggccaacctagacatgcgcgtgccccgacatcatcgccccgatcgcctcacggctgaacgacccggccgcgagctcgccaaccaactttccgcggtagatcaccgcaatccgatccgacaccgccatcagctcctcgagctcgctggagatcagaagcaccccaaggccgtcatcgcgggcggcacggatgcggttgtagacggcctcgatcgccccgacgtcgaggcctcgcgtcggctgcgccgcgagcaggaacaccagcggatcgagcgacagctcgcgtgcaagcaccgctttctgctggttaccgcccgagagagacgccatcgaaacatccgggctgctcgcccgcacgtcgaagtcgcgcatcatcgcctccgccgccttgcgccgcgccgacttgtcgagcaggccgaagcggctgaattttccgatcgcgccgagataaaggttttcggcgaccgacaattccttgatgcaggccaccgcatggcgatcctcgggcacgatcccgacacccgcatccgtgatctcctgcggcgtgcagccggtgacccgtgtgccgccgaccacgattgcaccttcgctcggcacggcgagcccggccaggatcagtccgagctcggtctggccattgccctcgacgcccgcgatcccgacgatctcgccggtgccaaccctaaggctcaaaccgtcgagccgcggcacgccatgcgggtcgcgatagacgaggtccgagatctgcagcaccgcctcgcccggcgatgccgggccaaccgaatccgcattgggtttttccggcgtgttgccctcgatatcgaccgctgcggcgagcaccgaccctgccgactggacatcgcggccgaccatcgagcgcaccagcgagcggatgtcggcgccctccatcgcgaccgtttcgatgatccggccctgccgcagcaccgtcgtgcgatcggccacgcgactgatctcgccgagcttgtgcgtcaccaggatcacggacttgccgcgcagcgcgacctggcggcagatcgccagcagcgcgtcgatttcatccggctgcagaacggcagtcggctcgtcgagcacgagcagttgcggatcgccgagcaggcacttgatgatctcgacccgctgccgctcgccgaccgaaagctcatcgatccgcgcctcgggatcaatctcgagcccgtactccgcggcgagctgctccatccgcacgatgatctcctgcggcttcagcaccgcgctggcgcggccgagcatcaggttctcggccacgctcatgttgggcaccaggctgaaatgctggtgcaccatcacgacgccgcgctgcagcgcttccgccgggccgcggggatggaacggctctccgcccagcgtcatcgtgccggcatccggccggtgcaccccgaacaccagattgcacaatgtcgatttgccggcgccgttctcgccaagcaggcagtgcacctcgccgcgctcgatctgcagcgaaatgtcgtcgagcgcggtgaaagccccgaagcgcttggtcaagccagacagttcgagaacagccacggtcaacccaccttgaccttgatcttgctcgacagcaggtcgtccttcagttccttgatcctggcctggatctcgggcgtcgcccccgcgcaaatctcgatgtcggccgagcgcggtcccatggcgaggccgaactgcttgtactccgggtgccatgttccggcgacggcctggtcgatggcgtattcgaccatgaacccgatgccgctgactgtataggcgatgtagagcgggttgttgtcggagcagtaattggtgtagctcccgatcatcttggtgcccttctcgcgcgccgcctgctccatgccgcgcacgccgagattgaggatgttgtagtgcacgtcggcgccctgcgcgatcgcggcaagcgtcgcctccttggccttggcgacgtcgtcgaagtcaccggtgtaggtcacgaaacatttggtatccggcttgacgtgcttggcgccgttcgcgaactccgttccggtgttgacgatggccggaatttcaagcccgccgacatagctcaccgcgccgttcttcgacatcagcgccgcgacggcgccggcaatgaatccgatctgggcctgcagcacgtcgtattgcgcgacgttgtcggtcggctgtccggtcgggccgacgatggagaacttcaccttcgggaagcgcttggcgaccttgaggaccgatgcctgggtctgccccgcagcgccgatcaccatgtcgttcttcgaggcgagcgtcaccagcgcctgctccatgtcggcgaacttgacgttctcgatcgacgtaatcacgaccttgctgccgtagcgctgctcagccgccttcatgccgttgtaggccgactccatccagccatggtcggcccgcgaccccggaatcagaataccgatgcgaagcggctttgccgcatcgtcggcgaagccgagccggactgatgaaccgataaaggctgccgagagcatgccggtttgcagaaatgcacgacgggtagcgctcatgtgtttcctcctgttcgtttcccggtgttgccgcactctttgttgcggcattcttgtatcggcggcgcgtcagcgccgtcagtttcagtatcgaagcaatctcaccccgcgcggattgccgccaacgcgctgacggcatcaacgaaacacttcatgggggcctgcacgactccggcgccgatgatccccatgcccggctccttgtgcgccgtagcggtgttgatgaccggccgcatgctctcgtccacgaccttgcggacatcgatgccgaccggcgctccgatgaagtcgagcatcggcaaggtgaagccgggattgcggccgatggtgacgtgcgccatctcgcgcgaatagcgcagggcatcctgcggcgtaccgccgacgaactggaccatcgcgggagctgccgccatcgcgaacgcaccgagccccgcggtctcggtgatcgcgctgtcgccgatatcgggattggcatcggccacgctgaagcccggcaggaacaagccgacgggaatatcggccggaccgacgaaccactgcccgtccaggccgctgaccctgatcccaacattgacgccgttgcgcgccatcgcggtgacggtgctgctgaacggaacgccgtgcgcggcgtccatggtcgccttgcacgccgccatcgacaggctcaggaagaacatgtcgtccgccccgatcgtccgcagcgtctcgtgaacgaggtcgcgcgagatcgaggacttgagcagcgcttccgtgacggcgcgatacagcagcagggttgcagccgtgttgcgattgtggacatcgtcgcccatgtgcagcgactgcgacatcagcggcttcagcggcaagcctccgtcgatgccggtgaccgcagccttcagacatggcgccagcaccgtctcgatcagcttgaggccctcgatcacctcgggggcgaatgcgccgaaacgcagcgtcttggcgccgccggattccatcatcggcgcataggcgcgattgcctgtggtcttgttctgcaccacgaagagtggcatcgagggcgagatgatcccggtcatcggcccgaccgcgccaaattcatggcacggcgcgaagctgatgccgcccgacgccgcgagtcgctcggcctctcgcgggctggtcgcccagttctcatagaggattgcgccgaccaccgcgcccttcatcgggccgcacatgtcgttccaggcgatcggcggaccagcatggagcagcgtccggcccatgtccggccagacctccgatgcatgtgccgcgatatcgacccaaaccggctgcgcggtcaggatccgctcgagcacttcggcattggcgcgatcgatccgcgatcccaagcaatccgcatctgcggtatcgccaacgagttgcgcaaggctccaggccacctcgggacttccatcgccgatcggctgccactgcagacgcaccagtggtgcaccgctgctttcgacgccgcgatcgaggtcggaggcgccgaggctgatgacggaagtcttatgctggagcgcggaaggggctgcgttcatcatcattctccaccttgcatcacgcggcgcgctgagacgttgtcgtccgctgccatgcggctcgcgatggcttgcgcggcatgggcggcgcccgtgctgctgccgaaaatctccgcgccggcgtccgccaacatggctttctgcgtctcgaggggctgcggatcggcgtccgtgccgcagacgaaacagatcacgggaagctcccgcccttgcccgcgcgctgcggtcttcgcgcggcggatcgccggagccaggacctttgccggattggggtggctgccgtagccgagcacgacatccagcacgacgcaggcaacggtcggatcacctgcttccttcaacagccgttcgatccgcacgccatagtcgatcatcggatgcggccgtcccaccgtgaattcgtcactgccgagatcgatcgcggtgtgtccttggctcgcttccacatcggccagacggtccgcctccgcaagcggcgcgttcgaccggacccgaaggcccgcggcgcgccaaatggtctgggcctccgagcagaacgttccgccggaatagagcccgcgcagattgcgctgcgaaggcgccagcgacgcacaaacccgcgttgccaatgcttcgatcgactgttcgtcacccccgggttggcgcgctcccgcaagcgcgacggcctgccgcgccgtctcctcgagcgacgacgcgcgatgaacattgccggccgatgccgccggatcgccgccgaggaagcagatcacgaccggcttgccgatcgcgccggcgcgctcgatcacccgcttctgcacatcgggcgcaggaggcttggagacgatggcgacgaccttggtctgcgcatcggtggccagcaactcaaggccctgcaacatggtgatgccgccgacctcgctggaaacatcgtggctgccggtgccgatggcctgcgatatgccctgatcctgacgatggatctggcacatcacttcctgcagaccggtgcccgatgcgccgacgagcccgatcgcgccgcgccgaacgacattggcaaatccaagcggcacgccattgatgatggccgtgccgcaatccggccccatcaccagcaggcccttctgtgccgcgacgcgcttgatggcctgctcctgttcgatcggcacgttgtcgctgaacagcagcacgttcagaccctgcctcagcgccttcagcgcttccgccgccgcatagggacccggcaccgagatcaatgcgaggtcggcgcgatcggcgatcacgacgccgcgggagatcgagcgcggcggtgcttccgcggccgcttcggccgggccgcccttcggctcttcgccgacgatcagggagtgaatctcctgctccgcggccgcgcgcttttcgggcgcatcgtccaccacgacgatcatgatatcgccgggcttggcgtcctcgagcgccggactcatcagcccggcctgctgcaggaattccttgttgctgcgcgttcccatcaagagcgtgacccgctgcacgccggtccgcgccaccgtgacctgcgagatccgcatcaacgacacggaatccttgtacaggttcgccttaatgctggattggatggccatggccctgtcgttcccttgaatcccgcaggctgcttgttggtcttgtgctagagcctcagccggcggccagctcgattgcctaatcagttgaggcgccgatccggcgtctcaattgctttggcgcgggcggatgtcccgccgaagcgccagtcccgttggttattgaacgacatgcgtcccggtctcgccccgcagcgccgccatcgcgcaatcgaggtgactgatgatcgcccgtttgcctccgccttcgagaaaccggatggcggcatcgaccttgggtcccatgcttccaggaggaaagtgtccctcacgatggtaagccttgagctcttcgaggctaacctgatccaggtccctcttgttcggcttgccgaaattcaccgcgacgcgcgggaccgctgtcaggatcagcagctcctcgatgcccaacacattcgcgatgtgggccgatgtcaggtccttgtcgatcacggccggcacgccggtgcgcacgcccttggcgtcgcggaccacgggaacgccgccgccgccgccggcaatgacaattgttccccgcttgaccaatgcgtcgaccagcgagatgtcgcagacatgcttgggcttcggcgacggtacgacatgacgccagccgcgccccgaatcctcacgcatcgcccagttgagctcgtcgctgatcttcttcgcctcgtcctcggaaaagaacggcccgacgaacttggtcggattcctgaacgcgggatcgtccttgtccacctcgacctgggtcagcaggcttgccacgtgtcgctggttgccctgctcgcgcagcgcattctcgatcgcctgcatcaggagatagccgatgccgccttggctgtgcgcgacgcagatgtccatgtccatcggcggaatccggctcatcgtcagcatctggcgcatcatgatcttgccgaccaccgggccgttgccgtgggtgatgaccagctcgttatcgagctgcgccaacggcagcagcgcttccgcggtgatctgcgcgaccgacttctgctcctgcgacgtacccctgatatcctcggggtgaaccgcattgccgccgatcgcgaccaccaggcgacgcggtacgtcattgagtgtacgcatttccctatctccccgcattctgcacgatggcgacagcaagctcgcacgcctgcgcgttcgacggcgcaacgacgaatcctgcctgctcgagtttcctgacctgcgcggagcgcccttgcggatcctgttccgtgccgacgacggacgcgaccaggacaggtgcatcctgcccacgatcggcaacgatcttggtcagatgctcggcgggatcggcgtgcgcgccatagccgagcacgagatcgagcaggatcaccgaaagatcgtggttcttgagcgcggcgcgcaacgcatcgtcgcgcaccgacgggtcgatcatcggatgcggccggccacgggtatattcgtcgtcgccaaggtcgatcagccggtcccgtccatcgttcggttcgacgccgagcttcagcacgccggggatggcggcgttcgacgccaccttccggcctgcggccgcgaggatcacctgggcttcggcacacaacgtaccgccggcgaacaaaccttcgatgccgcctcgaccgttccgcggaagccgtgacgcaacagcgttcgcatcgaagcccgccccgatctgccggcgtcccagtgccagctccgcggcgcccttcagcgtcggcgagaaccgggcgttcggcgggagctggacctcagacgcaccgatgaagcacaccgtgtacgacttccggcttctgccgatccgctcgaggacggccttcgcgacatcgggatgcggcggcttcgagatcagcaccacgtggtcggtttccggatcggcatcgaatgcatcgatcgccatcagcgtggtgatgccgccgatatccttcttcagatcgcgcccgccgaccccgatggcgtgggagattcccgcgccggcttccgagatcaggcacgagacctcctgcgttccggtccccgacgcgccgatgatgccgatcctgccgcgcctgatcttgttggcaaacgccagcggcgcgccgccgatcacagccgttccgcaatcaggtcccatcatcaggaggccggccgcccgcgcctgctgcttgagcgacaattcgtccccgagggatacgttgtcgctgaacatcaggacatgcaggccgcgattgagcgccttgcgcgcctcggcggcggcgaattcgccgggaacggaaatcagcgcaagattgatctccggcctcgccttgacagcggccgcgatcgagtgcggccgccatgcggcctgcgcctcgccctgggtcttcggcttgtcgagcgacctgatcgcagtgtcgagcgcttcgcgggcggcgggctcggactcggccttgaccgcgatcacgaggtcattgcccttgaccgcaataccctcctccagcagccccgcattgcgcatgatcgcagcgttcgacggcgttcccatcatcaacgcagcctcgatcacgccgggcgagccggccacctcacgcgacagccgcatcagcgcgaccgagtcgagatagaatcccttgcgtacctcgttcaggacaacgacgttcatgacacacccaaatccttggcgatcgcgacgatcgcctgctggaagcacgctagcggcgccttgaccacgccggcaccgacctggccgatgccgggctcgcgatgcgcgatgccggtgttgatgacgggcaccacgccggaatcgacgaccaggcggatatcgatgccggtcggcacgcccgcgaagtccatcgcggcgatggtccattccggattctgcgcgaccgtgatctcgcccatcgagcgggtgaagttgccggcctcggatggcgcaccggcaccgacgaatccggcgacggccggcgccgccgccatcgcaaatccaccgagaccgatcgtctcgacgatcgcggaatcgcccatgtccggattggcgtccttctcggaatagccggcgaagtacaggccttccggcatttcgaccggcgcggtgaaccactgctcgccgagcccagagacgcggatgccgaaatcggtgccgttgcggcacatggtggtgacgatggtcgaaccgcgaatgccgttggcgggatcggtgatcgccttgcccatcgccattgcgatgttgaggaagaactgatcgttctgcccgatgaacgcgaggcattcggcgagcacggcgttgtccgtcgaggtgcgcgccatccagggcgcgatctcgcgcaggaagacgctcgagcaggcgagattgcgctgatgcaattcgtcgcccatcgacaagccgcgcgcgacgatcgatttgaggtcgatgccgccggcggcacggatcgccttgcccagcgtcggcccgaacacgtcgcgcagccaggcgagccgcttcagcacgctcgcgtcgttgccgccgaaacgcatcaccttgccgagcccctcgttgatcgcgcaataggcgcggttcgcgaagcgcgcgttctcgaccacgaacaacggcatcgacatcgtcgtcatgccggtcatcgggccgaccgccccgaaatggtggttcgggtgaaattcgatctcgccgctggcggcgagcttggtcgccgccagcagatcctttgcccagccctcgaacacgatggcgccggcgaccgcaccgcgcatcgggccgcacatccggtcccaggaaatcggtggtccggcgtggaggatcatccgttcgcgcaggcccgggatcagttgacgggcgggaacgatgtcgatcagccgaggctccccttcgagaatccgggtgagcgcctgctggtttgcgtcctcgatcagcttcatcggtgcgccctcacacaccgagcttcgcgagcagggccgccatctgcggatcgccgccggccgaaggtttccagtcgacgtgaacgacgctgatgtcgcagtcgcgaaggtccttcacgaacccctcgagcccgacattcacgacctcgaccttgcgcgccaacaattgctgatactgcggcctatcctgatccgtcatcgtctccgccctaacaaagttcgttttcgttacgtcgaactaataagaaaacacttacttagtcaagaccggattctcgggaaatgcgaaatcttcgatgcgaaggaaattccgctaaaaaaatgctccgaacttcgttcggagcagtctgggagaactcgaaattctaatcggtgacggcgtcagcgtccgcgtagttcgtggcgcagcacgatcagactgcccgcgaatgcatcctggccggatgtatgcccgatcgccgagagcgccgtgagcgcgcgacgaaatccggcgcgctcgccgctcatcgttgcatgaatggcgtcgtgcagcgctgctgcgccgtaccccagcgccgccgcacgcaaatggattcggctgatgtcattggtgccgtcaagcagcgcgcggcatcggtcccacaatgcgtcgcgacattcggtgcgccccagcgcagccagcgcgatcagcgcgccgccgatcagatcatcgccggacggtgtcagccccggcccgagaccgatcaagctgccaagccccgactcgcgatccgcatcgggcgcgccggacaggatttgctccagcgcagcaagaccgggcatcgcagcgcgaacgaggagagacgcatcgcctggaacacgtccggagccgaccacggcgagaccttccgcaatcagtttaccgccccacaccgcatcgaccgcatcaagcccgcgttgcaggctgccgatcgaccaatggggtgcggcgcgcggcgcccagacggaccgcgaagcaagattcgccagcggcacgcctgcgatccacagcatggagtcggcgacccgcacgggatcgccgaccacaagtcgcggccatcggaaatcaccgaggacatgcaatggacccgatccgatgccggcctgtccgacgcagatccagatcccgtcgatgacggcgtagaacgaacgttcgaacgcggcgacgacctgcccagcggcgcgatcgcgaagcgcccggtcggcaagcagccccacctccacacgatcgcagacggacggtgcgggcccgggacgccgctcgtctcgtgctcccatgcgaccggcctgccttccgtcagcttcgcggcctccgaccaacatccgccctcgcctcctcagcgtgcctgcgccgcgaagcgctgcgctgcgccggcctgggcctcgccgcccagataggccgcctcgagcagcggatcctcggcaatgatgtcggcggggccactcttcaggatcgagccggtctccaagagataggcccggtcggccaacgcgagcgcgtggcccgccatctgatcgaccaccatgatggtcatgccctcgctgcgcagccgctcaaaggacgcaaacaattcgtcgacgacgagcggggcgaggccgagcgacggctcgtccagcatgaagatcttcggcccggtcagcagtccgcgcgccaccgcgagcatctgctgctcgccgccggacaacaggccggcgcgctggtcgatgcgctccttcaaccgcgggaagcgcacgaacatcgcctcgatctcagcatcgaggtcgaggcccttgcgcgcataggcgccgagctcgaggttctgcttcaccgtcagttccggaaacacctgccgtccttccggcaccagcacaacgcccgagcgggcacgcacatgcgcgggcatcgtgtcgatgcgcgtctcggcgagccggacttcaccgatggatcgcggcggttcgagaccggcgatcgaccgcatcagggtggtcttgccggcgccgttggcgccgagcacggcaaccgcctcgccgggcgcgaccaccagatcgatcccgttcagggcgcgcgacaggccatagaacgaatcgagtgccttgacctcgagtgcggtgccctgccgcgccggccgcggcgcgcggctctgctcacccggcgaggcatcgcccagataggccttgcggaccgccggatcgttgcggatcgccgttgcatcgccgatcgcgatgcgcttgccgccgtcgagcacgacgatgagatcgctgagcgacatgatcatcggcatgtcgtgctcgacgatgatgacggcgatcccgagatcggcgatccgccgcaacagtgcggtcaggcgctgcttgtcgcccttcgagagacccgccgcgggctcgtcgagcagcaggatgcggggccgcagcgccagcgcacgtgcgatctcgaccagccgcttctcgccatgcgacagcgaatccgcaagccggtcgacgtcgccgtcgacaccggcaaagcgcagcaggagcctggcgaatccctcggtctccgcgttgcgcagcgcagagacaagaccgccaagacggccgacccgctcggcgagcaggatgttctccaggatcgtgagtgagccgaacaattgcgtggtctggaacgtgcgcgccacgccgacccgcgccagcagatgcgacgtcatgcccgtgacatcgcgatcgccgagcatcaccgttcccgcctgcggccggtagaagccgcagagcaggttgagcgcgctggtcttgccggcgccgttgggaccgatgatgctggtgacggcgccgggcgccgccctaaacgacacaccctgcacggcacgcacgccgccgaacgagatcgagagatccgtcacgtcgagccccgccgcgttgtgcgtttcgaggatcgccgcatcgacatgcgccgccgcgatcgcgggctccgcgacgggcttgcgcgccggccggaattttgccgcgagctgctccacgaggccgacgatgccggagggggcggcgcgcagcacgacgaacagcaacacgccgaaggccagcaggcgatactcggcgagatccgacagcgcttccggcagcagcaccaccaacgcggcgccgatcaccgggccgagcgcggagccggcgccgccgaccatcacgccgaacagcagcagcaccgattgcaggaacggaaacgagctcgggctgatatagccctgcagcggcgcgaacagcgcgccggccagcgccatcgctgcggccgagatcacgaaggccaccgcgcggacctgcaccaggtcgatgccgagcgagcgcgtcgccacctcggtgtcgcgggcggcgcgcatggcatagccccagccgctgcgcttcaaccgctcgaacaggaacaggccggcaaacaccagcacgatgcccgcgatagccagcgaacgctccgacagcgcatagccgaacacgctcggcggcgcgctcagcatcaggccgttgccgccgccggtgagatcgcgccactcgatcgtgacatgttcgacaatgaaaccaaaagcaatcgtcaccatcgccagatacggcccacgcacgcgcagcgccggcagcgcaagcaggccgccgacgatgctgaccagcacgatggcgcccgccgtcgcggcgaggtagggccagccggccttctccatcagcagcactgtggtgtaggcaccgatcgccatgaagccgatatggccgagcgatatctggcctgcgaggccgagcaggacgttgagcccgatgcaggcgatcgcggtcagcgaaatcgtcgcgatcaggaacacggcgtagctgtccgcgaccgcggcatagaagatagcaatcgcgaatgccgcgaccgcgaccagaagggaagcgcgagagatcataccttcttaactccagctcggccgagcagcccgtgcggcatgatgacgaggatgacgatgacggacgcgaacgtgatgatctgggtgtagaccgacccgagatagttggtcgcgaacacctcgatcaggccaaggcacagtccggccagcatgacgccccaggcgctggcgagaccgccgatgatcgcggcggcgaacgccttgatgccgaacagcgtgcccatctccgaggagacgttgagcagcggcgcaatcagcagcgcggcgacgcctgccagcatcgccgacaccgcgtagctcgcggcgatggcgccgctgacattgatgcccatcagccgtgcggcattgggattttgcaccaccgcaagcatcgcgacgccatgccgggtgcggcggctgatcagatgcagggccagggcgagcagcaggccgaccacgggaatcaggagctgcagcgggtagacccctgccccttccacgatctggatcggcttggccgcgagcaccgacgggaagctgcgcggctccttgccgaacacgaacagcatcacgttgtcgacgatgatgccgaccgcaaccgtcgccatcaaccagttgtccgacccgcgctgcacgaacggacgaaccgcgtagcgctcgatcagaacgccgtagacggcgcagaccagcagcaccgcggggatgccgatcgcggccggccagccccacacgacgaggaagaagtatccggcaacggcccccagggtcatcgagctgccctgcgaaaagttgaccgtgccggacacggcgtaagtgacgtgaaagcccagcgcgagcagaccgtacatgctccccagcgccattccggttattatcgccgaaagaaacgacatcgatgatcaccccgatctgcttgctggacgaccgctgccgtcagttcttgaatggcaggatgtggttgtcttcgaagtgggcccagatgtagtcctgcgccgtcagcgcatcgtgcttgtcctgggcgaacggcttttcataggtcttgatcaggccttccagccggtcgatcccgtagaagccgtcacgaatcgcggtcggatcggtgctgccggccttctggatcgcacctgcgatcaccagcacgctgtcataggcattggcgaagccgaccgccggggtcacgtccgcgggccccttgatgtcgggatacttcgcctgcagctcggcgagcacgcgcttgccgaccggcgagaggttgccgaagaagctgtaggtctggacgaacacgacgctctcggcgctcggcccggcaagctcggtgaagcggccgccggccggtccccaatgcgacacgatcggcggcgaccagcccatccgatcgagcgacttcacgacctgcgaggatggaccgacattgccgaccaggaacagggaatcggcgcccgcctgcttgagccgggacaattgcgcgacgacgtcgacatcgttcgcctcgaacttctcgacgccggccggttcgatcccggcggccttcagcgcggcgcgcaggccgtgctcgttcgattcgccccagggattgttgacgaggatgaggcccggcttcttggccgcgaaggtcttgccggcgaacgcgacgatcgccttgtcgacctcgtcgtccatcgccgagacgcggaacacgtagttggacgccgcgccgttctgcgtgatgttggttccggcggcccatggcaccacgaacggcatcttgacgttgttgacaaacggcacgatcgcaagctggaccggcgtatcgagaccgccgagcaagaccgcgaccttctcgcgctggatcaattcgcgcgccgcggtcagcccctttgcgggattgctttcgtcgtcacggcgcaccagctccagcggccggccgagcacgccgcccttcgcgttgatctcctcgatcgcaatcgtggcgccgcgggtcaatgcttcgccggcgcgggccgactgccccgacagcgccgtgaccaggccgatcttgatcgggtcggccgcctgcgcgcgctgggcaaacggcagcgaaccgacgagaatggcgagcgcgccctgcaagacaacgcggcggcacaacccggtaatgggggtacaagcgtggttcatttctgcaattcctcccgctccgacggctcccttgccgcccctggtccgcggccgccgtttccgcggccttgacggaagtaaaaactttcttcacaaattggcgaatgtcaagcggccgatcgcgcgccgaatggagattgcgatgcagcgggagattggagcggaaccggaacgagccgtgctcggcgatgcaacatctgcgcaaccacctgatccggcgcgcggtctcgtctctcatgaccgctaccgctacagcgcgatcacgcgccgtcccgatttcgtctggccgaacggcaagcggctggcggtctacatcgcgctcaacctcgagcacttcgcgttcggcgacgggctcggcgccgagctctgcccgggcggcccgcacccggacgtcctcaactacgcctggcgcgactatggcaaccgggtcggcgtgtggcggctcatcgatctgttcgacgaactgaaactgccgctctccgtactcgcaaacagcagcatctatcactattgcccggaagtgatggacgcctttcgcgcgcgcggcgacgaggtggtcggccatggccggaccaattccgaacgccagggtgtgctctccccggccgatgagcagcgactgatcgaggaggcgacggatgtcatcgcgcgcgccgagggacggcggccgctcggctggctcggtccgtggatctcgcaatccgccgtgaccccggacctgctcgccgaagccggctaccactacctgctcgactggtgcatggacgatcagccggtgtggttctcgacacggggtggcggacgcatcctgtccgtcccatatccgcaggaactgaacgacatcccctcgattgtcgggcgcaaggacagcggcgagcagttcgcgaccatgatcgcggacagtttcgaggagatgctggcgcagtccaccaagcagtcactggtgatgggcatcgcgctgcacccctacctggtcggccagccacaccggctgcggccgctgcggcgcgccctgcaggcgatcgtcgcaaggcgcaacgacatctggatcaccaccgcgggcgagatcgcggcattctctcgcgccctgcccgacggcatcgtgccgacataagaaactggagacctcaattgaccgccatcgacacactgttccagaacgcgcggctgactgatggccagctggtcgaaatcgccgtcagcggcggcaagatcgttgcgatctcgccgtcccggcaaagttacggcgcagtcggcgacacccatgatcttggccggcgcctggtgcttcccggcatggtcgaaggtcatatccacctcgacaaatgcttcatcggcgacgactggaagccgcatcggccctgcaccgcgggcttcagcgtgcgcgagcgcgtcaaattcgagaaggaagcgctcgccggcgccaagccgatttccgttcgggcagcagccctgatcgatctttgcgtctcgcaaggcacgacgcacatgcgcagccacgtcgatgtcgacgccgcggtcggcctgcagcatttcgaagcgatcgcagcggcacgggaggcgcatcgcgagaaggtttcaatccagatcgtcgcgtttccccagagcggcatcctgacctcgcccggaacagccgcattgctcgaagacgcagttcgcgccggcgccgacctgatcggcggacttgatcccgcaggccacgatggagacgccgccggccatctcgacgtcgtctttggcatcgcggagcggcatggcgtcggcatcgatattcacctgcatgacggcggtctgcagggcatcgcggagattgaggaaatcgcgcgacggaccaaagcgtcggggcttggcggcaaggtcgcgatcagtcatgcctacgcgctcggcgaagtggccgctgacgtcgctcaacggaccgcgcaacagctcgccgaatccggcgtcgccatcttcaccaatgcgccgggctcgcacgcatttccgcccgtgctgctgcttcgcgatgccggcgtcaatgtgttctccggcaacgacaacatccgcgattcctggtggccctacggcgacggcgacctgctcgaacgcgcaatgatggtcggctatcgctccgggttcaacaccgacgatcaattggtcgcggccttcgacatggtgacggccaacgcggcgcgtgcgctctgcctccgggattacggcctcacggtcggcgcggcggcggatttcgtcgtgctggatgcacggcacgtccaggaagcggtggtcgcgcgtccgaagccgcgcgacgtctacaaggccggccggctcatcgcccgtggcggcgtggtggtgatctaaggcgcccggaagcagtgaacagggaggaatcgcccttgacgaacagccgcaatgccgatctcaatccgggctgcttgcgccgggaaccggaccgctgccctttgtggcctgatgcggccgtgccttgcgtgactacccgagcccaggcaaggttgacgccgtgacagagacgacagcacagaccagccccacccgcagcacgacccgcggaaaacgtccgcgcgactccgcgctcaccaaggaggcgatcctgcgcgcggcgaccttcgagttctgccacaatggcctcgggggtgcacgcgtggaggccattgcgcagcgcgccaaggccaacatgcgcctgctgtacgcctatttcggcgacaagaacgggctctacatcgcggtcctcgaggacgtctacaccgagatccgcgccgccgaacagcagctcaagctggatgatctcgagccgatcgccgcgatgagcgagctgatcgatttcaccttcacgttcttcgggcagcaccagaactacatcgccctgatcaacaccgagaaccttcaacgcgggcgcaacatgcgcaagtcgcgcaagatcgccgatctcactctgcccctggtcgcaagcatcgaaagcatcctgcggcgcggtgtggcggcgggcctgtttcgcagcgacgtcgatccgatccagctctacgtctcgatcacggcgatgagctatttccacgtgtccaaccgctacacgctgtcggcgatgttcgaccgggacctcggcgatccggactggcttgcgctgcggcgcgagcatgcgcaggacatgatcctgacctggctgacggcgcccgttggggaacgcaagtcaaggtctgcgggatcgaaggtgaccgcgcaaccccgcaagccgtcgcgctagcgggcgcggcgcacgatacggcatcgtgcgccgggaatgcggctcagcgggtcgcaacgacaccgtcgctgcgcggatcgctggccccttccatcaggccatccggatgccagacgatcgcgccggcgtgtcccatgaactcctcgaacgggccggtcacctgaatgtcgtggccgagcgcgcgtagccgctcgatgatcgccgggtcgaagcgggattcgatcttcagattgttgttttcctcgccccaggtgcgaccgagcagccaccgcggcgcggtgatcgctgattgcagctcctggccgtgcatggcgtagcggctgaagatcgcggcctgggtctgcggctgcccctctccgcccatcgtgccatacgagatcaaccgcccatcgccgagttcggccatcgccggctggatcgtgtggaatggcaagcgccccgggtcgagcctgttggtatcgctctcgccgagcccaaagctcgtcccgcggttttgccaggtgacgccggtctcgggcaggatgacgcccgaaccgaactcccagtacacgctttgaatgaagctgacgctgagcccattgcgatcggtcgcagcaagccacaccgtgtcgccctgcttggacggatcgggccacggcgcagcgcggctattcgatactgtttgatgcagcgcggccagcgactgctcggacaggaattcagcggccgcgcgcttcatgtagtcgggatcggtgacatggccgttgcgaatccggaacgcggccttggtgcattcgacgagccggtgcagatgatcgacgccgtcggcctcatcagcgatgcgccgggcatagagcgccaggatcagcaacgaggccagcccctgcgtcggcggcggcatgttgtagatcttgtgtccggacacctcgaccgagagcggcgtcaccagcgacgcctgatgccgttccagatcggccagccgcagcgggctgcccgcccgttcgaggtcggccgccatcgagcgcgccagttcgccgtgatagaaatcaaagaggcccgctttggccagccgccgcaacgtctcggcgacgcgaggctggcgcagccgcgcaccgaccgcaagcggcgcgccttgcggcagatagacctcggcatagccgggcacgttttcgagctcgtgccgcttcttgccgatgttttcatgcagcgtgctggtgacggcgacgccgtcctcagcatggcggatcgcgggctcgagcagccgcgccagcggcaaccggccgtcatgacgatcgcggctgagttcataggccttctgccagccgtcgacggtgccggcgacggtgagcgcagcgagcgggccgcggccgggaatgctgctgcaaccgcgcgcgcgataccagtcgcgatcggcggccatcgcggagcgtccgcaagcctggatcccgaccggcggagagccggcgcgaccgacgagccagaagctgtcgccgccgagtccgttcatgtggggatagaccacggcaatcgtcgccgccgaggcgatcatcgcctcgatggcattgccgccttccgacaacaccgcgagtccagcctgcgccgcgaggtggtgcggcgcggtcaccatgccgccatagcttcgctttgtctgcaacatcagcccgtttctccaaggccggtatgtaataatatttttacttaccgtgtcaaggagctaaagatccttccctcggatgcaggggttcgtcgcctggcgcgacgccccctcacccgccggaccagcatggcatcgccggaggctggccgttgaagttcatccattgccccgggtgaggctcaggcagccgcgacctcgtggcccgccatgacttccagcgccttcaagatcgccgaatggtcccaggctttgccgccgagcgcggtacaggtgttgaacagctgctgggcagctgccgtacctggcagcgacaacccgagtgcccgcgcgccttcgagcgcaaggttgagatccttctgatgcagctcgatgcggaagcctggatcgaagttgcgcttgatcatgcggtcgccatgcacctcgaggatccgggacgaggcgaagccgcccatcagcgccttgcgcaccagcgcgggatcggcgcccgccttggaggcgaacagcagggcctcgctcaccgcctcgatggtcaaagccacgatgatctggttcgcaaccttggtggtctggccgtcgccattgccgccgacatgggtgacgttcttgcccatcgtctcgaacaccggcttcatcgcattgaacgcccgctcgcgcccgccgaccatgatggtcaggcttgcccccttggcaccgacctcgccaccggagaccggtgcgtcgagatagtcggcgccgagcgcatcgatcttgcgggcgaactccttggtcgccagcggcgagatcgagctcatatcgaccacgatcatgcccttggagacgccctccgcgacgccgccctcgccgaacagcacggcttcgacatgcggcgtatccggcaccatgataatgacggcgtccgcctcctgcgcgacttgcttgccggactcgcaggcgatgccgccggcagcaatcagctccggcgcgagcggcgtgacgtcgtgcaggaacaggcgatagcccgctgccaggaggtggctcgccatcggacgtcccatggtgccgagcccgatgaatcctatgtccttcattgtcgtcgctcctgtccgccggattaagtcacgagagtgtgtgcggcgtgccaggcaaggctctcgagcgtggtcgaccgcggcttgtattcgcatccgatccagccccgatatccgatgctgtcgagatgcttgaacagatagggatagttgatctcgccggtgcccggttcgaaacggcccggattgtcggcgagctggacatgcgcgatccggccgagatgcttctgcagcgttcgtgacagatcaccttccatgatctgcatgtgatagatgtcgtactggatgaacaaattgggtgagcccacgtcggcaatgagctgcaccgcctgttccgtcccgctcaggaagaagccgggaatatcgagcgtgttgatcggttcgatgagaagcttgatgccatgctgcgcgagcgcgccggcagcgaagcgcagattgggcaccaggacttcgcgcagctccgccgcgtccgcgccagtgggagcgatgccgaccaggcagttcagctgccggcagtccagtgccttcgcgtagtcgatcgcgcgcaccacgccgtcgcggaattcatcgacccggtcgcgcaggatcgcaatgccccgctcgccggcagcccaattgccggccggcagattgtgcagcacctgggtcagcccagagcgcgccaattcctcgcgcaacgcgcctttctcgaactcgtagggaaacagatactcgacagcattgaagccggcggccttggcggctgcgaaccggtcgaggaacggcagctcgttgaacagcatggtgagattggcggcaaattgaggcacgggtcggatctccgcttggggcagcgctggatgatgtcgtcaggccggcaacagcgtgccggttcgttgtgcgctcggcacgtcatcgagcggaagatcgagcacctcctcgaattcgacgatgttgtcgatctccgttcccatcgcgatgttggtgacccgctcgaggatgaactcgaccaccacgggcacgcggtgcttcaccatcagctcgcgcgctgtcgcgaatgcggcctgcgcgtcgttcggatcggtcacgcggatcgccttgcagcccagcccttccgcgacggccacatggtcgacgccgtaggcgccgatctcgggcgcgttgatgttctcgaacgagagctggacgtgatagtccatgtcgaagccgcgctgcgcctgccggatcagcccgagatacgaattgttcacgaccacgtggatgtagggcagattgaactgcgccccgaccgcgagctcctcgatcaggaactggaaatcgtagtcgcccgacagcgcgacgatgtcgcggtcgggatcggcggcgcgcacgccgagcgcggccggcagcgtccagccgagcggaccggcctgcccggcgttgatccagttgcgcggacgatagacgttgaggaactgggcgcccgcgatctgcgacaatccgatcacagtcacgtagcaggtgtcgcggccgaacgccttgttcatttcctcgtagacgcgctgcggcttgatcgggatgttgtcgaaatggctcttgcgcagcatcgaacgcttgcggtcgcgacaggctgcgggccaagcctgccggtcgcgcagtctgccggacttccgccactcgcgggcgacgctaacgaacagttccagcgcggccttggcgtccgacacgataccgaggtccggattgaagacccgcccgatctgcgtcggctcgatgtcgacatggacgaatttgcgacccttcgtataggtctcgatcgaaccggtatgccggttggcccagcggtttccgatgccgagcacgaaatcggattcgagcatcgtggcgttggcgtagcgatggctggtctgcaggccgaccatgccggccatcagcgcgtgatcatcgggaatcgcgccccacgccatcagcgtcgggaccaccggcacgttgacagcttcggcgaaggaaaccaggagctcggatgcatcagcgttgatcacgccgccgccggcgacgatcagcggccgctccgcggcgttgagcatctcgagcgccttctcgacctgcttgcgcgtcgccgtcggcttgtagaccggcagcggcgaataggtctcatcgtcgaactcgatctcggccaattgaacatcgagcggcagatcgatcagcaccggtcccggccgccccgagcgcatgacatggaaggcctggctgaacacccgcggcaccagcgccggctcgcgcaccgtgacggcccatttcgtcaccggctttgcgatcgcctcgatgtcgacggcctggaaatcttccttgtagagccgcgctcgcggcgcctggccggtgatgcagaggatcggaatcgaatccgcgatcgccgaatagaggccggtgatcatgtcggttccggcggggcccgacgtgccgatgcaaacgccgatgttgcccgcgttcgccctggtatagccctccgccatatgcgaggcaccttcgacgtgccgcgccagaacatgccggatcgagccgttgcgcttcaatgcggagtaaagcgggttgatcgcggcgccgggaacgccaaaagcgcaagtgatcccctcgcgttccagtatgcggactgccgcatccaccgctcgcatcttcatctgatgatcccgcttcgcttgagttggcctgagcaggatcatcagcgccacgaccatcgatctcaacgcaatcgacgggattttccgcgctgtggcagcgctcgcgatttcttgcctgtctccaagcgattagcaccggcgacgcaatggaaaccggcaacgacgggaaagccggcgggcttcacgcctgcggctgcgcagggctgctgccgcgcagctccgccgtgagctcggctgcgatcttgtgcacggtggctccgatctccggcaggcggtcgtccgtcatccgatccgccatgcccgacaccgagaccgcagcgaacggctcgctgcaatcgttgaagacgaccgcggccacgcagcgcaggccgagccgggcctcttcatcgtccaccgcatagccctggcgccgcacgatctccaattccctgaacagctcacccggtcgaatgatcgatttttcggtcaggcgcggcatgccgcgacggcggatgatcgcagtgacatcggcatcggaataggcggccagcaccgccttccctactcccgaggcgatcaaggcgacgcgtccgccgaccttggtcagcgagcgcatgatctcccggctttcgatacgggatacgacgatgatggattcatcatcgaccaccgcaagattggcggtctccctggtctggtcgcgcagcttgcgcagatagggcaaggcccgcgcggaaaaattgcgccggcgcatgaaggtcgagccgaccacgaagctctgcgcaccgatatgccatttcgactcctcgcggtcgaactgcacgaacctgcggttctccagcgtggtcagcagccgatgcgccgtcgacggcggcaagccgatgcggatcgcaagatcggtcagccgatagccttcgtcgtcctcggcaagcgcttccatgatttgcagcgcgcgatcgacggattgcacgccgccgtctcgcgcgtccggatccggctgtgcacgaacatcgggatcggacggcttgcggcggatcggctctcttttcatgacgacctgcccccaaccggttgtggttcagaacgaaatcgctcgccggaaacgagcgtcagagttggcatatggcatgccaaacgacgtcggagtcaaggcgacaatactggcaagtaggtcagcatttttgccgttcttatcgaagtaggcttcaattcttctatttgacttctggaataatgtataccaagattgttccttaacaacccaaccgggaggaccatatcatgttcgttggggacatccttcgcaccaaccgtgcgcccgcggtgacgatcggctcaagcgaaaccgtgagcatcgcggccaacctgatgtacgccagcaatgtcggcgcactcgtggtcaggaacgtctcgcgcagcgtcgacgccgccgtcgtcggaatgttcagcgagcgcgacgtggtcgccgtgatcgccgagcgcggcactggtggccttgccgcaaaagtcgcgcagttcatttcgccgcggccgttggtgtcctgcacgtcgcaacacagcctcaccgaggtcgagcatatgatgggccgtcacgacgtccgccatatcccggtcatcgacaacggccggctcgtcggcgtcgtgagcatgcgggacatcagcctcgcgttcgaggaggccgactgcgcggcctgaccgacatctaaggcattgccacccgtttcgagccgttgcggctcgagccgtgtccccattctgctcgcgaggatttcatgaagatctgcatctacggcgccggtgccatcggcggctatctcggtgtcgaattgatgcgcgctggcgccgatgtcagcttggtcgcacgcggcgcgcacctcgccgcgatgcgacagaacggcttgaagctgctgatcggcgacgaggagcgcgtggtgcatcctcgttgcaccgataaccccgccgaactcggcgagcaggatttcgtcatcatctgcctcaaggcgcattcgatcaccggcgtcatcgaaccgatgcggcccctgctgggtgagcggactcgcatcgtcaccgccgtcaacggcattccctactggtatttttacaggcatggcggccggcacgaaggatcgacgctcgagagcatcgatcccggcggacggcagtggagcgaacttggcgctgcccgcgccatcggttgcgtggtgtacccggccaccgaaatcgaggcgcccggcgtgatccgccacgtctacggcaacaactttccgctcggcgagccttccggcgagatcacgcccgacgtccagcggctgtccgatctgttcacctcggcgggcatgaaggcgccggtgctcgaccgcatccgcgacgagatctggctcaagctgtggggcaatgtctgcttcaacccgatcagcgccctcacccacgcgaccctcgacgtgatctgcagcaatcccggcacccgcgcgctgtcccgggcgatcatgctggaagcgcaggcgatcgcggaaagcctcggcgtcaagttccgggtcgatgtcgaacgccgcatcgagggcgcacgcaaggtcggcgcacacaagacctcgatgctgcaggatctcgagcgtggacgtcccgtcgagatcgatccgctgatcaccgtggtgcaggagatgggccggatgaccgacattgcgacgcccgccctcgacgcggtgctggcgctggtggcgcagcgcaccaggctggccggcctctatgacggggcggccggcgccgaagcacaatcgcttgcggtggcgtgatcgtgatggccaatgtgacgcgctgggtccgctttcgccacgatgccgaaatcggctacggacaactcacttcgtccggcatcgccgtgcacgcaggggagatgttcggcgacacccgaccgaccggacagacgttgacgctcgacgaggtcgaactgctggcgccggctcaaccaagcaaggtcatcgcgctctggaacaattttcacgctcttgcggcgaagctgaaatcacctgagccgcccgaaccgctgtacctgctgaaagcggtgacaagcgtgaccgagcccggcgccgtgatcacgcgcccggtcggctacgacggcaagaccacctacgaaggcgagctcggcatcgtcatcggcaagcgctgcacggcagtcgcccccgaacaggccgacgccttcatcttcggttacacctgcaccaacgacgtcaccgccgcggatatcctcaatcgcgatccgacgttcccgcaatgggcgcgggccaagagcttcgacggatacggccccttcggtcccgtcatcgcctcgggcctcgatcccgcgcgcctcgtggttcgcaccatcctcaacggcgtcgagcgccagaactacccgatcgcggacatgatcttcagcgcgcaggcgctggtcagcaagatctcgcacgacatgacgctgttgccgggcgacctcatctgctgcgggacttcgatcggcgtcggcgtgatgaaggagccggtcaatacggtcaccgtcgcgatcgacgggatcggcgaactgaccaacgaatttcgtcagtaggcggcggcaggacgacggcctgacgccggaccaaacgaccaacagctgctttgggagcgcacatgatctccagcacgaaaccggcaacgtcgccaggcgggcctgggtgctgaacgcattcgccgcgtctgtcgtcatgctttatgccgcggccattgtcgcgggcatcggcgccggcgctcgcgcaaagctggtcctcggcggaataccggaggcatcggcgtcttacgatagtctcaagaagacgccataatacgagacctatcggccggcgcctcacgattgattgcagccggcaagccagcaatgaggtgacccatgcgtcgtcatcgacgggccaagatcgtcgcaaccgtcggccccgcgagcagttctcccgagatgctcaaggcactgctgctggcgggcgtcgatacattccgcctgaatttcagtcacggaacccagagcgaccacgcgaccgtccacgccgcgatccggagactggaacaggacgtcggccgtccgatcggcattctgatggatcttcagggcccgaagatccgcgtcggcaccttgcgcgacggcaagatcagcgcggcggccggagagaccatccggttcgtgctgtccgggtcggatggcgaccgatcggcgattccgctgccgcatcgggaaatctttgcggcggtggctcccggccacgaccttctgatcgacgatggccgggtgcgcgttcgcgtcattggtctcggtgacgatttcatcgaagccaaggtgattgtcggtggcacgatctcgaaccacaagggcgtcaatctgccggggacggtgctcgatctttcgccgctcaccaccaaggaccgcctcgatctggagttcggcctgaagctgggcgtcgactgggtcgccttgtcgttcgtgcaaaagccctccgacatcatcgaggcgagaagcctcgtcggcgaccgcgccggcctgatggccaagatcgagaagccggcggcgctcgagcggatcgacgacatcatccagctgtgcgacgccatcatggttgcgcgcggagacctcggcgtcgaaattccggatgaggacgtgccggggcgtcagaaagagctggtacgggcgtgccgtctcgcggtgaagcccgtgatcgtcgccacgcaaatgctggactcgatggtcgccgcgccgactccgacgcgcgcggaggtctccgacgttgcgaccgcgatctacgacggcgcagacgcagtgatgctgtcggcggaatccgcgacgggccgctatccgcgcgaggccgtcgagatgatggatcgcatcatccgcagcaccgaacaacacaagatgtatcgctcgatcgtcgaggcgacccagcccggcgaggagcagacgccgccgcatgccgtcgcgacggccgctgcggacctcgcctccgtggttcacgccgcggccatcgtggcctacacgtcgagcggcaccaccgccgcgcgcgtcgcacgcaagcggccgagcctgccgatcctcgccatcactccaagccgcgaagtgtcccgccgcctgtgcctgctgtggggggctcacagcgtcctttccgacgatgtcgggagctatgaggagatggtcgagcgcgcgacggccctcgcgcgtgcagagcagtttgcatcaagccgcgacctgctggtcgtcgtcgccggcattccctttggacaagcgggaagcaccaacaatctgcgggtcgtttcgctcccctgatcgagcggcgcccgaaactcagggcatggcgccaaaccaaatcacgagcgcgaacatcaccagcagggcgacggtgatgatcgcttcgctcgtgggtattcgcttcatgggcagcctccgcgcgcgggagcgggatgctgcgacggggcggtggttcacatcagcaaacaccgcccgcttaaaatgcatgcggacggcgtcggctctagccccaggaaggaaatgcaaaatcccggtagcgactaggtctacacatcggggccgaaagttcacgtgacgatcgggatactccaaagggtgtagggatcgccgaccgcaaaggacgtcattgaacctattctcggcgccgtcagcgcctctcgcccggtaccgccgttagcgccaagacccgtccgggccaaggggcaaagtcggatggtcgcggttgttctcgtcgggcttaatgctgaacccctgtcgaaacgcgaaccagatgaagccgccgagtgcgaccatacagatcggcgcaagaatccagtcgggcatggcgtggtcctccagtctaccgacagtttggtcgccgctatcctgggccaagttcaatacggatgtcgcgcgccgtgacagcgcgcccagaccggcaccaaaaagcgccgcgcggcgcgaaccaaagcccagattttatccgagggagcagcagcgccttcgcccaaatggagccggcaccgtgccgcaagcgattgaaaacactggagcgggtgaagggaatcgaaccctcgtattcagcttggaagtcgccgcattctgcaatgttatcaagagccattctgacatttctcagcttcttgggcgattgagatcgctccagagtttcgctttgtcggaatggcgacgggtttagcccttcgcccgattggtctaaccatgtaccgtcaatcgaaggacaagacattcaaaggagcaagacatgcgggctgtccactcgggccaaaatggtctcactcgtttgctcgctggcgtcaccgttggtttcgggatctattccggttctgcgctggctcaggacgtgctgcggaccgctccgtatcccgttggggtgacgcagctcgaatatgtcgatccgtccgagggcggccggcctctgaacttgatgctgatctatccggcggtcccggctacaaccgccgttcctttcaagattttcctggccaccaatctgaacctttacaaggacgcgcccgtcgtgtccgatggcgtgaagcgtccacttgtcatgttctcgcacggggcgggcggcaacggttcgggttatgcctggttcggcgaatacctcgcctctcacggctatctcgtggcgatgctgtatcacttccgggccaacaccttcgactccagcgcgctctacgtgcgcagcaggatctggcagcgcccgcgcgatctcagtctggatatctcccatcttcttcaggacaaggtttggggaccgcatatcgagccaagccagatcggcgtggcgggacattcacagggaggattcacttcgctctggatcgggggcgccaaggtcaatccggaacttttcctgaagtttcagcgcagctggaaggacaatgaggcggtgccggcctatatccgcgagcagatgaagcttgatgccgaacccgcccgcgacctgcgcgacgatcgggtccgggcggccttcgcgatggcgccgggcgatatccgggggttcggcatggacgaggccgggctacggcaaatggcgatcccgacctatctcatcgtcggagccggcgacacgacaacaccatctgatgaaaacgcagcctttgcggcgaaatacatcccgcatgctcacttggacgtgctgcccggtccggtcagccatgagatcttcggcaatgagtgcgaccaggtgggacgcgataactttcccgaaacctgcaacgatactcccggcgtggaccgggtcaagctgcacgaatacatcggcaacgccgcgttgcagttcttcgattcgaacctccgcgtgcggagagagagcccgaaatgacgtgcccgatcgccgctcttgcggcctgatagccggaagaagcctgttcgccgacgcctatttcgcgtcaccccgcacgatgtcatagatgacacccacgaggtcgtggagcttgtccgcttcggccgccggctgcgagttcgtctggagcgtaatcatcagttcttccttttcgaaccacacatagagcgttcggtagccgagcgtctcgccctgataaaaccagtgtgcgccaaacgatccgagaactgccttgccgagaccgagcgagaatccgcgcggatcgtctgccgttacgtctgcgatcggctcacccgtcctgatcgacacgagtgccatccattccgcctgctgcttcggcggcaccacgcgtcctttgagcacggcgcgcatccagcggtccacatcgcgcgcgtcggcgatcgcgccacctgccgcctgagcccatgaggtgctcatcccgcgaacgtcaccacccatcagcgcgtgattccaggactgggtgcatttgggttgataatcggcgcaggcagggttgtcgaaatagccgtgcgccaggcgatcggtcaccgggtccggatatgtcccgttttcgtagaacgtgctgtgcaacccgaacgcttcgataatcatgtggtgcacgagatcacgataagactggccggctgcctttgccgcgatcatgccggcgaggatgtagttggtgttcgaataatggtagcctttgctcttaggcaggtcgccgcttccggcaggatagacgaggtctatcaggttttcggcactcagctcgcgcgtgggatcgttgatccatatgcgggacatggcttcggtctcggagtagttcgggatgccgctcgtcatgttgaggagacgctggatcgtcacatccttccacgccggatattgcggaagccatttgccaagcgcgtcgtcgatggacagcttgcccgcagcctcgagcttcaggatcaaggccgccgtgaaggacttcgacgtgctgcccatctggaacagcgtgccctgccggaccggagcatcctgcggaccgctgccgatctttccggcgaacgcctcgatagccgggccggtgtccccgaagctgacgtaggcggcaactcccgtcaccttctcagctgagctgcggtcggccagccatgcgtccaaggccgcctggattttggcgatgtgggttgaatccgcttgtgcgcccgaagccgcgaggatcatcaggcctgccgcgaccatcgccgccgcccatttgcctcccaacatggtgcctccttcggcataccccgcagcaatgtatcgccacatcaacgtcgccgctacgccgtgggcgtaaaccggcgccgaagcatgggtcgcacctcgcccgaagctcgcatctcatccgagagtcgcgatcatctctgttcgagcgtaccggccatcgtcgtcagacggccactagctacccttattggagacgatcatcataaataagaaccactttgagtagagattgaaaacgcccacaaatctgcgtcagccttcagccgtgatgtttcaaaattgtcggaatggaatcagaatggaagtttaaaatttctggctaagccattgaaatcgtttttggagcgggtgaagggaatcgaaccctcgtattcagcttggaaggctgctgctctaccattgagctacacccgcatcgaacgatcccctaacacgacccgacggccgcctcaactgcctcgacgggcgtgattatacgccggtccacggcaacatgccggcgcattgcgcccggttcctggcccggatcggacggacggcggccttaacagcggcggattcgccacctatattgctggtcccatcaacaaagaaaggaggtgatctagtgtcttgtctcaagcgctgtcacctcgctgggatcgcccgctaggcgctgagcaatcagcctggcatcggggcgctctcagccctggaccagcgagacatcaacatcgggggcgcggcggaagtgattccgccgcgcctttctgctgttcgggcgtcgcgaatcggcgccgccacacgacctgcgggctacgtcgtagcagcacaaaagtggcctgatccgctacagatgagatgtcggactgggtggccgcgagccgtcctagaacatgacccggaaaagcgcgaagcggttttccgggaatatcatgctcgaacaatcatcgcgcgccagcgcctgccgcatcggaaatgaggagttcgctacatgctttatgccatcctggcctatcacgtcgaggccgaggtcaagtcgtggaatgccgatgaggacgcagccgtgatggcgggcctgcgcgaggtccatcaacggctgaagggccggctcggcccggctgcacggctcggcgagacccgcaaggccagcaccctgcgcgggcccggccatggcgtcgtgatcgacggcccgttcgcggagaccaaggagcagttgctcggcttctacgtgatcaattgcgccgatgaggcggaggcgatcgccgcggcgcgcgacctgcgcagcgtcaacccgtcggccgtctacgagatccgcccgctgaagctctacatccccggcgccccttttccggagaccgcgggcccgagcgacgtgtagaagttgctcagcgactcgagcgtttcggcaatttcggcagccggctcggatcgaacttcggcagcggcaaatccggcggcggctcgggcgccacctcttggctcggcatcagcgtcacctcgaaggcaaggtcgggcaccgcatcggccctgcccgtggcggtcgcgatcgggccgctcgcgactccctcgagccgcaccacgaggtcgtcggtgccgaacacggtctgatgaccttcggagtgccgcctggcggtgaggacggcggagaagcgctcgccgtcgacctcataggtgccgctgtagagcatgatggcatcgctgccccacagcctgccatcggccatgtgcacgatgccggtgccgtcggcgagcgacgttcgaaaccacgccgcataagtgccgttcttgagcatggagcctgtctccactcgctccgttttcacagcaaacgatctgggcaccgttgcgttaacaggaagtgaaggaacccgggcctgcgctcattggccgtcgatctgccgtcccataatggcgatcgccttctgatagacccccgccgcgttccatgcctcgatcgccgcgaagttgggttccccgggctgatagccggcgccggcgcgccagccattggcgcgcaggaagttcgccgtcgaggccagcgcattggcggcgacgtcgagattgccggtgccgtaggcgaggacattcttcggcatgaactgggtctggccgatttctccgtgcatcgaaccacgcgtgctcccggacaaactgccgcggtcgatcagcttcagcgcggcatagagctgctcggtgaagaactccggccggcggcagtcgtaggcaagcgtcgcgatcgacgacagcatgttctggttgccgcgctggctgccgaaaccgctttccatgccccagatcgcgatcagcggtcccggcggcacgccgtagcgctgctggatcgaggcgaacatcgccgcctgcgactgcttcagcgatcggccgcgcgccacgatggtcgccgatccccgcttggccatgaactgctcgagcgacaggccgaagctgcgctggccgcgatcggcggcaatcgtcgcgctggcataatgcgcctgcatcaacgcgtcgatcgcggtggcgccgacgcccttggccctcgcctcaccggcaaactgctccttccaggcttcgaacccgccgggcccgttgccgcactgcgccgcgttggcctctgcgcccagcgttgcaaccatcgcgacgatggcgagcgccgacgccgcaagctgccagcccctgatcatccgaaacctcctccgaaaatatgccgccgcccccgcgggcgcggcgctgacgatggccggatttacatgacccggcgatgaacgatccgcctcagattcggccgcaagcgacacgataggtcgccgggcgcggattggccatcccgggctacgccagccggccgggacatttggccctccacggctccggcggagcggcggagttcggcgtccgcgtccggtgcagacttgcgcaacccggcgcttgacattgacattaacgacaaggtgctaggccggccctcgacaggagatcgcgatgaagattcaggaggcggcccgtcatctcggcgtcagcgcgcggacgcttcggcactatgaagcggccggcctgatcgtgccgcgccggacgtcgaacggctatcgaagctattccgcgccggagatcgaacgagctgcgtgggtgcgggacctgatcgcctcgggtttctcgacccgcgagcttcgcaatctcctgagcgcgctcgaagacggtcggcgtgcagcgcgtgtcagctgcgccgccgtgatgcaggacaagctcgaccagatcgaccgcgcgatcgcggcgctccgcaagcggcgccttgccttgtcgcgacggctgaccggatcggatcgcgaccaccgcaacgcatgagggcatgatgaggaccccgatgaggacttggcaatgaagatactcaacatcctggtgaggcgctatttgccactggaggacctcgatcaagcggtcgccttccacgaaaaactgatcggccagacggcgcggcttcgcttcgactatccggaacacgacctgaggctcgcacaggtcgcctcgatcctgttcgttgctggcaccgaacagagcctgaagccgttcacggcgacgcatctgacgtttatggtcgatgacatcgacgcgttcgccgcgcatctgcccagcgtcggcgccacgatattggacggccccaaaccggtcccgaccggccgcaacatgctggtgcagcatccggaccagacccgcgccgagtatgtcgagcatcgcaacaagcatccggccgaccggctgccttgagcatggcatccacaaagcggcgtgaccgacagcaggcgtccgctaaggcacctcgccgcgccgcaacgggccaacggtctgcgggcggttgaggaagaactcgcggttgccgagcgcggcctccgcatactggtcgattgccacgatgatcgcctgcacgtggtgaaagcaccagccttcccgcgttgccatgtgccggacctcggccagcgccttgatccagggcgcgtgatcatcgctgtcgtggaaataccgaagcggctctctcatctttcctccggcagatcacgtcctccagctcggcgcgcttgcgcgacagcagaagctgcgccgatgcactatcgcgtccggcctgcctgagccggttcaaggatgcatcgagctcgcgcaactcggcgcgcagccgccgcatcctgggtgcgtcatcaggcacgcgcttcgccggcgacaagctcccgcttcgccgcgcgaagaaagaccggggtcgcggcacggcggcgtggagcgacgcccgcgtgcacgatgatcggatcgcggtctccgagcatggcccgctcttcgaccaggcggctcatcaccaggcgcatcttcaggaggtccccggcaacgaaggcgcagtcctcgtcccggttgatctgctctcgcatgatcgcctcggcctcgagcatgctgacgcgcagcgccctgatctgcctgcgaatttcgctgatacggttgtccatggcggcctcctattcacggtggaagacaactagaacaaaacaagaacaagaagtcaagggacgtcgacgcggcggagccgtccatcatggactttttcatccccacgcgatcggacgagttcctgccgcaggaaccgctggatcacaatttcacgaaggcgatgtgagggtgtggagtcacgggcaagcccgccagcgcaatcacagcgaacgtgaagcagagtgacaacgacgtcgcgacagtccgtcgcagccattcggccttcttgccgcctcctccgaatcgcatcagcgcatcgtcagagtccgcgtgctccggctgtccatctgagacaaacagccgacacactgctgtggaacaacaggtcaatagaacttgtctacccaaatagacaagtttaaatgagacagattctgtttcgatcattgcgcagtacatgaccaagtcctccaaactggtggccgcgaagcgcggcaaagttctcctggttcgacgccgatctgacgggttgtggatgttccccggcgggcgcagacgcgcgcgcgaaaccggcaaggattgcctcaagcgcgaaatcaaggaagagctgccgaagctcaagctcggccggctcagcctctggaaggaagtgacggccaagaacaagcgttccggccgcaggatgagcgatgcgatcttcatcgccaagaacgccaagggacggctgtcgatcggcgacaagaaggagatcgaccgcgctgcctggcagaagccccgcgggattcgcctgaccgcgacctcccgctacatccgcgaccggctgtttccgagaaagcagcagcggcgccgatagacggcgggtgtagacttcggctctgcgcgattgcccggcgtatcctgctgatttcttgagcttcgcgcaccctcgacgcatgctaaggatgacgtgatccgtttcgtatcggaccacgatattagccaaaatgccggtcgaatgagctttccttccaaccgccagcggcggctgttcagaatcgtctccgcgcgttggcgacgccgcgccatcttcctgctgggcggcattgcagtcggtgcggcggccgtcgcgctcgcgcagctcgcggattgggcacagatcgcctttgccgcgctggtgtcgcatttccgttatgcctcgctgctgttgacgcctgtcggcttcgcgctgtcggtgttcctgaccaatcgcttctttcagaacgcgcagggcagcggcatcccgcaggccatcgccgcgcgccatctcaccgaccagaccgcgcgcgaaagcctggtttcgctgcgcattgcggccggcaaggtcctgctgacgctgttaggcctgctgtgcggcgcatcggtcgggcgcgagggaccgacggtgcagatcggcgcgtcgatcatgtttgcgctcggccgcttctcgccgcgccgtcagcccggcctgatcctggccggtgcggccgcgggcgtcgcggcggccttcaacaccccgctcgcgggaatcgtgttcggcatcgaggagatgagccgcgccttcgagacgcgaacctccagcctgatcatcggcgcggtgatcgccgccggcctgacctcgctcgcgctgatgggcaactacacctatttcggcaccagcgcgaccggcttgcgcaacggcgccgactggctcgcggtcccgctctgcggcgtggccggaggcctggcgggcggcctgttcagccgcatcctgatcgccatggcccgcggatttgccaatcccgttggacgcgcgatcaagcgctacccggtcggctttgccgcgatctgcggactggcggcggcgatctgcgggattgcgtccgacggcgcgatctacggcacgggatatcagcaggtcaaatccgcgctcgaaaccggctcacaattgcccgcgagcttcagcgtctggaagttcctcgcgacgacgttcgcctcgatcagcggcataccgggcggcatcttcgcgccctcgctcgcggtcggcgccgggctcggctccaacatcgcgccgctgtttcatggcgcgccgctgccggccatcatgctgctcggcatggtgtcgtacttcgcaggcgtggtgcaggcgccgattaccgccttcgtgatcgtcaccgagatgaccgacaatcacgcgatggtggtgccgctgatggccgcagccctgatcgcacacgcgagctcgcgcctgatctgcaaggaaggcgtctatcacgccctcgccaaggggttcatcgaccgggctgcgccggcgcagaagacgacgccggcctgaagactccatcagccgttataggcaaacaactcgatcggctcgctgaatccgcgcaccgcatgttcgccgacatgttcgagtgcgaaatcgcgctccacgaggtcggcgaatgcgcgcgacagcagcaccttttttcccagctgctttgtcaaggcttccagccgcgaggccatgttgacggcgggaccaatgacggtgaagtcgagccgggtgcgcgatccgatattgccgtacatgacgtcaccgacatggacgccgatgccgtaattcatcggcgcacgacccatcatgctgttcttttcgctcagcgcggccatcgcctgccgcgcctcggccaccgcatgcagcaggttggcacaagccttggggtcgctgagcgggaaaatggcgagcagtccgtcgccgatgaatttcaggatttctccgccatgccgcgcgatcggctccgacatcgcgtcgaaatagtcgttcaagagatcgatgacgtcgtcgcgcggccaggagtccgagatccgggtgaaatcccgcaagtcgcagatcatgatcgcggcgcgcaccgtggtcccgctgccgcgccgcgtcgcaccggccaggatcatctcgccggcatgggtgccgacataggtctcgagcagcgtccgcgccaggcggttcttcatccggatctcgctgaccagcgccagcaccggcagtaccttcttcaggctggcgacgtgggcgtcatcgaagccccccgcgcggtcggttgcgaacgtcacgacatgccgcttgccgagcgtatgcagcagcggccatgccacatagtcggtcaggccttgcgcgcgcatgtcgtcatagagcgcgtgcttgcggccgggcgctccttcgagccgctcgcgcacttcagcggcgccctcctggatttcgtagacggagctgccgatatattccgagcgctccctgacctcgtagtcgacccgcgagatctccgcctcttgcttcccgtccgcccacatgatccgggcgccgagccattgcggatgctggatcagtagattcatcgtcgcccgcttgatcgggatgcccgcgccctgcagccggatgcacagctcggcaaagatgttgtcgatgaaacgctggtcgcgcgtctcgttggtcagccagctcaccacatcgccgtcggactgcggcgtaacggaatcgatgttgggcggcgcgttcatggctggctccggggcggggagttgagtcgggcagccgatatgtcgtgcttccgcccggccacgtcaacgctgccagcgctatcgtgatcgtatggtgccgggtggccgcgaggcgctgccggccgccgcgtgacgcgaggatgacaggaacgctgggccggcgagtgtgcctacccgcccagccgatccacctcggccttgccggccttcatcaccatcggaatatgctcgccctggccgagcaggcacgacacgtcgcgcagcggattgccctcgaccaccagcaggtcggcgaaggcctccggtgcgatgcggccgagcctgccttccatgccgagcacctcggcgccgacaatagttgcgctggcgatcaccgcctgcgggcccaacaattcggcgcggatccggaactcgtcgctctgcaagcgctgcgacggtccgagcagatcggagccgtagcccatcttgacgccggcctcgcggtagatcgcgagcgagcgcaagccggcgtcgcgcacgtcggcgaccttggcgacgctcgccgccggcaggccgtatttcgccccctcattggccagcgcctcataggtgaccagggtcggcaccacataggcgcccttctcggccatcagccgcgcggtcggcagatcgatcagattgccgtgctcgatggtgcgcacgccgcagcgcaccgcgcgctcgatcgcctccgcggtgtaggcgtgggccagcacgtaagtgtgccgtgctttcgcctcggcgacgatggcgcggatctcgtcctcggaatagccgtaagcgccgatcggatcggtcggcgacgcgacgccgccggacgccatgatcttgatctggtcggcgcccatctgcagctcttcgcgaaccgccttgcgcaccgcatcgacgccgtcgacgacgcgcgcgatggcaccgacgcgcacgcagcaggagcaggtcggatcggcaagatagtcggagcgggcccgcccgtcgccatggccgccggtctggctcagcgcccggccggagacgaacagccgcggaccatcggtcaggccggtgtcgatcgcctgcttcagcgcatagcctgcaccgccggcatcgcgcacggtggtgaagccgcgcttcagcatgccgcgcaacagcatggtcgagcgcaaggtcaccagcacgttcgccatgcgcgcctgctgcgacagatcgagctcaaccgcgaccgcgtgcacatgcaggtcgatcaggccgggcatcagggtcttgcccttgagatcgatgacccgatcgactgaggcctcgatcggccgatcggagacctccttgatcaggcgatcctcgaccagcacatggtgtccttcgagcagatcggatcgcagcggatcgagcagcgcggcattcttgaagaggatggtggacatgattggatctcctgtcaggacgccgccgtggtcacgcggtcttgcttgcaatttcttccagcgatcggccgcgcgtcggcacgcccatcagcacgacggtgagcgcgccgatcaagaggaccgacgtggtgacgccaaatacgccggcaaagccgaaattcggatagaggtagccgaccaggatcggcgctgcgatcgcgccgatgcggccgatcgcggacgcgaggcctgcacctgtcgtgcggatcgatgtcgggaacacctcggccgtgtaggcataaacgcccgcataggttccgttcatgaagaacgagagcagcaggccggccgtcatgatctccgcgtcactcttggcgaaggcgagcccgagcgcggcgacgccgccgagcagcatgtaggtcgcaatcgtcgcctgccgtccgatccgttcattgaagaaggcggcggtgaaataacccggcacctgcgcgcaatacatcgccagcgaatagccgaagctcttggtgatgctcatgccgttctgcaccagcaggccgggaatccagacgaagaaggaataatagctgaaggtgatcgacagccacatgatccaggtcatggtggtgatgcgggcctggcggccggccagcagcgcggcgaaattactcagcagcgttcccgacgatacggcaggtagcgccggctcggggaccggagccggcagcacccggccctcgcgcgcgaagacagcctcgatcctgtcgagcaccgcctcggcctcgttcgccctgccgcggctctccagccagcgcggcgattccggcagcgacctccgccaccacagcagcatcacgaccggcaccgcggtgatgacgagcacgatacgccagccgttctcgtaggccggcacgatgaaatagccgagcagcgccgcggcgacgaagccgaacgagaagaagccggcgagcgcgccggtgaaggcgccgcggtagcgccgcgccacgaattccgcgaggtatggcgcgatgatcgcgctctccgcgccggtgcccatgccggcgacgacgcgggcggcgaagaacgacggccagctgtccaccgccgcgctcagcagcgaggccgcgctgtagagcgccagcgccgacatcatcaccgcgcggcggccgatcaggtcgccaagcgtccccgccagcagcgcgccgaacagataaccgacgaaggtgctgctgccgagcaccccggtctcgacattggtcagcccccaggcggtgcgcagcacgggcaggatgaacgccagcaccgcggcatccatcgcgtcgaacagatagcccaggccgcccatcagcagcaggtgtacgtggaatcgcgcgaacggcaggcgctcgatgcgcgccgagatcattgacatgaagacgcccccctccgccccgcggtcggcacgcgccgcagagtcagccggggaatgatagacaaatcaacattatgggaataatttatatttattatctggtacatcaccatcgtgaatattgcccgtgtcgttccgcacgctcgacctcaacctgctgaaagtcttcgaggccctgatgaccgagggcagcgtcacgcgcgccgcgagcgcgctgacgatgacccagcccgcggtcagcaacgcgctcgcgaggatccgcgacgcgctcggcgatcccttgttcgtccgatccggcacgggaatccgcccgacccagcgggccgtggcgttgtgggacccgatcagtggcgcgctggaaagcatccgtggcgcgctcgacgaaaaggtgttcgattcgcgcagtgcgcagatcgagttcagcctgtcgatgtcggactacgtggcgtcgctggtgatgccggctctgttgaaccactttgccgagatggcaccgagcgcgcgcctgcgcaccgcgccgaacaccatcatcggcatcgccgaccagctcgaggacaaccgggtcgattgcgtgctgagcgtttatgtcaacgaggcgcagcatccggggctgatccgctcgcgttcgctgtggacggtcgactatgcctgcttcatgcggcgggatcacccgctcgcgaaccggaagcggctgaatgtacgcagcttcctcaacgccaagcatgtcgacgtgagcctggcaggccgcacggcaccgacctacgaccagtttctcgcctcgcgcgggctgtcgcgcaacctcgttgccatcgtcaatcactacaacgccgcctacgagatcgtgcggcagtccgatctgatcgcggtattgccgcgcgatctcagcgcgcagtcgcgccaggcgccccacctccacgccgtgccggtgccgttgccggcgccgccgcgcatcgtcagcctgttctggcaccagcgcaacgacaccgtccccgcgcagcgctggctgcgcgacacgctggtggggctgttcgcgcggatggagtgaactggcacaagatgtgccccatcaggtcgatgtcggcgcgggctcgatcgatgcctcgcccgcggccggcaacgcgtcgcttcgcgccagcgaacgtccaaagagccgatgcagcgccagataactcagcgctgccacaccgatccccgtgagccaggacagatcgaccccaccggtggcgagcgccagcggaccttgcatcgccttgatcgtgcccatctggaacgcccacgccgctgcgaacccggcggcaaaggcgatcagcccggcccagttgaaatcacgacccctgcccggctcctcgtacagcgatgggagatcgatccgaccgcgtcgcacgaagtagaagtcggcgagcgtgacccccgcccatgggctgatccagacgatcaaggcgaccatgaaattgtcgaaggcatgggcgaagtcgcccgactgcaggaagccgtaaaggatcgcggaggcgatcaggccggaggccactgaaattacccagcgcggccgccgcagatcgagtgcgagcgacgacagcgccgctgaatagatcacgacgatgttggttgcgatcgggccatggagcagcaccagcagcaccggcaacgctatcgtgccgaatgctgcgatgatcagcttcgacgggtcggagccggcaccggcagacgcaatcgcagcgcccaggaaagcgagccagaccgtcggggcgaacatgccgaggaatgtcgcccggaacaccttggcagcaccgagcgagggcctggtgaagcgcgtatagtcggacgcataggtgagccacgaaatgccccagccgatgccgatcgcggtcatcagctgcgtcgccgcggcgaacgccggcatgccggtgacggcggcggactgccacttgatgtcgacgcgcaggaaagccaatgcggtcatgacggccatgatcaacagaatgaccggcatggtgtagcgctcgaataccttgatggcattgaagccccaggccgcgatgccgacctgaaacagcatcaccagcaccgcgatcgcgtatttgagctcgacgccgccgccgattcccatccgctcgagcgcggccatgcagaggtcgagcacgatccaggtgttgatcgcgacccatcccatcggcatcagcacctgtgcgagcgccggcagataggcgccgcgccggccgaacgccagccggccgagcaccatctgcggcacgccggtgcggtgtcccatcaggcagaaggcggcaaacagcgctgcgccgaacagattgccgacaacgatgacggcaagcgtttgcagcaggctcaggccgagctggatgccgagcgcgcccagcacccagttgatcggcgcgatgttcgcgccggtccagatccagaattgatctgatggtgacgacgtgcggtgcgccaccggcaccggctcaattccgtgagcatcgaagcccgcctcatcctgcgccggaagctgtgtctgcttgagcaacatgtttccccccgtttgtccggcgcattggtctgggccgggatggggcatctgagcagcaggcggcgatgaggcgataatgagaattcctcaagccgggttgagagcatgtcgagagtgaagcttgcataccggatatggacaaatcgggctgcgacaaggccagcacaccgcgccacactggcgcgccgcatcactgttgagattttctcaactcgcctgccggattcatcaatcacgccgccccgggcgctcggtcattgtagcgccgacgcaaagcgccaatcagccgaggtcagggatgacgacacttctgcatatcgatgccagcccacgcggcgaccgttcggtcagccgaaagctctccaaatcgtttgtcgagcattggctcacgcacgagcccggtgccacgatcatctcgcgcgacgtcggccgcaatccgccgcccctcatcaccgagacgtgggtggccgcggccttcaccgcgcccgccgaccgcaccgccgagcagcgcgacgagcttcgtctctccgacgaattgatcgacgagctcgaccgcgccaacgtgatcgtgatcggggcgccgatgcacaattacggcatgccggcggcgctgaaatcatggttcgacaaggtgatccggatcgacaagaccttcagcttcgatctcgcacgcggcgactttccgctcgagccgatcatgcgcggcaagacgcttgtggtgctgagctcgcgcggcgagttcggttttggccctggcggggtgcgggagaccatgaaccatctggaaacccatatcttcacctgcgcgcattatctcggggtgcaggagagccatctgatcgcggtcgattaccaggagttcaacgacgaacgctaccgccggtcactcgccgatgcccttgccgcaatcccggtgctggtccggcagtgtcttggaatcgacgggactgttaatgtcgcggcggaatgatgcgccgttgtccgccggctgtgcgaggatgaaccgatgataaagaatcccatcccctggccgaacggcgcgcgctgtgcctgcacgatcacgttcgacgtcgacgccgacagtctgattcacatcgcccggccgaaggattcgttcgaccggctttatccgatcacgatgggacgctacgggccgaccgtcggcgtgccgcgcatccttgagacctatcgccgcctcggcctgaaacagtcgttcttcatgccggcctggaccatgcagcgctatccggatgcggtggaggcgatccttaaggcgggccacgagatcggccatcacggctacatccatgaggatccgacggagatttcctcggcgcagcagcgcgaagccttcgaacgcgcgctcgccattcatgtcgcgatgaccggacgcaagccgcgcggctaccgcgcgccggtctacaacgccaaccagaccacgatcgatctcctgatcgagcatggctttgtctacgattcgtcgctgatggccgacgacatcccgtatcagatgcgcaccgcacgcggatcgctctacgagatgccgccgcactggggatcggacgattggccgcctttcgcccattacgcggagatcggctacatgatgccggtcaaatcgccaagtgaaggccttgcggcctcgtttgaggagttcgaggccgcctatgaggctggtggattctggatggggatatggcacccgttcctgaccggccggcttgcccgctggcgcgtggtggagcgctggctcgagcggatcgtcgccgagcgcaaggtctggttcgcatcgcttgaggacatcgccgcgcatctcgacggcttggtcaaggcgggcacctaccaggtccgcgtcgagaccctgccctacttcacgcagcccgtgtcataaccagttcgtggggtgcacgaaatgcggcagcctctgcacgcagccagtcgatgaatgccgtcactgatttgcgccgggcagcagtcggcgcattcacgaggcgataggcgaagcccgcaagcgcggggccgtcgagccggcgcagcgtgccctcgcgcaattgctcgtcgaccagcgcgtcgctgcacaacagcggtccgagcccgcgctcggcggcatgcaacgccagcggctcctcgctgtaccaggagatgcggaagtcgcggccgggatcgtgatcggcccccgcaagccacgccgaccacgccggcgaatccagcgcggcattcttccagcggaacgccagcagcgagcgcgaacggaggtcgtcaatggccggacgagcaccaggcggacagatcgcgcttgccgcaaccgcaatgtagcgatcgctgaacagcaccgacggctcgccggcgcgatcgacgcgaccgtaacgaatggccagatcgacgccctcggcgcccggcgcccgcagctcttcggtcgcatcgatgtggacgacgagttgaggaaatgccgcattgaagcgcgcgagccgcggcatcagccagcgctcggcgaaggcgcgcgtggtcgatatcgtgatcgcatcgccgtcggccggcggccggatcgcggcaaacgcgctcgccatccggtcgaagccgtcgcgcagcaacggaaacactgcgtgtccatccgcggtcagcacgaccgcgcggccggagcgttcgaacagcttgtgtccgaggatcgcttcgagttgccggacctgatggctgatcgccgtcaccgtgacgcagagctcattggctgcggcggtgaagctttcgtggcgcgcggcggcctcaaacgcgcggacggcattgagcggcggcagtttgcgcatgatcggttctccgcgtgtcccgtgtcaggcgatgagaaaatgcgcgtcggtcggccgcatgtcgttcaccggcaccatgtcctgcggacaggcggagaacacgatgaccaggtccatctcggcacgcagcgacacatactgcccggcctcgctgaccggcgacttgaagtccaattctccattgtccgtgacgggcacgttcatgaacaggttcagcggagccggcgtcaccgcagccgacagcccgacagtctcgagcgcgtgcgccagattgtgcgtgcaattgtcatgatggccggtagcgccgagctgacgatagcggtgaatgtcgcaggccgcgatcagcgtgtcatggatacctgggctggtgtcggcgacgaatgtgaggatcgggcggcgccggttggtcgtcaacgtatcgccgacgcggggaatgagccgcagcatcgacgcgcggctgtgctccatcgacatgaactcgctggtgtcgccggcattgaaggcccaggtgtcgaccacctgcttgccatgggtgttgaccacggtgacggtttctcccgctttcagacgggccgccacgccgttgcgggctgggatcaggcggggacgggtgaggtcggtggttgctgcgggcacgtgatgtctcctcaaggctctgtcgcgccattgcagcaccgtcggacatgtaattctaataatattaattgtatccattataacaaaatcgtatagttgtggcatgcgactccgacagcttgaatgcttccgcgccctgatgctccacggcaccatgacgagagcggccgaactgctcggcatgtcacagcccgggatcagcacgatgatcgccggcctcgagcacgagacgggccttaacctgttcgtacggcgcggcggccgcctgcaaccgaccccggaagccaagctgttctatgtcgaggcggcacgcgcgctcgaagccaccgagaacgcctctcgcgtcgcggccgagatcaggtccggccggcgcggtcatctcgcgatcgccgcctatccgagcatttccatcaatctgctgccgcggctgctgtcgcaattcgccaagaacaagcccgagctgcagatcaagatcatctcgcggaattcggcgaccgtccgcgagttgatgtcgacgcagcaattcgatctcgcggttgccgaactgccgctcgattatccgacctcgcacatggaggtgttctcatatgactgcatgtgcatgctgccgcgcgcgcatccacttgcgaagctgaagcagatcacacctgatgacctcgacggcgtcccgttcgtgacgctgttccgcggcgacccgatctaccagcagctggcgtcagccttctccgaacatggcgcacgctggaacgtcgtcgcggagacggaattcttttcgaccgcgtgccagctcgtcactgagggccaaggcgtcgggattgtcgatccggtggtgagcaagccgttcaccgagggccttgtcgttcgtcctttcaagccgaggatccagtaccagatcgcgatcctctcccccacgcatgaagcgctgtcccaggttgcgcaggacttcgccggactgctccggcgcacgttgaaggcatgaggatcggatggcaccggcaaggcaagtccagcaacaaaggctgccgttcacgctccgactgccggccgaggcaggtcattgcttggtgtcgctatcgctggtcttcagttcgtatttggccgttccggtgatcgaaaagctgggagggccgtctttcgtcacggcctgggatctgaatatgttgacggaagtcacccgacaggtcgcttcatacaccttcgacaagatcgggcactgcgccttcgcttcctcgtagagatcttgccttatggcattcagggcgatctcgcggtcgctaccctgcactgatgaaggaggcacggcaacgctcgcaagcgcaaccgtgatttccatgaagccgcgaggaggcgaaggcggaacagtattgaatatgacttgagcctgcgccgacgtgatggccagccataacagggccgaatatgcaatcgctgtgacaaggcgcattgccgggctccccatgaaatcgtgcgactgcctcccacatcgtgaagaacgcagatgcctcaaccaaggattgttacaagtcccgagcagttagaccagacgctgcagccccatgcagactgacgatcgcgtgatgtcgtgttatcacgcggcctcgcttggttgagccgcaagttggcgcgacgggtgtgcggccgactccggggagcaacactgccggccgcacatcggctcgatcagccgcctctattgctgttgcatctgacggcgacgatctgcaatcagctgcttcgcctcctcgatcgtgatctccccggcccccagcacctgataggcgctgtcaggattttggctctgctgatcgcgctggtcccgcttctgatcccgctccgggcccggcgccgaagagccttctccaccgccataaccgagcacctcgacgatgatcaccgaaggctggttgttgttcgatggcggcggcgcggcggcttgctgcgaggcggctgccgtattcgatgcggccgtcagcgcgccgaccggcggcccctgcaccgtcggaactccactcgaggtgccctgcacctggatgttcgcggcattgacgacctgcagcgccgcaaggttgacgttaccggagacgcgaatgccggcttcaccggcatcgatggtgccgagcggcgcaatcaggtcgacgttgccgggccgcacttccgggatcggattgagcgtcgcgatgccggcgccggtcgtgggaacgctgggcgacaacgtcacctgtccgtaattgtcatagacgcgcttcggcggcgtatagacctgcgtcgtcttggagccgcggccggcgttgatgtcgccctccgccgaccaggcgaggatgtcgccgccaaaggtggtcatgatgcgcgacaggccgagcagcaggctgcccttcgagtaggtctcgatatcgcccttgccctgggtgatcaggcccgccgaggccggcggcacgacaccctcgacgccgagcaggattcggccgccgggcgcgagtaactggatattgccgccctcgagggttcgaacgcccgccccgccgaacatcgtgatgtcgccctgatacgcgatgggggcgcctgagggatcacgatccgggaacagtgccgcgatcacctgcctgccgcgcaggtaggatttcgctcgcggaccgttggcgtcgttgtattcgcggccgctgtcgcgcagctcattgtagtagacctgccgcaggaagaccgcctgctgctccggcggcaacgatgcgaaccgcgcgcgcgcttccgcatccgatcccttgaaaccgtagtgctccgagagccagtcaaccagatccttctcgtaggtcttcacgaccttgccgggctgatcggcgagcggcacgcctgccttcgccagattggcgggatcgagatagagcagcagcccaccgtaatttgccgcgtccgcgccggccatcatcagcaccgaggcacccggccgatgatcgcccggcaccaccgcgccgaggctcgtcacggcgccctggtcggcctggtagatgttgcgccccgccgtcatcatcagcgtgcccggacctgcgatctgctggttggcgtagatgatgtcgcggccggccgagatcaccgagacatcgttatcaccggtgtggaagatcaggttgctggtcagcatcccgttgtatggcaagtccggcgcgccgatcggggtgccgaggctgacaatgtcgcgccccgccatcagttgcatcggctttgccgcgacgtaccaggttcccgccggctgcggcgttgcgcccctgccgctgaagacctcgccgctcttgaagccgacgatatcgccgaccgcggcatagatcagcgctgggttcggatcggcggcatgcagattgctcgcggtgttcggaccgaacgcgaacagctcgacaccacggggagacagcgaaccaaactgcgggaagatcgttccggtaccattgacgttggtcgtcgtggtgtcattgcgctgccagccgacaaaggcgggatggaacggcgtcgtcagcccactcagatcggcgcccgagatgtcgatcgcatagccgttggcatagatcgagcggccggccagcagttcgagctgcccaatcggcgacggcgccagcgtgagcggcggcgggatgttggtcggctgcgtgtcgtaagcgccatagtagatgctgcctctggctgcgagcgccgtcagcgtcggcgggtagagatatgtgccgtcggtggggccatcgatggtgttgttgaccgacagattgttctgggtggtgggaacgaggttgccaccggccgagaccaggttgatcgccgtctcgttgcgccacagcgagaaccaggtggtgccgccgccgacgtgcggaacgccgccgaccgaatagctcgtggtgttctgctgcagcacccggcccgcatctgcggcgccggccaggaccaaatcgccgcgcgccgacaaatcgaccacggcatcgccggggatgatcagcagtccgccgaagccgagtcccttgttggcggtcgacggctctggccaacgcgggtcggcggcgagcttcgcgccataggtcaggttgatcccgccgatggttccggcctgcacgtcgatcagaccacgcaggttggtcagcacgccgctggtttcgctcgtgaccctcgtggtcatcagcgtcggttgcagcgggttgagccggccgccgatcttgacctgcatgtcgccgccgccggtcaggatcagctgtccgtccggcgtgatgcgcccggtcgagccaaccgtgatgttcaacgcagtcgagctcgtcgcctggttggtggcggtttgcgtcgccaggacaccggcatcgccgcctgccaggacggtgacgttaccgccgccgagcgtgccgaagccggtgaaaccgaccagcgccaaaggtgtcgcatcgggatcgcgcggctgtggaagtgcaacggtgccgaaattgatccaccacgcggtttgctggccggtgatgttgccgccttggcgccagagccagttgcccgggttgccgtcctgaatgccgccaggattgccggacgtgccggtcaggttgccctgcgccgccaccagcagattgccgccgccttcgggataccaggcgtgatagacgctgccggcttgaccgttgacctgtccctcatacgaggcaccggtgtttccgagcacggagctgccgatcggtcggccccgcggcagatcatatggattggagccgtccgccgccaggagcgccggcgactgcgcgccggccgtgtagatgccgaacgatgttcgcatcttgagatcggagctgcttagcagttcaagatcaccggtgcctgtccgcaccacgctcggcagcgggaactgcgtcacggcggatgcacccccggcgctccaggcgcagtaatccgggagattttcacaaatgtacggatcgtcggccgttttccccggcgttccgaacggattggtgccatcgcccatgtttgcccagacccagccggcgggctgaatcgagacgacagccatgaccgaggtgtctgcaagcaccaggctccccgccttggcgctgcgcggccgcagtgcacggctgtcggcagcggtgacgtccgcgccggccacgaggcgcagcgaccatgattgtgatccctgcggcagcagcggcgccgcggcccagatcccgctcggggtcgggtcgtcgcgcagtttcacgaacggtgcgtcattcggcagcttgacgaccgtcgccgctggaatgacggcgccgatctgcagcgtaagcgcgccgttcagcgtcattgcgatgggcagcggtacgtccttcggccaaagcatcgggccgacgctgatgctggacgcgaaccggttgccggcgccgatgatcgtgccgacgggcagccgggtgctctgctgcagcaacgtgccgcgtggatagatcaccgcgccggacgcattgcgcacatctgcgcgcagcaccgtgcctgcgggcagcgtcaacacgccacgtagcggcgcgtcggcgggaagcacggtgtttgccggcaatgagaatccctggaccggcaggtcgtagttcagcacgctgaaccgcgggaaaagcgttccgctcgccagcaccacgccggccttcggaatcacgacatcgctgccatatggctgcgcacccttgatcaggagccgggcgacctccggcgtattggtgccgtcggtgcccgcaaccggcggcgcgccgaagccgtcgctgacattgccgaacacattcagattgccgccggcgcggatcaccaggcggcccggctcgccggagccgtagacggccgtcttcgcggaattggggttgaggctgtcataacggtagcgggacaggtcgatgtcacctgagatcgtcaggtcgccgttcggtgtcgcgctcgtgatctcgacgcccggccgcaggtgaaaggcatcggcataggcgcgcagcccgccgagacggccctgcaagtcgccgttctgcaacgccgccgcgacgaacgccgcactggaggcatgcacggtgtccatcaggccctggttgatgatgccgccggcgggcttgtaagtacggaagccattcaccgcgatgctgcgtgcacccgcgatggtcaccggccctgccgcatcgatcgccacgtcgttggcgccgtcgccgctgccgcccgcgccgccgagccgcggcgcgctcaactcgatcgtgccgcgcgcgacattgtccgccgagcgcacgtcgatccgcgcgccgggagagagagcgagccggccctgcgtcgtggtcagttccaccaccgcccggttcggcgcatcgatcggctggccatagctgtcgacgcgaagcaccgtgccgtgggcatcgagcaccgagccgctgcccaacgtcagtccgtcgcgtgcagcgagccggatggtgccgacgcgctcgccgctggcatcgatgcggccattgacggtcaggcggccgccatccaccgacacgctgatgctgctggccaccagttcgtcaccgatggcgaggtcgccctgcttgagctggaagttgcgcgccccggtcacgccggcgagcgtgagccgctggttcagcccggcgaaatcgtcgatcgtctgcgcgcgcacgtcgatgctgccggcaaggaacggcaccatcgtgccaccggcgtcgtagtgccccgaggcgctgccgcggagcgagccgcccagcaccacgtgcccggctgcggcatcgagcgccgtcgccgacaatgatccggcgcgattgttcaccgccgagacgtcgatgaccgatccggccgcctgggtgatgttgccatgcgcgctttccaacgcgacgtcgccgccccagctgtagcgcaccgcgtcgagcaggctgacggttcgccctgccatgtcgatgcgcgccgcatcgctcagcgcgatgtcgccgttcgcggagacggtcagcttgccgctcggcagcacgacggcgctggagatcgccactgagctgccggtcaggccgatctcggcgccgaacgccgccgggcctgctgcggccggcccgccggtgccggtcaggttgagcgcaccgccggcggtgatgcggttgatcgagccggagtcgccggtcagcaccggagtgatcagattgaggttgccaccgctgtagctgtatcccacgccggtctggtacgcgccctgactctcatacacagacaatgtattgcggttgttcgcggtgatccggccgcgcgccgtcacgttgaccgtggagaagccgagcgccaggcggtcgagcgtcacctgggtgtccggcctcgcctcgctgggataaccgaacaccacttcatcggcgacgatattgagtgtgccgtggccggtgccggcgccgcgcgtgatcaccgcgccgggcggcaggctgcgcggttcgtttctgccggtgcgcaggacgcaatcgctgatgccgttccagaccagttgcccggtggtgagcgtggcgcggtcgccggccgtcccgaggccgtagatcgccggtgtgttgagcacgagcgaacgcaggctggactggccagtcaccggatcaatggtcgagagattcagcgagccgtagaaattgatcgacgactgcgccgtcaggatcaggctctccagcttgggagcaccgatcacggcgttgccggccagcaggcggccgaacacgtcctggttcagcaccagaccgtcgggcagcacaccggcgctccgcgccgcggcgatcgccgtcgcgtcgccgatattcacattcggcgtgatcagcgaaagatagcgcgcgccgtaacgcatgccatcggcgatcgacagcgctcccttctggacaccaaaggcaagcatgccttcggtcgcgatggtggcggcgccgatcgtgatgccgccggcgccactaccgggcggatacgccggcaggtcgatccagccgttcgagacgatcatcatgttcccggatccgccaatgctgtaggcgaagccgtcgctcgacggcatcaccgtcgcagggccagtccctgtcgtgtcgatccgcgcgccgtcctcgatccggatgccgccggcgccggccgtgatgaacacctccggcgcccgcagcacggcgccgccacgcaccgcaaccgtggtggcgaaaccggtggtccccacgtagccaaggtcgagatagagctgttggccgccgccgatcgaaatcctggcggcgccgatcgcatcgaggtccgccgcacgcaccgaggcgaagccggctgtcggcgtcgcgttgggtccaagaatttcgagacgcccattgtacggcgtatcgatgctgaccgtgccgccatagccgccgctgcccggcgtcaacaaagcctgcccggcaaatgagaacgacgggctgcctgccggcggcgccgaaagaatgagctgcaagacggcagcatcggcaggcagactcgggcgcggctgtccggtacgcgcggcggtcgcgagcatgaagctcgtgtagtcctgctcattgtactgcgaatagctgcgcaccgtcgtgccgggtgtgatcaccgccagattgggctggctggcctggatcgaggtgttggcgacgctgccataggcagtcgtcacgtaggagccgttcggcagtgcgaccgtacggcctccggtctgggtctgcgcaccgagttcgacgcggaacgcgccgggcagcagcgcatacgaggccggcatcagcgtgtaggttcccgccgcaaggccgggcacgccgccaccgaccgtgatgcgctgcccgatcgacggcgccgcaccctggcttgccggcacgatcggcgcataatccggattcgcgctcgggacgatcgcgaacacctggttcttcaggttgctgtagctgttgcccggattggcggcggccagcggattgagcagcacatcgaccgagccgccgcggccgctgatgaagccggcgccgagcagctggccaccgccggagagatcgagcagcgcaccgctggccaccgtcactgcgggaccggacaggctgatgccgccgaccgtctcgccgtacacgctgacgccattgatggcttgcgtcaccgcggccccgttgtaattgtacacgatgccgtcgacggtgccgccatagggcatcgcaaggcccgcggcactcaccgacgtgatgctgcccggcagcagatcgatttgctgcgcgcccgtcagcttccttcctacggccgggctgccgagaatgagcgtgccaaacggcgcgcgcacgatcccgccctgctcgatcgtcttgccgtagacggcaagccggccaaacaccgagaacggcggcgccggcgcataggacgtggtgcggccgaaccgcacaagctcactggcctcgacgatcaccttggcgttgctgaccggatagatctgcgccgcgtcgagctcgagcgtgcgggagccataggtgtcgccggtgacacggatgtcgcctcggctgaccacacggacctgatcgatgccggcgatgctggtcagcgccgacgtcgaattgtccgcctgcatgattgcggtgttgagcggttcgaaagagccggcgagatcgacgagatcggcgttgacggtcagctgcgcggtgcccgtcttggctggttgggtgcccagcgaggtgccgaaaccgggttgcctggcaccggtcacgctgcccggacgcggctcgagcgcgccttcgctcgacgagaacgagacgctcccgaacgagacataaggcgccgcaaggtcgatccgttcgttgcctcccttggcgacgaggttgccgaatatcctgaggctctgcggcaatttgagctgaacgtcgccgtcgaatgcaatggtctccgagtagaggcgaaggttggcgaagccgccagccgcgacctggtcggcgccgacgcgcccgtgcccgaactgcagagccggatcacgcgccccccacgccagatccggcgcaaggccgctcgcgccggcctgcgccgcgacctccagaatgcggaacttgcgcacctcgttcggagccggccgatcgggcgagttaccgtagctcggcgtcaccagcgccagcgacagcgtgccaccggcagcaccctcgccgccggcccgtgccgtcatggtgccatcgagatagaagccgctcagcgcgctgatggcgatgctgccgcccgcgcccgccagcgtgagcggatgcacggagttcgcagcatccaccacgtcgatgaccgcactggcgccggatgcgtcgagacgcgcgccgggccgcacgatgacaaagcctaggccggccggtgcgatcgcgcccggagcctcgctgtcgtcacccagcgtgatcctgccgccggcgtccgcaaagccatagcggcgaccggcgcgatcgatcgccacggcgctttggcccgcgacgtcgagcaccgcattgccgtcgagccagatcgaccgcggcccgatgaagggatcaccgggattgccgttctgaaggacatcgatccggccaccggcagccgtcaggcggccatcgacattgatctgacccgggctgcgcagcgtgatcgcatgtcccggatcgaccgtcacgcgcgcctgcgtgccgatcgtcagcgatcccctggactgatcaaggttcgattgcaacgtcaggtcggcgccgccgcggcggatcatgcgcgccccaaccggatcctccgaatagagcggcggcagccaaagcgtcagcgccgacgacggatcgctaccgcttgccacgttcgacgcggtttcggtgaaacgatagaccggcatcaccgcgtcgagagtagcgtggctcgccaccatcaggccgagatggccgttcacgtcgtagctcgcaaacccggtacggaacagcgccgtgtcgatttcggtcagcggcgcgacggcatagctgcgcgatgcgaccgtgccggtcgggatcatggtgccgacggtgaaatgcagcggcaccggcgcagcatcccctgcgttgaaggtcacccgcgtgccgaccagtgcgataccgttcggaaagacgccggcgtcgaccttgaaaccgagggggagctttgacgacggatcggtcatgacccaggtgccgggtgggatctgcgtgccgggccaataggtgtgaccggcgagatccgagaagttgaggccgctgggaacggtccatccgctcggtccgatcaagagcggcttgctctgtgtcgcattcacggcgacggatgccggcgcggtgtcgccgggcgcaagataggtgatcgactcatcatagttgaacggcacggccgcgccagccggaatgaacagctcctctgcgagccgcagattgacttgcgccttctcgccggctcccagcacgccatcggtcgccagcgccttgccgccgatcacgatcgccggaccgctgccgatcacgagcttgccgccgccgttcacgccgaagccgtcgatctgcccgtcaagcaccaggcgaccgccgaccgagggaccgccgaccgaacgatcgtcggcgatcagggtcacatcgccacccttgccgcctcgtgtcttgccgttctgcaggaccgccgcccccgacgacacgtcgatgctgctgccgctcgccagcgtgacgccctgcgtcgagttgaagctgacgctgccgccgttgatgaaggcaagcccggagagatcgtccggcgagccgagcgcgttggtccacagcccgcgcgcatcgatggttgcatcggcgcgcacggtcagttgcgcaagcccgtccgccgtcgtcagcacaatcggcgagagcgcggccagatccggcctgagaatgttggtgacgctgatgctgcccgagcgggcggtgatgtcggccttgatatcgacaatcggcgcgatgagctcgacctgcgcgccgcgcgcgaaactcagcggcgcctcggtcgagatcgaccgcttcgcggccacgccgagcccgcccagtccgaagccgttgatcgttccggcgtcgaaccagccggtattgacccggtcgagtggaatcgccgcagccggatcgagccccgccgagatcgacgccacgctgccgaacctgacgtccgtcgtggacgcattgaccagcccgcgcgcatcgtagaggccgagctgcagcgcaccggccagcggcgcggtgttctgcgtcagcttgtagccgtcggtgacaccggcgggacgcgcggcgatttgccgtcgtccattgatcacgtcggcaaggatcgctccctcgaacaccgaggtcggggtcgaaaggaggaggctgccggcatcgcggcccattgtgtagccgttttcccagcggctgctgcccttgccgaacgggctgagatagacctcgacgacattccagtgcgcgtgattgaccacgaagccgttcgcaaccgtcgcatagccgaggtcggagggcgcgtcgttgacgttgtagacacggccgtcgcggccgagcagataggtttgcggcaggtatccgccctggaactggaccgatccgccggacaggttgaagatggatccgcgctgcgcgaccacctccggcgccgacaaggtgatgtcgccgccgaccgcggcccactcgccgatcttgtggctggtgttgttgagatagccgccgacctcgagcagaccgcccgcggtgtaatagcgatccgacgcgtagccgccggtgccggcgggaaccagcgtgagatcgcgggcgtcgatccagacgttcttgttgatcagcaccgagccgtcgcggttctgcggcgagtcgcgcagctcattgccctggacgttgaccttgatggcgttggccgacatcggcagcatcacgtcccgggcacccgacacgtcgataacggcgccggtcgcggcgaacacccgcttgcccgccgagaccgccacctgaccgcccgacgccagcgtcagcgagccgttctggaagttgacgaggccaccgctcacgatctcgacgcgggaccggtcctcgcgatcggcaagccgggacaggttgtcgaactggccaaggttctgcgtggcgcggatggcattttgcgtggcggagtcggcgatcagcgcatcgcgctgcgagttcagcgcggtctccgcggaatcgagctcgggcagcaccgtggtgaggctgccggccgcgagcgtgaccgtgccgccggcatctgcggccgagttcaacaaatggatcgtgccgcgctgattgaccgaggtggtcgagaccagcacgccgttttgggtgatcgcatgtccggcgagcgtgatgtcgccctgctgggcgaagatcagcccgctattgccgaccccgccgctgccgcttccggcgcggatgattggcaccacttcgctgccgcgggtggtcgagacctggttggcggtggtgccgagcccgaaccgcaggatgaagtcgtcgcccgccgccagcagcgcctgccccttcggggtcgcgatcgatccggcattgtcgacggcgctgccaagcaacgcaacgaagccgccgcccgacttcaccgaagccggcgcgctggtggtgatcaacgcaccggcctcgaccacgatcctgccgctggctccgctgaagctcggcagatagttcggaccgctctgcggcgaatagattccgcttgcgagaaattgctggtcggtgataccggccgtggatgcgatcagcgagccgacattgatctggctcgcgccgccgaagatgatgccgttctggttgatcaccagcacctggccgggagcggtgatgcggccgaggatctggctcggcccggtgttgccgacgacgcggttgagcgcggtccagctggcggcctgctggttgaaattgaccgtggtctggctgccgacgttgaagctctgccagttcaggatcgcctgcggcgcggtctgattgacggtgacggtggtctggccgccgcctgccgcctgcaacggcagatcggcgcccttccacagattggagcccggcaccgcgccgggcgcgacctggagcccgcccggcgcaaggccgttcggcaccgcaagctgcggcagcgtggtcgagccctgccgtacagcggcggcgccccgcgcggcggcctgcgcagcctgcaatgcctggatcgcctgcgaggctcgcgtcagcgcgccctggctctgcctcgcgacttcggttgcctgctgggccgcggcggtggcgccgtcgctggcgatcgtcggcgccgacatcgttcccgcgttgatcccgaacggccgtgcaagtgcgccctgctgcccggtcaacatcagcgcgaacgcgcttgcgccggccagaagcagacgacgcgtcgacagctgctgcaccccgccttgcgtcacggaagctttgccgaccatcccggtgcggctggtctgtggagcatgcggcttggcggacatcggacttctctcatcgagcacaggcgggacagcggccgcggccatctcgttggcgttgcggtcttccctgagagtcccgagaccggtcacaaccgaaaaaataactcgtccctttgtcgccggatgcggcaacgcctgggcgcgcaaggccacgcccgatcatcccagcaggacgattccgccaggcagattggtgatcgtcgcaccgaaaacctgttgaatctgcccaacgacaccatcgacattggcgatcagaaagcgggcattgaacagcctgcgtcccagcgccgcattggtcacgatgatccgtcccgggcgatagcggttgatctcctcgaccgcctccgacaacggcgtgccgtggaacaccagcacccccgcctgccacgccgtcaccgcggccggatcgatcgaggtcaccgccccgaggtctcccgcggcatagatgatctgctgttgcgggcgcagccgaaccgcgcgcgccgccgatgcgacctccacttcaccggcaatgcaggtggtggagaccgcacctccaacaagatggatattgaaggtcgctccctccgccaccgcgcgcgcatccccggcgagcacttcgacgcgatgcgagccgagagccgtgaccgcggcctcgccggacaggagttcgatacgctcggttccagcttgcgcagtccgcaacgcgatactggttcgcgtgttcatttcgatcgacgagccgccggggagcgcgatgttgcgctgctcgccgattgccgtccggtaatcggcagcaagctccgagaccgagggccacaagccgagcggaggacggacggcgagataggctgccgccgccgtcgaggcggccagcgccccgccgatgaaggcgcgccgcgccatatgcggccttggtgcgatacgcgcgtggtcgcgccaagccgctgacccggccgctgcgggtccgatcgtgtcccagacccggcacgcccgggcaaatgcatctgcacgcaccggatcgacggccgcccactgcttgaacgcctcgatatcggccccattggccttgcccgcggcgaagcgaagcaaccagtcctgtgcctcgcggtcgagcgcgtcgagcaatgccgccggatggtccgtgctcctcatcgtaccgttgcttccccgcgactggcccgcagtcgatccatggcctctcaatcctcagagtcttttcgcgtcctcggaccgaatctttgaacgacatcccgcccaagccggagcgcgcaatgcgccagcgcatgtttcaactcgagctcaaccagccgctgcgagatcccgagacgagcggcgatgtcgcgcagcacgatgccgtccagccgcgacaacagcaagatctggcgccggcgcggcgtcaattccgccagcgcccgcctcagcgcctccacttcggacctcgcgttcgcggcacgttccggatcgggagcttcgtcgacgaggccgatcgcggccttggcgtccgacaaggtcaccaggcgcttctcgcccctccagtgcgacagcgcggcatggaaagccatctggatcagatagcttctcgggctgcgcagctcgcccggcggagccgcacgatcgagccgcaaccaggtgtcgtgcagcacgtcgttggcaagctcggccgagcccagccgccgtgtcagcctggcgcgcaggtcatcgtaaccgagaacgaagagttgccgcagcagatcgcgattggagtggttcatgcgcggccgttacctcggcccgctcgcggcacggccacacccgaccggctcgcctggcgcctgcgcgagaatcgcgatcgtgaccggctgcggcatatccgccggcggcgctccgagcgacaacctttgcagcgtgccgacaacatcgacgctccgctgcgtgcccgtcgagatatcgaacagctgggcgcgctcgatcaggccggacgccgcaatccagaccttgagcagcacatcgacgtcgcgcggccgggtctcggcgtgggcgcacagggcacgagagacctccttctggagcgtcgcgaaatatgattgatcggtcgcgccggcgacccggatcgacgccgacgagacaagcgtgaagctgcgcatgccggtgctgcgcgcagtcagtccgcttcctgcgagaagttcgcgcaacgccgcttttggttccagcacgccgtgaatggcgcgagagcgctgcccggccacgagtgcgccgtcgtaaaacacctcaagccccgtggcggcgctgtaggcgtcgagcgcgctggccaacggctgggctgcaatctcgaaacgaacctgctcgtcctgcgcagcatcggcgctatcggcaagaaaaaacaagctcagtccgacaaacacggtccgccacaacaccacgcctgcgggtcgcggcagatgaagagccgcgaacatgggcggaatcccagcttcatacaatcgtcacgtgtcagtcactctagtcagcgttcgttacagttcattgacacaccttggatgtgcaatgccccggacatgcagacctatccgcgcatgcgatgaccgatcgaggcctgcgacctctgtcgccttgcgccggctgattggcctttcaagtacccgcctgaacccgtcgcaagcgccgcaggccgcggatcgcatcgcgcgccggcacctcgagcacgacatgcgcgccgatcgacaccgcgacggtcgttccggccagcaggccgaaaatcgccggggaccaggtgtcgagcgggccgaacgtcgtcatgaacgtggtcaggatgatgaaatgcgtcatatagatcgagtaggagatgacgccgaggaagtgcatcggcttcgacccaagcagccgcgaactgagcgaatcctcgccggttccagcgagcaccacgaacggccacacgaacaccagcatctgcgggttggtcggcccgcgataggccagcagcacaatgagcgcgacgccgcaccagatcgcgccggaaaatcgcgtgcacgcggcatgaagcccgtcgcggcgctggaagcttgcgaaggcgagccagcccgacacgaatccgcaggttgcccgccccaacgggacccagtagctcacctggctttccgggacgctgccgatgctgccttcaaaaaagtagcgagcgaacagccaatagccgacggcggagcaaagcacgatgccgagaaacctggcggcagccgtgggcggcgcgttccggaacagcagcagcgggaacagcgcaacgtagcaaaaccactcggccgagagcgaccaggccggcgcgtcccagtgcatgccggtgccgatcacgggccatccattcagcatgacgagctgcagcgcgaagtccaaggcagcgcggctggcgggataggtgactggatcgatcaggcgcggccacacatagagcgcgccggcagagatcaggcagaccagatagagcggatagacgcgggcaatgcgcgccgtcagatagtccgagaagcggaacgtgtcgcggctgtagacataggacagcgtgaatccgctgaggcagaagaacaggtcgacggcgttgtgccacatgaatgcggcgccggcattggcaggaaaggcattcttgaaatgcgcgagagcaacggccatggcggctgcccctcgcagaccggtcaacgcccgcagctcctgccgcattcccgcgcccccgcctcgcgggatttttcccgcgcaagggcgagtgctaccactcccgggagcgcagacacaattggagcggttggattgcccacttaaaccgcagcggcagccggtctcctcggttcatccctgccggcagcgccacgcttcgacgtcggcctcggtgcgggtcgcgaggaagacacccgatgcggcgaatcaagatcggtcgtgagctggatagctggatcaaaaaccgcaaccgcagcggtgctgcaatgtcgggctggtgggggaggcaggactcgaacctgcgaagccatgaggcggctgatttacagtcagctccctttgccactcgggacactcccccgtccaacagcgtcgaaccggccgcgcgagtggcggcggaccgggtcatcgaaatgacgctgataaccggccgacccgaagcgggtgcgcggtcgggcgcgtttatgggggaaggcggtccccaaagtcaaccaagcgggcgcgcaatttgccggttaaattgccattctgcgacacccgtgacacaagcctcacatgagcgaccgcgaccgcagacctaatttccgaggcaagggcggtaaacccttccaaaaagggccgaaattcggccgcccgcaaggccggcgggaccgcgaatccggttccgacgggccggtgattctgtatggctggcacacggtggcggccgcgctcgcaaacccggaccggcagatccgcaagctttacctcaccgagaacgccgccaagcgcctcgccgaggagaacatcgcgacccgcgtcaccccggagatcgtccggcccggcgatatcgaccgccgcctcacccccgatgccgtgcatcagggcctcttggcggaggccgatcccctgccctcgcccgatatcgacacgctggcgcaggaaggcatcgtgctggtgctcgaccagatcaccgacccgcacaatgtcggcgccatcctgcgctcggcggcggcattcgccgtgaaggcgatcgtcaccaccgcccgccacagcccggaggcaaccggcgtgctggcgaagtcggcctccggcgcgctcgagctggtgcctgtcgtcacggtgcagaacctggcgcgcgcgctgaacgagctgaacgagcacggcttccagaccgtcgggctcgacagcgagggcaccgaggatctcggcaaggttcaattgcaacagccgctcgcgctggtgctcggcgccgaaggcaagggcctgcggcaattgacgcgcgagacctgccgcgtggtcgcccgcctcgacatgcccggcgcgatcaagagcctgaacgtgtcgaacgccgccgcgctcgcgctctatatcggcgccagccggcttgggctgatgggttagcttgatatccggatcggccgcggcacttgatgggctgcggagcctgcggtccggggcgcttgtgagacggcgctcgcacgaatttctgaatattcgaaatccacccctgatttgcccgacgtgtcaagtcgccccgtcgacagtcgccccgtcgaaggccgatcgccgccggcccctttgcatggggttgttttcgatattttggccgcgcgcatctgcagctgatgcggcgccggctaccgaagcgacccgacttcaatgatcaaacgaacagcgcccgctcgcgtcatgcgaacgggcgctgatgtcttcgacagatcgccggatcagtagtagcggcgcagcacgcggtggccatagtgataggccggcgcgcgatgcgcgtagccatagcggtagccgtagtgcggacggtacggccgatagtgatggcgatagccatagtggcgatatccgtagtacggacggccatagccttcgcggtagtacggacgcggcgcccagttgcccgggccggtgtaggtcggtccctggttgacgtagtagtactgctgcgccgtgtcgggataggccgcctccgggtcgggcaggcgttcgaccgcgccgtaaccgccataaccgtagccgtagccaccgcaaccgccgcagccgtaattcacgacaggcgcggaatagccgcaagggttgaagccgcatgccattgcgggtgcggtcaccatgacggccaccgccgcaatcagtcctttgatcatttgacgcattactctctcctgtaggtctctctgttcgtcgcgtagctcttggtggctatgtaaggaccccggttcacggggctcttgatttaggggccccgggggcgcggtggccgcgggaccggccccggcagcggctgcggcccgttgaattgcggtgcgtagatcaccgccggcggatcgaccggcacggaggattgcgccggcagcggcgccgatcgcgccgaccatgattcatgatagctctcggcgggcttgggcagttggcggttggccggcggctcgatctcgaggcggccgtaacccggcatgtggccgaggctcggataatagtggccgacattcggcaccggatcgatcgggcggccgccatagatggtcggcaccatcgactcgttgcgcgcgagccccatcgcgctttcgaccaccgcgtaggaggcgtcgacgccattgatgatgatgggcacgccgggacggttgggcacgacgatgtcgaagccgccgccggccagcgccgtcgaggtcatcgcagccaatatcgccagcgcaagagttgcgcgcatgatcacccagcgtcccgaattgttccaggagcagcctagtccaacagctcggcggaagggttaaggacgcgggccaaactggcggtaagcctaacgcgtaagcatcggcaaccggtcaatgcggccgagcgggatcagaaatcgttaacggcggtcctgggcgagcccgtgtcaggtgaaggcgttctcgacgatcgagtggatgccgatcgcaatcgtgaccgcgccgaccgccatctgcaggccgcgattggcccaggtcagccagcgcgcggaggctgcgagcggcaccgcgatcacgctggacagcacgcccatgccgatcatcgagccgaccccgaacagcgcgacatagcctagcccgatcaccgggctcggcgcctgcgacaccgtcaataccagcagcgccgccgacccggccatgccgtgcatcaggccgaccagcagcgtgcgccagcggaagccgtgcccgtggctgtgcgcggcgcgggcgtgcggcccggtctcgcccgcgtggctatgggcgtggaaatgcgtggtgtcgccatgcgaatggctgtggaaatgcacgcggtcgcgccacagccgccaccacacatgcgcaccgagcccgaccagcatgacgccgaccgcggtctcgatcggctgcgacaccgtttcgggaatcgcccgtccgagcaggatcgcgacgccggcaaaaatgaacagcgtcagcgtatgaccgaggccccaggtcaggccatgcttgacgatgtcaccgacatgggtccggcgcgccgcgatgcttgatacggctgcgatgtgatccggctccagcgcatgctgcatgccgagcagaaagccaagactcaagattccgaacatcaattccccgcgccgacgccagatcgaacactgctgtacacgcaattctcgttaaagcccgcatggtccggaacgcatcatgcgccggctaccggaacttcacagtggtttgaacgcggggcaaggcggcagaacggctttgtctgcacccccggtacctggttccgcggcagcgacggccgacagcccccctgccagccagtagctccggccgagacgacgatacgcaaagggcggccttcgggccgcctttttgctgcccggccggaggcgaagcggtcgatcagggccttccgggctctggccctggtcgggccgtcgggttctggccctggcgcgccaagtctgctatgcgagcgcgcaaatcattccgatgttgccggcttagctcagcggtagagcagcagttttgtaaactgaaggtcgggggttcaatcccctcagccggcaccagctctccacgctggctcatcgcacccgccgaacgccggtttgccgcgcggtctgccaagacttggcgttggacaaccgggtcgtggaacttgcactcaccgaaaatagtccgcaaacttgtgcaacagggaagccacacgcgaattcgggcactcaccggatgacggaaaagcagctgcgggcgaggacatctctgctgaaggcaatgctgctcgtctctgccctgctgatgggctactcggatctcatcaccaccaacgagatattgcagcgcggaatgggcgaactgaacccgttcatgcggttcacccaggagtggctgggcgaatggtggctgattgccaagctgggtctgacctatctcgtgatgtggatgctttggcgcggcaaaagcgaacgccagatggcctatgtggtcgccttcattgcgacgcccgtgtacaacaatctgatcattctcgcgggctccaattgagctgacctgcgctcgtgccggccagccgccggcaacgccgcctcgcatcgttggtcagacctctccgtgttgcggctgttgcatccgattgatatttcgaaccatgtccggcagacgggactgaggatagcgttggacaaggtgcccgcaccggccctaccgcttggttgcggcaatagaggttatcagacgcggttctgacgatggactggtcctactatctcgtcggcgttgccgtcgtcctgcttctcctcgcctatcgcctgcatggcgggctgttcaggaaggatacactgcaggacgagaggctgaatcgactgatcgatgagcgcatcgatcgcatggacctgaggcgcgagaagaagcacagcccgtcccagccgtaaggaccgggcagccaacggctcctcgcttggctcgtcagtctaccgagatggatcgccgaccgcagcagccccgccagctcgcaggtgaatacggcagttccgcggacggagacgaaagctttgacgccggtgcgctggccgcagcaaggttcttcgatccagctgccgacgcggtccgcgcctgcaagtctcttgatgatcccgtgaacgcagaccgtcctgctgcggatgtcactttcaaaccgaagtgcctgggcatcgagtcctccatccagatttttttgcggctcacgccgggtgttcgtccccaggagcaatccgaacacgtgcgtgcgattcaatcaaagcgcttggctcgattccccacaagcacggagagaaccgtatgactccggtcttcagcttcgcatcatcgattgcgctgcccggcgcgcgccgcaggctgcgcatctgcatgtcgtccgaaccgcgctgcgatccgggaccggttggtaaaccgcaaccgaccacgcctgctcttggcaggaatcgtgggatcatccccgtaggatcacccacccctcgccttgcttctgtccttgcggcccgaaacggggtatgcagaatgcggatgggactcagccaatgacctatttgatccttgcccgggacggcaccagccaaatcgtgctgaagcgcgacagcgaagacgcggccgagaagaaggcacgcgaactgaaggagatgggctggttcgaggtcgaggtccgcgaggacaaggcggggcacgcgaccgcgctgactgatcgcccgccgacccttcaatgacgccttgatgaacctttgcccggtggcccttacacatgtgtgaggagcccaccatgtccgacacagcacattaccgcttccagtccgatcaagcgcgacggctcgcccgccaggttaccgacgccgcggtgcgcgaaaagctgctcgaaatggccgaggagtatggccgctacgccgacctgatcgaggcccgcggcgccgaatcggcccccgtcgaggcggtgaccgcccactaaggctgcccactccgctcccgccccgtcgcgaatatcgtcccccgtacaagatcagcggcattgccgccgcgcccgccgcacctcggccggtcccgaatcaagcgccgctacattgtcagccgccggtccggatcgccggtaccccgttcgtctcgaacgccaatgcccgcctgtgctgacggtgcccacgcccggcgattgtcacaattatgtcaccgcacccgtgaaacaggcgtcttcgtcaaccatcatgatgaccggtgcttgattccgcgcggttgctttgctggaatccgcgcgctcaaggtgcgccatgaaatggatgaaagaacgcgatctcctgatcgcgcagacaatggccttcgtacagtcggtgaagggcaagctgcccgacgccgaggtggcggcgcctgcccagcggaccgccgcaacgccagccgcgaccgaaccggccttggagacaagggccgccttggagaccaaggttacaccggagctcaagcctgcggccgaggcccaaacggaggccccgagggtggtcatgccgcccccgcttccagtgcctaccgtgcttgagggcctgccccccgctccgtcgcccctagcggtgacggtcgtcgaagtcccgccgccaccggcgcagccgccgcacttcccgaagctcgacatccgtggtgactttgggtccgaggtccgggaacgggttgccaacttccgcgcacagcaacagcgcttcctcagagagcgtgaggagtactgcaccacgaccatggccaaggtccgcgccgcgatccgcgacaacagcgagctgccgcgctccggcaagtaaccggcgcgctttaatctccgaaccgacgactggacttcagccccgcgcgccggttttcaccggctcggtcaggaagcgcccgctcgagggcgccggcgccggctctgccatggcgtcgaggccgggctgcccgccttcgaccatagaccgcaggccagccatagcctgggtcatgcgttcggcgaatttggccgcggcgccatcgaggaatgccttgtccttcggcttcggcttggcgatccgcagttcgaaacgggacgttccgtccggaccgtccagaactgcccgggtcatgatgatgcgcggcgcgccgggcaccggcagcgtgatgccgaccgtgaagtaatcgaccggacgccagtcgagcgtctcctcgacattggtatggttgccgtgcgcgcaatgatttttggtgccgacaccgcgtcgccccttgcccgactcctcgacgatgtcgtcggcgtcccaccatttccgccattgcccgggcacggtgatgaactcccacaccgtctgccgcggcgcggcgatgtcgaactcgaggatggcgtaggcgtcttcgcgcgtcacctccatccgaagctgcgcgtcgtcctgttgccacgccgcttcgagatcgcggacccatagcgtcacatcgccgatgatgtcgatggtctcgtgatgcgggatgagcccctgcgccaccggatcgacgcccatggcgcggatcgccgcgtcgctgtagagcgcgtaggcacggccgccaagcttttcgccaacgctgttcttgagcagccggtggaccaggatgacatcgcgcccggcgagttcttccctgccgcccatcttctgcttcaccatctcgccgtgatggatcacgaatttgaaatcgagatcgcccatcgcgacgcaggcccggcactcgcatgtcgaggcctggcggatgtcgcgcaggcgccggcggaatttgaaataggccccctcgatcgcgtcctgcagcagcgagccgtcgatcgtcgcggtcgagtagacgaatgcggcgtcgccctcgaacttggcgaggcgaaatggcgggcgcagccccttcaccacaacatccatgaaatcggcgatgatatcctgcgcgtggtcgagttcgaccgccgccaggaagttggtgtagccggagatgtcggcaatcgcgaaatatgccgcttcagctttcggaagcatcgagacctcccgcgcaaccggttcacgccgtccacgtggatacgcagtttgtcataccacaccgaagggagataacatgagattcgttgctgccgccgcattggctcttgtgggctggcttgccggcatcaattgcgcaagcgcgcaagacgccgccatgaaaaccacgccgacgaccaaaattctcgccatcggcaccatcaatcccggctttgaacaatcgcaagtgcgtgctgttctccccgaggaagttcgcgaaaccgtcgatctctacctcgccggcaagatcgagcagtggtactcgctccagggaaagccgggcgtggccttcatcatcaacgtcaccgatccggccgtcgcgcacgagatgctcgaaaagctgcctttgggcaaagcccatatgatgagcttcgagctgatcccgatcggcccgctcaacccgcttcggttcttgcagggcatgcagccgaaaccttgagacgggccatgcctgacttgggcgtggcgcgcagccctagcgcccgccgaccctttccagcaccggcagcagatgcttcaggaactcacccggattctcgctcatcgggaaatggccgaggccgttcatgatggtggcctcacagccggcaatgctgctcgccaccgccagcgtttcctccggcgtgcaggaataatcgtactcacctgacagcaggaacagcgggcagcgttcggtgtcgatctcggcgacgcgggcgcggatgtcgccgtcgatcttgtagaaatagaggtcgcccttgaacacgcccgggccgccttgcatgtaatgccacagcgtctcccatttctccttgtcgggcgcgtcggggccgacgaggccggaaacgatggcggcagcaacctcgccgccgtgcacgtcgggccggtgcaggaaattcaggtcgtaatagggatcgacatgcgcgccggcctgcaggccgatgatggcgcggaagcgttcgggatgctcgagcgcaagatgcagcgcgatccggccgccgatcgagcagccgatcacgatcggcttgtcgaggtcgagtgcgtcgatcacggccaggatcatcgccgtgtattgtgccgaggtgagctggtactcctcgtcgtgccagccttgcggcggcgacgacttgccgtgccagggcatgtcgaaggcgatgacgcgatggttgcgcgtcacacgggcatcgttcatcaggccgcgatactgccgcccgtcggcgccggcggtgtgcaggcagagcagcggcgtgccctcgcccgcctcctcgacatagacgcggtgcgcccggccggacagctcgagatgcatataacgaccgacgatcggttcgaaattggcgctcatgccggcactccctcacggcgcagcttgccgagcgcttccttgaagtagcgcaggttcgccatgaagatctgcagctcgccctcggccttgagcgcccggcgcttgatcagcgccatcaggtcgtttgagcccggcggtggtctgagttcgcagaacctgtcccactcctcgtccgaggtgcgcagcgcaaacgaccacgacggcatcacgaacggccccttggtcaccgccatgacccggccctcatggatcgcgatcaaccagtcggtcttgccgatctccagcaggaatgtcgtggtgagatagcggccgcgccgcaccaggccggcgtcgcgattaacccgttccttcagcatctcgatcatgtcagctccaccctggccgcggcccgtccgcggaagagcgcagcaggcacttgttctgccggcaatgatggaaggaacggccgaaccgtcaatcgctacgagcgttgcggggctacggcgttttcgctgggcacgccagcaatcggtccgcgcggagagaaactagagccaggaccagaccagcgccacgttggcggcgcaggccgcgagcagcacaaccgcaagcgcgagctgcacgcgttcgtaggggggctggtggatcgctctcatgggccgaagcatccggcgattctacccggagagtcccggggattcttttttccgggatttaccgctcattaaggactcaggccctccggcaaaaggaccgaaatgactcacaatttcagatgcttgctgtggacccggctcacggttccgtgattggaacgggtgatctcccccgaaacccagaaccgtcattggcgttgtcgccgattggggaacgacaaaatgccgtacgcgctattctatcaggacaccaagctgagcaaggcgtatccgaccgaggctgacgtctggaagctggcccggaaatcggggctggtggtggatgctgtctccgaggaggagacgtcttcgccgcgcccggtgctggacaatgactacgagatccgaccctgccagctcgatccgaacgaggacccggtcaagaacaaggccgatgccgatcgcgaagcgcggcaggagccgcggttgaactaggcgacggcagatcgcccggcgcgcaggagcggaccgggtaccggtgcgatcgtcgcgttgctcctacggcgtcgccgtcgccaatgaagcctgttcggcggcgagcgaaacgcagatcttccgccgatgcagaccgcggattgcgcccgtcaccttgaggactttgcccgccgtgcaggacacgtcctggaccagcacgacctcatatggcgcaagcgacaagggttcggatttaagcacagtctgggcaacgcacggcacagcgaccgcagagaggatcagccctaacgcaaagctacgcatttttgtttgtccaccagccccggcgttcgcataataacggatcacgatgaaagttccgtgcaatgcaggaattattttttgcattgcacgatcaggcgtgaataccggctgaacaagcaaacgtcaggccaaaaaaggccgccacggaggcggcctttgatgttgatggaagaagacgcaatcagtagcgggagcccaccggaccgccccagccgaagcggtagttgaccccgaccttgacggtatgctcgtcgttccggaagcttgtgccgactaggtcggccgggccgctggtgaagttggtcttgccgaaattgtagtactggtattcggccttcgccgaccagttcggggcgaacatgtattcgaggcccgcgccgacggtatagccgtccttgtggccgccgtcggtggtgaaggccgccggcacgccgccgaccgtcgccgtgatgttattgttgtcgcgccaggcgtaaccgcccttggcgtagagcaacgccggaccccaggtgtagccaaggcggccggtcaccgaaccgagctggtcggtattcccggtcaccagcgtcccgccggggagcagcacgccattgttgttcgaggaactgggcagccaggagtactgcgcctcgacgcccatcacccagttgggcgcgaactgatagtcgaagccgccctgcacgccgcccatgaagcgcgcatcgctgcccatcaggttggtgccgtcggtgaacgcgccgccgacatggccgccgatatagaaaccggtccaattgtagacgagcgccggtgcggtatagggcggcggggccttggtataggtgcgagccggcatgtcagccgcaaacaccgggcccgcgagggcgaccagcgcgactgtgccgagcaaaaacgtcttcatctctgatccccgttacgaacgctgcgctgttaaaccaaacaacgtgacgtcaattaggttgccttggggcaatgccagacccgtgatgtttccgagctgtagcggggtcgcaacaacgcccgcttgttccttggcgcagaaggtttttcacaggttaagcagccgtatttcggctgtatgtaagtcgcaaacggctaaggtgaagttcagcactccccgaaaagtgatcggaattcgctcacgaactggtcagggctgcgacaggccgccgcggcctatggcgcgggcatgatcttcgcgcaaacgctccgtgcttgtcgcgcgggcaaaccgcttcacgctttcttccggatcacgcctagcgcgccattttttccagttccggaaatgccgcgtaggatgcgccggcgcagggctcggcgggattgtcgagaatgcggtcgagccggccgtcgacgaacatgatcccccgctcccgggtcgggcgataattgccgtcggtctccctggcgctgtagcgcacgcacaccatgtagcgaagccggccgccgatggtgcgctgcgccgggtcggcaatggccgcctcgcggaccccgaccggattgttcaggtagatacgcatgaaagcgacgatctgctcgcgataacggtcgggaaacggctggttggcgacaccacgatcgtcggtgaacgtggtcgaaccgccgccgtcatcgctggtgaggcaaccggcgagcggaatcgagagcagcaggattgccgccagttttgatgatgtccgcaaggtcagctgtttcatgggtccccggccggtctcataaaccgccaggcggggaattcgcaactcggttattccggcccgcgacggcgggtctcaactgaagccaaacgcactccggcccgccgccattggggaagcaatggacggacgggccggttctgcatccctgcgcaaaggctttgcctttgtcgctgagggcgtagcggggcaatgtggagcgaactacgccccagggatcagactcgagatcagttcagcctcgctcgatcagccacgcttggccggcacgacgtgcttgctcgcgaccttggcgtgaacgtgcttggtcgcgtgcttcggcgacttcaccttcagcatgcccatgtgcttgtggtggcggtgatggcgatagtgcttgtggtgcagcttggcgttggcattgcgcaccttcgacggcagctgctcgctcttgatgacaggggcggccttggtcgccggggcagtcgtcgccggggcggtggtggtcgcgggcgcgggggttgcggtcttgccggtttcggcggcgagcgcgggcgctgcgatgacggacacggcgagcagcgcggcggaaatcgtcttcaacatggtggtcctcctcttcgggatcgagaggtctccggccggatggtcggcctcaccgatcaatgcatgcgaccttaggggccgcgcactgaacccgttctgaagggcatggacggaattcattcatgtgaatgacatcttggtcatgttgcccgctcctgcgggtcgcagtcctcacgcaatcgtgggatcggccgggaatgttctgcaccctcgggtgttcaagtcagcaggcttgggtgtaggattaccgagcacgatcaggaacgatcaggagcaaccaggaatgagcaagacgacgaagtttctaggcctcgcagtgctctcgatgacgctcgccgccgggccggtcatctcggcctacgccgccggcagcgaaaatccctcgccgccggcgtccgacagcggcagcagcaagggcaagaaggcggccaagaaggacaagagctccgcgatcgacgatcagaagttcctggccggctaccatgccgcctatgccacgatctacgacaagcacgactataccgccgcgatcgagcagctgaaggcgctcggccaggacgatcgtgccgacgtcgccaatctgatcggctactcctatcgcaagctcggcgactacaaggtctcgcagatctggtacgagcgcgcgctcaaggccgacccggcccatgtgcgcacctggcagtattacggcctctggcaggtcgaacagggcaaccgcgaccaggcgcagtaccatttgaaccgcatcgcccagctcgccggcaccaacagcgacgaataccgctcgctcgctgcagcactcgagaagcccccgggcaccggcctggtttactgagcgatccaacgatcgtcttgatcaagccggcgtggtcaaacgactacgccggctttttcatgacgacgtcgcagcgatcccgacctcgcgccggcggcgaccgagaacggcgagcatgaccagcgcgccgaccgaacaggcgaacgcgagctccagcacggcgttgctgccgaaccgggtcagcagataagccagcgccggcggcgaggccgccgagatcaggttcagcggcagcgcgatatgcgacgacgccttggcaaattcgctcttgtcgtagaacaccagcgggatggtcgcgcgcgccaccgcaagcgcgccgctgccgaggccgtaaatcaggatgaaggctgcgatcgccgcgtaactgccgtggccgacgatcaggatcagcatcgcgaccggcagcagcgtgccggcgaacaggcccgtcgtgatgccgtcccagcggccgccgccgaggaagtcgatcgcgcgcgccgacacctgcacgatgccgagcgtcgagccgaacgcgaccgcctcggcggccgatagcccctgcgccttcaagagctcgaccagcaccgcgctgaagccgaagctgacaaaggcgttgagcgcgatcgcggcgaccaccagaacgaacgtgcccctgcccaccggcggcgttgccgtcgcgcgatccggtgtcgataccgtctcggcctcatgggctgcccggcgtggcagcccgaacgtgtagagcggcaggcagaccagcagcatcgccgcggcgtagaccaggcaggtgccgcgccagcccagcgcctcggcgaggaacgcggtggtcggccagaagatgctgctggacagcccggtgaccagcatcagcgcgccgatcgcgcccttcgcgttccgcccggccacctcgttcagcatgatgtaggcggccgtgctcaacgccgcgcttccggccatcccgaggatcgtccaggcaatgaagtagcccgcggccccatgcgcgcaggcgagagcgacgaaaccgagcccggcaaccgcgctgccggtcatcatcacccgccgcgccccgacgcgccggaacggtcccgccagcagcggcccgcacaggcccatggtcacgtagagcgtcgaggtgccgccgaacaccatcggcagcgagacatggaggtcggccgcaatccggtggccggcaatcgccggcaggccaagggtgccccagccgaaaacctgcgcgacggcaagaacgagcagcacgccgccgatctgccggtcgatacctagaaactgtgcccggctcgtcccggccatgagtccaccgcattccaatcagaacgctgggctaaccgacctggcatgacgggatcaagacagagctgtgccgagccggcctggtccggcgaaacccccaagaataaatccaggaatccggatatttgcagatagttacgggtagtgttcgagccgccgctcgggcttctgcggacggctcgcgccgaccgtgttggcatcggcggtttcccccggctttgccgggcgcgcggctcgctcgatcgctgggccgctgtcgccggtcttcctgccattgttcagcgcctggccagtggtgctcgggtcgaccgcctggcccacccccactgagcccgccgaaggcccggagctttgcgccaacacggtccccgacagcatcagagctgccatcagtatcgccgcgttgactgtcatgagggggcctgctgcgcatcaaatgatgcacggcaacgcatcgctgccacggacgttcccgcgaccccatcattttaggtaaatgcgtggccaatgccgcctgcctggccacgcgtctgaccatccgacgttgcggccgtcgcctcacttcgccttctggatcgcggtgacggtgtagccgccgtcgccctcccgggcttcgaacttgaccttgtcgccgaccttcacctgcttgagcagcgcgggatccttgacccggtagaccatcgtcatcggcgcctccatgccgaggctcttggccggcccatgcttgagcgtgatcttgcccgcgccctcgtcgatcttcttgacctcgccatcgatatcagcggcctgcgcgaacgccgcgcccaggctcagagccagcatgagcagaccagcgcccgcaaggtggatcatcctgttcatcgctatcgtcctgttgctcgttggtggcttcatttcacgatgatgcggccggtcattccgtagtcgcggtgatcggggatcaggcaggaatattcgaacgtcccggccttggtgaacttccagacgatctcggcactcttcttcggcgcgagacggacgccgttcggatcgtcatgctccatgtgcggatgcttcttcatcacttcggcatgcctgagattctcctcggtggtcgcgagcaggaattcgtgatcctcggtgccgacattcctgatcacgaagcggatctgttcgccgcgcttgacctcgatgcggaacggcgtgaactccatctccttcatctcgacctcgacggtgcgcgacggcttggtgggatcgccgggctcgccggccgaataggattggtgaccgtgattttcgtgtgcgcgcgccggcgctgccgcgaccgacaacgcaacgagcgcaatgcaggttatggtgaggcgattcattgcattctccatttcaaaaaagtggcttgtccaggtcatagctgcggttgttggcgggcgacggctgcaccgacctctcgctccggtaccttcacgcggatctcgatccccttcacgatggcgaagatcgcggggatcacgatcagcgtcagcaaggtcgaggagatcatgccgccgatcatcggcaccgcgatgcgctgcatgatctcggagccggtgccggtgctccacaggatcggcagtagcccggccatgatcgcgaccaccgtcatcatcttcgggcggacgcgctcgaccgcgccctcgatgatcgccctgtgcaggtcgtcgcgaccgatgcgccgcccctcggcggcgcagcgcgccctcgccgcctccagtgcgtggttgaggtagatcagcatcacgacgccggtctcggcggcgacgccggccagcgcgatgaagccgaccgcgaccgcaaccgacagattgaagccgagcgcccacatcagccagagccccccgaccagcgcgaacggcagcgacagcatcacgatcagggtctccgccaccgagcggaagttgaggtagagcagcaggaagatgattgcgagcgtcaccggcaccacgatcttcagccgggctgcagcgcgttcgagatactcgtactgcccgctccagaccagataagtgcccggcggaaacagcacgctcgcctgcaccgcgcgctgtgcgtcggcgacatagccgccgaggtcgcggtcgcggatgtcgacatagatgtaggtcgcgagctggccgttctcggtccggatcgagctcggcccgcgcgccggcgtgacgttggcgacctcaccgagcggcaccgcgccgccggccggcatcggtaccaggatgtcgtttgcgattgcgccgggattgtcgcgcaggtcgcgcgggtagcgcatgttgacggtgaagcgctgccgcccctccaccgtggtggtgacgctctggccgccgagcgcggtcgcgatcgtgtcctgcacgtcctgcactgcgatgccatagcgcgccagcgcctcgcggttcggcgtgatctcgagatagtagccgccgaggttacgctcggcataagccgacgaggtcccgggcacggccttgagcacctgctcgacctgccgcgcgagcttgtcgatcacagcaagatccgggccgatcaccttgacgccgacaggcgtgcggatgccggtcgagagcatgtcgatgcgcgccttgatcggcatcgtccaggcgttggagacgccggggaattgcagcgccttgtccatctcggcgatcaggccgtcgagggtgaggcccttacgccattcctgcttcggcctgaggttgacgacggtctcgaacatctcggacggcgccggatcggttgccgtggcggcgcggccggccttgccatagaccgaggcgacctccggaaagctcttgatgatgcggttctgggtctgcatcagttcggatgccttggtcaccgagatgcccggcagcgtggtcggcatatagagcagcgtgccctcgttgaggtcgggcatgaactcggtgccgagctgccgcgccggccagacggtcacagcgagcgcgccgagcgccagcaggatcaccagcgtcttggcctgcaacacgccgtggatgaccggacggtagatccagatcaggaagcggttgatcggattcttgtgctcgggaatgattttgccgcgcacgaagatcaccatcagcgccggcaccagcgtcaccgacagcagcgcggccgccgccatcgcaaatgtcttggtgaaggcgagcggcgagaacagccggccctcctgcgactccagcgtgaagatcggcatgaacgacacggtgatgatgagcaggctgaagaacagcgccggcccgacttcggccgccgcctcgatcaggatcgacacccgcgactggccaggcttggcgcgttccagatgcttgtgcgcgttctcgatcatcacgatcgccgcgtcgatcatggcgccgatcgcgatcgcgatgccgccgaggctcatgatgttggagccgatcccgaaaaacttcatcgcgccgaacgccatcagcacaccgaccggcagcatcaggatcgccaccagcgcgctgcggacatgcagcaggaacacgatgcagaccagcgcgaccacaacgctctcctcgagcagcgtgcgcttcagcgtgtcgatcgccgcatagatcaggttggagcggtcatagaccggcacgatctcgaccgatttcggcaggctggtcgcgatctccctgaatcgcttcttgacgttctcgatcacgtcgagcgcattcatgccgaagcgttgcagcacgatgccgctcgccacctcgccctcgccgttcagctcggcgatgccgcgccgctcatcgggcccgagctcgacgcgggcgacgtcgcgcagcaacaccggcgtgccgttgtcggtcttcagcacgacattgccgaggtcgttgatgtccctgagatagcctttgccgcggatgacgtattcgaattcggagagctcgacggtgcggccgccgacatcggcattgctggcgcggatcgcatcgcgcatccgctgcatggtgatgccacggtcgcgcatccgctgcggatcgaggatcacattgtattgcttgacgaagccgccgacgcttgccacctcggcgacgccttcggccttggccagcgcgaatttcaggttccaatcctggatcgtgcgcgtatcggcgaggttcagctgcttcgacatcacggcgtactggtagacccagccgacccctgtcgcatcgggcccgatcgtcggcgagacgccggccggcagccgctgtgacgcgctgttgagaaattcgagcacgcgcgagcgcgcccagtagatgtcggtgccgtcctcgaagatgacatagacaaaggacacgccgaagaacgagaagccgcgcacgaccttggatttgggcaccgtcagcatcgccgtggtcagcggataggtgacctggtcctcgatcacctgcggcgcttgccccggatattcggtgtagacgatgacctgggtgtccgagagatcggggatggcatcgagcggcaggtgcagcagcgcatagagccctgcggccgccgcgaagccggtgccgaacagcaccagcagcaggttgcgcgccgaccaggtgatcacgcgggcgatcatggcttgcctccatccatcatctcgcttccgcccgccgcctgcttcgcgccggcctcggcaaaccccttgatcgccgccttcagattgctttctgcgtcaatcaggaaagtggctgaggtgacgaccgcatcgccctcagcgatcccatctcggatctcgacatagccgtcgccgcgtcgcccgagcttcacctcacgcggctcgaaccgcccgttgccgcggtcaagcagcacggtctgccggctgccggtgtcgaggatggaattatcggcgaccgtcagcaccggcgccgcgctgccggtgtcgatctcggcgtcgacatacatatccggaagcagcgcgagatcggcattctccagctcgatccgcacccgcgcggtgcgtgtctccttgttgacctgcggatagatcatgctgatcttccccgcgaacgcgcggccgggatagctgcgagcccgcaccgtgacatcctgcccgaccccgatattgccgagatcgcgctcggcgacgtcgaccagcgcccacacgacggagacgtcggcgatccggaacagcacgtcacccggctgcgcgcgcatgccctcgatcgcggcgcgttgcagcacgatgccgtcgcgcggcgacgaccacggaattgcgatcggcaccgtccggctcttctccatgtcggcaatgacggcctcggggacgtcgagattggtcaatcgctgcttggagcctcgcccgtagggctcgatgcctgcggtcgccttcgacgtgatggtcgcgacgtattcggccgcagccgacgagatcgccgggctatagacctccatcagcggctgccccctggtcacccggctgccggtcgtgacgtcggcgaccttctgcacatagccctcggcgcgcatcgcgatcacggagacgcgccgttcgtcgagctggatcgtgccgggggcgcggaccagcgtgcggatgcggcgcatcagcgcggcctccgacttgacgccggtgcgctggatcttgccaggcgacagcgtgatcgaaccgtcatcgctgtcctcgccgtcatagaccgggatgtagtccatccccatcgagtccttcttcggcaccggcgaggtgtccgcaagccccatcgggttgcgataatatttgaccttgcgctcgctcttcgcggccgcggacttcgcattcgccggctgttcgggctcaccggattgcgcatcggcctccgggaacaccggcagatagtcgcgcccgtcgggcgtctgcttcggcgtcgccgagtagagcggcttgccgtcgggatcgcggtaatagatcggcgcagcgctctccgccgcctgcacggcggagacgatggcggcggtcgccggccgcggcggcaggccgcgggcggtccatgcggcgccggccactgcggcgatcgcagcggcagcgccggcccatatcaagggccgcatcgctcgagagctcattgctcggccgtgacgacgagcttgctctcgaccgagccggtctcgccctgcactttagcgccgagcgacaattgccagcggccggccatgccgaaggtcgccttgaaccggtaggtgccgggttcagtcgactgcatcggcgtcaccttggtggccatctcctgcatgccgtcgggcgccatatcgagccgggtcgagaagatgactgcgtcggagacggcctttccggtgctcttgtcgagtaaccgcaccgaaacgacgcgatccgcgccggccttgacggtcggctgaacgagttggaattcgtagttcttgatctcggcatgggcgggcgcgtgggccagggcaacgccgatcagcgcggccgcagcggcgcgcgcgaggtggagagacttcattggtaataatcctcgatacgtctgatggaccgcatgagcggcatgcgaaggcacgcgcgccgtcaggcgcacgcgtcagcgatcaggcgcgtcaagcgcctgtcagacgttggttcgaggcggatgatccggaggcttggcgccgagcccgtcaagcagacggtcgtcgcgcggggcgaagccattccgtgacggctcgcgcgcgatcagcgacatcgccccggcaggcgccgacagcgagacgctgagcatgcagagcgcaaggaacggacaatcgtcgcagcccttgctcttggtctggtccggacagcagggcatgttgtcggccatatcctgcatggacatggcttcgtcggacaccatgccggacatgacatgatccggcatatcatcgtgaccggacatcgcctgcatggcggtggccgacgtaagcggcatcgtccgggcaaacgccgacgccacgggcgcgagcaacagcccggccgcgacgagcagcagaatccagaaattgacgagccgcctcatttgcatgcccgcttgtcgcacggatcagtggaacctgcaaatccgtgcgacttcacgatcgcgccagtggcacctcacgcctgctttaacaccgccggatcgacgggcatcttccgcaaccgcttaccggtcgccgcgaagatcgcgttgctgatcgcgggcacgatgcccgatgtcccggtctcgcccatgccgccgggcggctcggtgctcggcacgatatggacctcgatcgccggagcctgatcgatccgcagcatctggtagctgtcgaaattggtctgctcgacgcgaccgtccttcagcgtgatctcgccatagagcgcggcggtgacgccgaaattgatgccgctctgcagctgcgcctgcaccgtgtcgggattgaccacggtgccgcagtccatggcgcagaccacgcggtggacgcggactgagccatcctttgcaacctcgacctcggcaatcagtgcaaggtagctgccgaacacgaactgcagggagacgccgcgtccgcgccccgcaggcagcttgccgccccagccggccttggccgcagcgagttccagcgccgccttggcgcgcggcgacttgccaagcaatgccttgcgatactcgaccgggtcctgcttcgcggccgccgccatctcgtcgatcatgctttcggtgacgaacacgttgtgcgagggaccgacgctgcgccagaacgcggtcgggataccgggtggttcgacccggacatattcgacgtggaagttcgggatgtcgtagacgagatcgatcgcgccttccgtcgtgtcgggatcaagaccgttgcggaacgccggcggcgcccagcgcgcgatcacagaagagccggcgaagcgattgttccaggcgatcggcttgccggatgcatcgagcccgaccgagatccggtcgcaccaatacggccggtacatgtcgtgctgaatgtcctcctcgcgggtccacaccaacttgagcggcgcatcgacctgcctggcgatctgcacggcgcggatcacgccatcgacctcgagcctgcggccaaagccgccgccgagtaaatgattgtgcaccaccaccttctccggcggcaggttcagcagcttcgcggtcaccgcctgcacacgcgaaagcgcctggttgccgacccagatctcgcaaccatcggggcgcacatgcacggtgcagttcatcggctccatcgtggcatgggcgaggaacggcagctgataggtcgcctccactttcgtcgccgcacccgccagcgcgttgtcggcgtcgccgatattctgcgcgaccgcgcccggcttggtggtggcggcttcgagctcgcgcgcgatatctgcggtggcaagcttggcgtgcggcccctcgtcccactcgatcgtgagcgccgcgagacctttcttcgccgcgcccatgtgatcggccaccacggcgaccgcgtcatcaagtgtgacgatctggcgcacgccgttgacggcctttgccgccgcatcgtccacgcgcttcacccggccgccgaacaccggcgactgcgccagcgtcgcgaccttcaccccgggcggccgcgcgtcgatgccgtagaccgccgtgccgttgaccttcgacggcgtatcgagccgcttggccgccgtgccgatcagcttgaactcggccgggctcttcagcgtcacattctccggcaccggcatctgcgccgcatcggccgcgagctcaccgtagcccagcttgcgtccggaggccgcgtgatgcacctcgccgttctcggcgcggcatgtggcgggctcgacgttccagcgcttcgccgcagctgcgaccagcatcgccttcgctgtggcgccggcttttcgcatcggctgccatgcaccgcgcatcgcattcgaatttccggtcgcctgcacgccgagcagcgggttggcatagagcttgtcgctcggcggcgcatgctcgagctgcacctgattcaggccgatctcgagctcctcggcgatcagcatcggaatcgaggtgtaggtgccctgccccatttcgacgtagggcatggtcagcacgaccttgccgtcgccaccaatccggacgaaggcattcggcgcgaagtcgccggccgccgccgcggcctcgctctcgcggccggcgaacggcaggttcacgctgagcagcaggccgccgcctgcgattgcgctggcgcggaggaagttgcgtcgcgacagatcggcggcgcgttcagacagattgtccatcagcgtcatggctcaacctcccgactgcgcggcttgcttgatggcgtcgcggatgcggacgtaggtcccgcagcggcagatgttgcccgacatcgcatcatcgatatcggcgtcggtcggcttcggcttgctcgcgagcaaggctgccgccgacatgatctgcccggactggcagtagccgcattgcggcacctcatgcgcgagccaggcgtcctggatcttcttgcccgccgcagtcccgccgaccgcctcgatggtcgtgatcttggaatcgccgatgctgtcgatcgtcgtgatgcaggagcgcaccgcggcgtcgtcaagatgcaccgtgcaggcgccgcacagcgccatgccgcagccgaacttggtgccggtcatgccgagcacgtcgcgcagcacccacaacaacggcgtatcgccgtcggcgtcgaccgaatgactggtcccattgatcgtgatctggaagggcatcctgacactcctgtcctggttcgagacccctgccggccgcgccctccgggcgtggccggccacattccaaagcaatcgtgtgcttcctcgcgccgattgcccactcatggtaataaatagaaatccaaagcatcaaaagcggcgctttgatccgcagtgaagtaaccattggtttataatcatggatcgactgaccagcatgtccgtgttcgcccgcgtcgccgatctcggctccttcaccgcggcagccaaggagctgcggatatcgccgaccatgatcggcaagcatatccgctttctggaggaccggctcggctcgcaattgatcaaccgctcgacgcggcgacagggcctcaccgaactcggccgcaactatctcgatcactgcaagcaccttttggtcgaggccgaggctggcgatgcgctggtcgaggaagccttgagcgcgccgcgcggcaggctgcgcgtggcgacatcggttgccttcggttcctacagcctcgctccggcgctggttcgtttcatgaacaagtacccggaagtgtcggtcgacctcatcctcagtgacaagatggtcgacctgctcgaagaagggctggatgccgcgatccgggtcggcacgctgaccgactccacgatgatgtcgcgctcgctgtcgccctacaccggcgtggtttgcgctgcgccgagctatctcgccgaacgcggcacgccgacccacccaagggacctcgccgctcatgaatgcctacgctatcccggctggtcggacgcgcaacgatggagcttcctcggaccggaaggcgaagtgcaagtcgatgtcacaagccgcctcttcatcaacagcgcgttcggcatccgctatgcggccctcgccggcgccggcatcgtgctgatgcgcgacgaactgctcgccgaggacatcgccgcgggccggctccaggtcctgctgccgaactacacgacgcaagcccgcgcgcgtcagatcctgtggccgaggaaccgcaagatgaccccgaagctgcgcgccctgatcgacttcatcgtggagacctatggctaatcatatcgcgagaacgcgaatgcatggctcttgatgctgcaacaaatccgccgtcgtcccggcgaaggccgggacccatcaaccacgaaaagcttattgttgagcactactcgaacgacgagtcacacccacaacatccgccgcggcgtgtgggtcccggccttcgccgggacgacgcagtgatgccgcggtgacaaaattcagctcgccggacacccctcacttcaccagcgcctcgacctccttgcggaacgcttggcgcgagctgtcgcgggagtagaacatgtgtccacccggatagaccacgagcttggtgcggctcggacccgcaaaggccggcagctggtcgaggatgatcttggaggcgaagtacggcgtcgcgaggtcgaacaggccgtggccgatcaggagtttcagcttgggatcgagcgccagcatctggcgcagctgcgtcaccgactccgttggattgatgccgtgaccgaactcccaggccttgttcacgttctcgctgagcaattgataggagccgtccggccgccagttcagtctgcgcgtggtgagatcgacggcagcgctggtcagcggcgccatcaggggatcgccggagggatcgttgaagcggaagtagctggagtccggatagggatcgaagccctcgaccgaggcgtcgtagcggccggtcaccttgccgttcttgcggtcgaactcacggcggaattcgccgatgtcgaagcggccggcgagcctgcggctcaccgcttgatcgatgccggtcaggccggccaccttgtcggcgagccgcgtggtggcttcggtgtcggcctggcccttgacgaggtcgagcaggaagtcgccgcgcgcgtaggcctcgacgtcggcgagattctcgcgggtcaccggccccttggcctgccgcgccaccgccgccatggtcggcaggcttgcgacatattgcaggaggcttgagccggtatagtcgcggaaatcgagcaccggcgagatcaggatcaggccgcgcgggccgacgccctgctgcatctgcagattgcgcaccaccttcggcccgcggatgccgccatagctttcgccggtgacaaatttcggcgaggtcagccggtcgtatttctcgagccagcggcggatcaccagcgcgatcgaactggcgtcgccgtcgaccgtgaagaaacgtttgcgcgcctcctccgatgtcgtgacgaagcggctgtagccggtgccgaccggatcgatgaagacgagatcggtgaagtcgagccaggtgtcggcatttggctgcaactccggcgaggccgaggacactgcgccgtcaccatcgaacggcagccgccacggcccgacattgccgaattgcagccaggccgacgcagagcccgggccgccgttgaacaggaaggtcaccggacggctcgccttctcggcgccgtcgagctggtaggaggtgtaggcgacgtcggcgagcgcctcgcccttgtcgtcgaacacgcggatcgagcccgcggtcgcgctgaagttcagcgtgcggccgggcagcgcgaccgattgctttgtggtggagtccggcggcagccgatgttgctcgggcgtcgatccactgccggcggcgttggcgcctggactggccccttcgccacgccctgcccgccccttctggccgcttggcgcctgcgcgctcggcgacggcgatggctgaggggtctcgtcgtcggcccgcgccgcggttgcaaggcaggccaccagcagcgctgccgcgagccgtgtcgcaaaactgttagccatgccgttcactccctgggccgacgtttacgcattccgccatcaaactgcggtagcttggcgacgcccgcaagacatgcggtccggtttccgggccatctcgacaaggtcgcccgggatgtatagacgagcgcggcgtaatccgggccaaaagagttcgtgagcgatggctagccccaagcggtatgacaagatcgcctttgtcgccagcgcgagtgcggaagcacagaccgcgcttgagcagctgaccgcgatgtacggcaaccatctccctgccgatgccgacgtcgtggttgcgctcggcggcgacggcctgatgctgcaaacgctgcacgccaacatgcgcagcaacaagccgatctacggcatgcaccgcggcaccgtcggcttcctgatgaacgaatattctacgcatgatctgcgcacccggctttccgccgcgcgggagtcgctgatcaatccgctcctgatgcgcgcgaccgacatccacggcgccgtgcatctgcatcacgccatcaacgaggtggcgctgttccggcagacctaccaggtcgccaagctgcgcatcctgatcgacgagcacgagcggatggcggagctgatggccgacggcatcctggtggcgacgccggccggatcgaccgcctacaacctttccgcccagggcccgatcctgccgatcaacgcggcgctgctggcgctgaccccgatcagcgcgttccggccacggcgctggcgcggcgcgctgctgccgaattccgccttcgtggtgatcgaggtgatcgagggcgagaagcgcccggtcgccgcggtcgccgaccatgacgaggtccgcgacgtccgccgcgtcgaggtgctctccgacaagaccatcgcgatgcggatgctgttcgaccccggccattcgctggaggagcgcatcctgcgcgagcagttcggctactgacggccgcgcctgccgctgcccggcaaccaatcattaaccccgggcgggatatggttaacgtcgggtaataccgcatttggcccggtatgcccgttcgggaccggaccatgtatcgcatcgatttcaacaagctgcgatttctgatttgcgacgacaatccgcacatgcgccgcatcctgcggacactgctgcattcgttcggcgcgcgcgaggtgtatgaggccgaggacggcgccaccgcgctcgagatgtacacgcactatgtgcccgacatcgtcatcaccgactggtcgatgccgatcttcgacgggctcgagctcgcgcagatgatccggcagccggaatccaagggaaatccctacgcgccgatcatcatgctgaccgggcattccgagaagcgccgcgtcacggtggcgcgcgatgccggggtcaccgaattcctggccaagccgatctcggccaaggggctctaccagcgcatcatgaacgtggtcgccaacccgcgcccgttcatcaagaccaagacctatttcgggcccgaccgccgccgcaacaccaccaacacctatatcggccccgagcgccgcggcagcggcgaggtcgaggtgctgcaacagccgtcgctgctcgataaggcgcgctcgaccatctaggatatcgccatggcgaaagacaaacccgggacgatcgaggtcaagagcttcggcacgcaccacgtcatcacgcagccgaatccgctgcgcaagatgctgctgcgcgtccccgagagcgatctcgacgatcccgtcggccgtgccgagaaggcgctcgccggactgtcgggcgagttcaaggagtggatgacgatcgaggccgaccgcctctccgccgcgcatgccaccgtgctgcgcgagggcttcaacgacaagacccgcgaagagctgttccgcgccgcgcacgacatcaagggcgacgccgcaaccttcggctatccgtcggcagccgcagcagcagagagcctgtgccgcatcatcgagcacgcgcccgatctcgccgcggtgcctgaccagctgattgcccatcacatcaacgccgtgcaggcgatcgtgcgcaaccgcaccaagctcgacaccgcggtcgtcgccggcgtgctcagcaagcagctccgcggcatcgccgatgagttcctgacccacgccaatcgcgaccgccccgagcatctcgaggccatcctcgcgccgagcatcgtgccgggcgaatagcggcgcgccgcggcttgcggccccggcttcaatcatcgtcaattgcaggaagcgcggccttcaggccgcgatgagatcgtcgtcgctgggcagcaccgcgagcgcgtcttcggcggcgagttcctcgcagaacatgcgggcatcctcgcgggccgattcggtcgcaaagcgacgcagcaggatcaagagcggctcggccgccgaatggtcggtctcgcaatgggtcagcacccgctcgaccatgcggcgatgcagccgcgccgcgccgtcgccgctgtcgacatagccgacctcgtggctggcctcgagcgcgacgcggaacgccgcgtaggtcgattccggcaggcccgcacgccgcagcagcgcctgcaggccgttgccgccgcggtcgttcagcagcgcggagacgcggccatagggcagcccggacaattcggcgagcgccgccccgaacaggtcgagattgcccgacagcagcgcgcgcaggatcagcccggcagtgagctggccggtggcgcgcagatgcgtgatcaggttctgcatgtcgtcgccaaaggcccgcgcggcgatgttcaccgttgaacgttctttcgcctcgccggcgatccggtcggcgcggtcggcgccgagccagtttcgtgccacgacgaactgcgccagcgtatcggaaagctttgcgaccagcgccagccgcgtcgccgacggcaggtcctccagcgccagcatcgattccctgatcgccgcaagatggccgtggcgctcgacgatgcggtcccaggagaacggcgcaaggccggcatagggattctcgatcagctcgagcgcagccgctgccgagccgacctcggcgatcgcggcagcgatggaggccggaagattgacgcggcgcgcgatcgcgcactgcatctcgtcgcagccggtcgcgacgatgtcgacgagatcggcatcgatcaggagcggtgaatgctccagcaccggcagcgcgatcgccggctggtcggccgccaacgcctgcacgatcgcagcaggcgcctccgcgctatatgcgaacacctcggccatcgcctgccgcaccagcggcgacggatcgtcgagcagcatcagcagcgcgccctcggctacgatgcgatcgtcctcggtgagatccgaaatgagccaggcccgggccaacgcccgcgtcgcctctgcccgctcgcctgccggagcggttctaatccaactaatgaactgccgaacgatcatggtcctgccggcttacgcaacgagacggcatcgacatacgacgccactacaaggaaaaataaaccatgacgcttaacaaagggttcaccataaacgtttgggattattgacgtttcgttaagacggccaaggcgcgcggcttcgcgcctgcgaaaccggcaatgctagctgttgctgtaggtgccgttcggatcgctgaacagatcaagccgcccgggcgcgcggaccttcggcgtcgccgacgtggtcaacgcagaggagttgccccacaactcctgtacggccggcgagatcggttgcggacggtccccgccctggtagagcgagcggaaggccggcgccggctgcgccgatgccacggtcgaggtcgcaccggctgacgaggccgcactggcgttcgggaacgtcgagagatacgacgcagtgtccatcgacaccgcttgcgtcggcgcggcgcttgccatcgcgtaggggctcatggtgtcgccgcccgccgcagcaaaggcggtgcgcgtgtccttcgaattcgccgccgcggcgtagcgcgtggtcagcaccgaatagacctggctgacgctgcgcgcgctgcccgacttgtcgtagaagatcgactggttcgccgctgccgccttcggaaacatcgcggccgcattggcgctcggactatcctcggcgctcaagatcagcttgccggcaccgccgacgcccatgaaatgcgccatatagagctcggcgtcggtcggacgacggccgagcgtgccggtgagcttgaagctgttggattgcgtcagagccgccgccatcgacgacgccgcatcggggtcgtcgcgcaaattcatgaccgcgttgcgtgccgaggggtcgctgaccgaatagctgccgtcggagttcttggtgatggcattggcatattgaccgtagccgagctggcttcccgcctccttgacggtgccgagccaggtctggtcgatgaattgatagagtccatgcgccgacgaggtcgtggcgccggcccgcggattgaagttggattccatcttcgcggtggtgagcagatattcgaagctcgtaccggtggtggccgccgcctgcttgatcgagccggcgaccttcaggcgcgaagcatcgacacctgccgaagccgtcgcattgaagaggtcgaccgccattgatcgggtgccttgcggggtgccggcaatcggcacccatgtgccgtcaacctgccgtaattatggttaacggcacgttaaggcgccggcacggcggcaacgcggaggccgctatttacggtagacctgcgccggatcgaacaggcgctcggcatcgacgaaggacaggctgacggctccgccctcgcccttcaccgcgcgatagaagcaggagcgccgtccggtatggcaggcggcgccgatctgctcgaccttgagccacacggcgtcttgatcgcaatccatccggatctcgaccacgcgctgggtctggcccgagctctcgcctttgcgccacagcgcattgcgcgagcggctgaagtaccagccctcgccggtcgcgatcgtcttgcgcagcgcttcgtcgttcatgtgcgcgaccatcagcacgtcgccggtcgcgacatcggtcgcgacgcaggtcacaagaccggtcgcgtcgaatttgggccggaagtcgagcccctcttcgcggtcgtgatcgtgggtcgatgcggacacggcaaacctcgctcgagagaatgcgaggttaccggttcggtcctcgcaccagggacaggaaacgctgctgctccgccggattgtcgcggaacatgccggtgaagcggctggtgaaggtcgacgcgccatgcttggcgacgccgcgaaccgacatgcaggtgtgctccgcctcgatcagcacggcaacgccgcgcggcttcaggacctcgtcgatcgcagccgcgacctgggcggtgagatgctcctgggtctgcaggcggcgggcgaagatgtcggtcagccgcgccagcttggacaggcccacgacgcgctccaccggcgtataggcgatatgcgccttgccgtagaacggcatcatgtgatgctcgcactgcgaggtgaattcgatgtcgcggacgaggacgaaatcgtcgtaaccggcggtctcgccgaaggtgcggttcagcacttcggccgggcactgatgatagccctgatagagctcgtcataggcttcgacgacgcggcgcggcgtgtcgagcaggccctcacggccggtgttctcgccgatataggcgagcaacgtcttcacggcctcctcggcctccgcccgcgacgggcgcggctggtcggcacgaacagccgccgccatgaattccgaggggtcgagctcgccgggcttggcgtcggccggcttgttggggcgaagcgatttgatcaaggcgtccatgtcttctccgttcgaccggcccggcatctgccgtggggccggatgtgtcaccgggcagacggggcggatcatcgaaccgccggacgcctgagtcccatctttgtagcaccagcgcgacgaatgtgggccgcgttggccgcatggccgggctatgtttccggcactgccgtccatatataggacggtgaaacccaaccgccaagagcgcccggcacggccggaaccaggcatctgtccccatgctgaacgacatttacaacaagcggatcatcgagttggccggcaatattccgcgtctcggacggctgtccgagccggacgccagcgccaccgcgcactccaaattgtgcggctcgaccgtcaaggtcgacctcaagatggacggccctgtcgtgaccgacttcgcccatgacgtgaaggcatgcgcactcggccaggcctcctcctcgatcatggcgagccatgtggtggggtcgaccgcggaagagctgcgcgaattgcgcgagaccgtccgcaagatgctaaaggaaaatggccggcccccgcagggcggcaaatgggccgacatcgcgctgctcgagccggtgcgggactacaaggcccgccatgcctcgacgctgctgaccttcgatgcagtggtcgatgcgatcggccagatcgaggccaaggcaaagcagccagcgtagagcttgctgccggcccaaatcctgttactgcgccggctggaccggcgggggcgctgaggtgccggcaatcggcaccacgacctcggcggtcttggttgccttcgcggcctgcggctgcgcctcaccttccatcgcgctgctgacgaagcgatcgccgttcttcagctttgcgtcggcgacgggaattgaattgtcctgccgcggcaacacgtcggcgacggcatccgttgtgaccagattggtcagccgcaattcagccgccgacaattcgtgcaggtcttcccacggcggcacgctgagtgcgagcgacagcagctcacccgcgccgcccatgtcgaacgtgtacttggcgagacggccgatatcgcgctcgacgatcatcaggtcctgcgcggtgtagctggcggctttggcatcgtcggcgcgatcgcccatccagatctgatgcacgcggacatgggcggccggcggcacatagcgcgtcttgcccgacagcagcaggaacacgcacatcgactcgcaataggcatccggcaacacgctggcgcggtcaccctgcgcggcctgattgacgacgctggtgccgaccgtggtcaacgcgccgagaccgcggaaacgacggccgagcgcgatcgcgtcgttgaccgagccgccgctggagtcgagcacgatggtggcgccgttgagctggcggctgcgcgcgaactcgtcgaactccttggggctatcggccgtgatgatgccgaccgccgacacccagccgcggcaattcggctggcaggcgatccagctgaacttcatcggcagcttgcgctcttcgagggtcgaactggcctgcgcggaacctcccgccgtcgtcaccgttccggaaaccgcgaagcaaaaggcgacggcgccggtgagcgcccaactgcgcaacgagagcgacctgacgagcctcaatttggttccttcccccaagcccctggtgatacgagcggtggcaacggccccatggcaaagcgccacgattctgtcatcggcgcgttatcggaacggtagccctgctgacctggaccgtccataggacccttgctgcggtgccaatcgacctgtgcgttaatttcgaactgtggcgtaaatatctgcgacagcacggttccttggcttggaacccccgcaagactacgtacatagttgcgtgatgcagccgacagatcatccgacgtcacacctccagcgatgcacggaatgtgccagcatcgcgcgccgcatgccgcgcaatgtcggccgcgccttgatctgggtctaccggcacacgctgtcgccgctggtcggttacaactgccgccatctgccgacctgctcggtttatggcgacgaggcgatcgagcgcttcgggctctgggccggcggctggatgacgctggcgcggctgctgcgctgccagccctggggcacctcgggaatcgataacgtgccgccggtcaagccgccgggcgcgcactggtacgtaccctggcgctacggccgctggcgcggcgtcaacgacagctgatcaattgctgcagcgctcccaggcgcggctcgcattgctgcccggcggaactggggcgatacttggcgcattgtttccgtgccccttgcggttccttggggaggaaataacaatgcgctggaaaatcagccacgacggtcacgatccccggcagatcgatttgctggccgtgcttgccttgctcgtcgtgatcattgccgcctacggctacttcactcacaatgcgaccaagccgagcacaacggcattcatcgtgccgagccagagcgtgaagtggtgacgcagcgcgcgcccatcaccggctagtgccagccccagacgtcgtcggacggcggcgctggatgatcgtcgcattgttggcgaggatgaagctgcgcgcctgccctcatcccgcaggcattgtggtgttgacggccgcgcgattttgcgatgcgcggcattgtttgcaccccgctcgcaccataggctgccgccattgggacgaacatttttggagatgggcattgcaggaaggcttgtacaagctcgaatttcacaccgttcacggcaccggcaccggggtgctctacgcgaccaacggcaagcttcgcggcggcaactcggccttcgccttcgtcggcaactacagcgaccgcggcgacggcattcacgtcaaggtctcgacccaacggcacaatcccgatccagccttccggccactgttcgggaccgacatgatcacgttgacgctgaaaggcacagcaaacggcgacatggtcgacttcgagggcgaggcgctgcagctgccgggcgtcaacttcaaggcgttcctgacgcggatcgccgactaggacaggttcgagcgacgttggtgcgacttgggcgcgggttcacgcggagagcggcgtcaagacgagaaactcactcggccgcggctgcgcgcgcggccggtcgcggtcgcgtgatgatcacgaccgcgagggcggccgcgaccaaggccgtggccacatagcccgcgcagtagagccattcgcgcgcgaacagcaatccgccgatcgcagagccgatggcctggccgacatacagcaccgaggtattgagcgagaccgacgccgacgccagcgcgggcgccgccccgaccagtcgcacttgctgcatcgaattggtcgacgcgaagccgagcccccacaccgccaccgaagctgccatcaatgcataggcaccggcgctcagcgcccagccggccacgccggtgagcagcagcacggtgaacagcaccgacgtcttccaggcgccccaggaatccacgatgcgcgttgcgatcgcaatgccgacgaacccgaagatgccgtagagcgcaaatacgataccgaccgcgtccgcattcgcgccggtcaacttggcgagcagcggtcccatgaaggtgaacacgacgaactggccggacatctgcaacgtcgtgaccgacagcagcaggacgacggtcggattacggccgagatcggcccaggtccgcagatcgaccggcgcgccatgtaatccgccaggcagccgccaccacagcagcagcgagctgacgagcccggtcagcgcgatcgcgccataggtcacacgaaaaccgtagcggcttgcgatgaaggtgatcagcggcagcccgatcgcggcggcgagcgaccagccgaggaagatgtaggcgatcgcgctgccgcgcttttccaccggtacgatcagcgccgcggtgccggccgcctgcggcgtgtagagcacaccgaccgcgagcatcacgaggcggatgatcaggaggctgtcgtagtccggcgcgaaggcggatgccgcattggtcagcgtcagcaccagaagcgtcgcggtcagcaaggcgcgccgctcgaaccggctggtcagccacgccgtcaccggcgagcccacgcacagtacgatcgcgccgaacgtgatcaagagacccgcggtgtggatggtgacgccgagcccactcgacagctccgccagcatgccggccggcgccagcaccgagcagccggtgacgatgttgccgagcatcaatgcggtgggggcgaagcgtttcacgccgcgttgatagcagaccccgaactcaatgcaactgcatctaaatgcatggcacgcgatcgatttgcgccccttgcgctcatggcgacggcgatgccgccggcgccgcgttgacgccaggcgacactgcggccggccacgggctggcagacttcggagctgatgtcgcggtcgggcacgacgccaaaagctgcgtccatccctgctccagcccggtcgtgtcgatgtcgaacgtcgcgacgccgggcctcgcgggatccggcttgccgtcggacgacagcgcgctttcgccgatctgcagatgcggcactgccgtcatcgccttgacgatgtccgcgctcaccggatcgctccagacctcgtatttgccgaaccgcgccggcagcctgccgaacgcgaccgccttggtgacgccggccatcatcaccaccgtgctcttgccggcgcggccctcctcgaactcgcgcacgaacatcaaccgcccgcgatccttgttctcgcagaacaggcgccactccatcatgcggaaggcgctgccgtcgccgtttttctgctgcgcgatcttgcggacatagggccgggcttccttctcgaccgcccacagcgtgtccggcaacggccgcgtatcgattccaaatcgatacagttccggccgcgtcagcacgtgcaggttctcgaacttcacggtccggatcaggtcactgagctcacggctgatccccatcgccgcgaggaacaggttgcggtcgcgatcggcactcaccatctcgcgccgcttgaagtccgcgacagcttgcggcggcggatgcccgtggaccacgaacatcagcctggaattatgcacgccgagcaccgagtcgggcgccacctcacggtcggtcgcgcccaggaacagataggcacaggccgagacgcacatcgcgttgcgcgtggtgagttcagcggcgacctctcccttcgtggccttgatcttcaggcaggcggcgtcgacctgcgtacccgcggaacaggccggcacggtggtgcggccgacccgggcgattgccttgcgcgcacgcagaaaccgcgcgatcgcgtaggactgctcgacatttccacccggcgaatgaaggtagatcggaagctgcgggtccttggttgcgtaaaggaaggtgcgaatccgctgagcggcttcccgatcgatctcgccttcgatcgcgatccagcgatcgcaacccgcaccgcaggcattggccggccccttggcaaggtagatggtcagctttttcgcaaatccggccttctcgaccggcgcgtcttccgcccgcaacacgcccgggatcagaagcaacgccacgaacaacaggagacgggaaaacatgaaccttgcggagctcgcgatgtcggggaaatgggcatccgacgttagacgatgatcggcagcgtcgcaacgatcagggccacgaggtgcaggcgagctcccgcgattcggtgcgcgagaggtccattttcttgatattgcccgattgcaggcgtcaaatcccctgctataccgctgctttccgcttacctgcgctcgttcgcaggagtgagctacaggagacatcgatggcagacacgcccaaatccgagtccggattccagtacagcctctccaacctcaaacccgcagaacccgtgaacaagatcgccctcaccttccctgatggagcgaggcgcgatttcccgagagggaccaccggcctcgacatcgccaagggcatttcgccctcgctcgccaagcgcaccgtcgcgatggcactcgacggcacgcttgccgacctcaatgatccgatcgaagccgacgccaaaatcgaactgatcggccgcgaagacccgcgcgcgctggaactgatccggcacgatgccgcgcacgtgctggccgaggcggtgcagtcgctgtggcccggcacccaggtcacgatcggcccggtgatcgagaatggcttctattacgacttcttccgcaacgagccgttcacgccggaagattttgccgcgatcgagaagcggatgcgcgagatcattgcgcgcgacaagccttttacgaaagaggtttgggatcgcgaaaagacaaaacaggtgtttcgcgacaagggcgaggccttcaaggtcgagctggtcgacgcgatccccggcaacgagccgatcaagatctatttccagggcgactggttcgatctctgccgcggcccacacatgacctcgaccggcaaggtcggcaacgccttcaagctgatgaaggtggccggcgcctattggcgcggtgattccaacaatccgatgctgacccgcatctacggcacggcattcgccaagcaggaagacctcgacgcctacctcaagcagatcgaggaagccgagaagcgcgaccatcgcaagctcggccgcgagctcgacctgttccacttccaggaggaaggccccggcgtggtgttctggcaccccaagggctggacgatcttccagcagctgatcgcctatatgcggcggcggctgctcggcgactacaacgaggtcaacgcgccgcagatcctcgacaaggtgctgtgggagacctcgggccattgggactggtaccgcgagaacatgttcgcggcgcagtccgccggcgacgaggccgaggacaagcgctggtttgcgctgaagccgatgaactgcccgggccacgtgcagatcttcaagcacgggctgaagagctatcgcgacctgccgctgcgcctcgccgagttcggcgtcgtgcatcgctacgagccgtcgggcgcgatgcacggcctgatgcgggtgcgcggcttcacccaggacgacgcccacgtgttctgcaccgaacagcagctcgccgaagagtgcctcaagatcaacgacctgatcctgtcgacctacgccgatttcggctttgacggcgagctcacggtcaagctctcgacgcgaccggagaagcgggtcggcaccgacgagatgtgggaccacgccgagcgggtgatggcgaccgtgctgtcggagatcaaggccaagggcagcaaccggatccgaaccgagatcaatcccggcgaaggcgcgttctacgggccgaagttcgaatacgttctgcgcgacgccatcggccgcgactggcagtgcggcaccacccaggtcgacttcaacctgccggagcggttcggtgcgttctacatcgatcacgacggctcgaagaaagcgcctgtcatggtgcaccgtgcgatctgcggctcgatggagcgcttcatcggcatcctgatcgagcactacgccggcaacttcccgctctggctggcgccgacgcaactcgtggtcacgaccatcacctccgaaggcgacgaatatgccaaggtggtggcggccgcggcgcgccgcgccggcctccgggtcgagattgatctgcgcaacgagaagatcaactacaaggtccgcgagcactcgctggccaagatcccggccctgctcgtcgtcggcaagaaggaggccgagacccattcggtctcggtccgccgcctcggcagcgagcggcaaaccgtgatgccgaccgacgaggcgatcgccgcgctggtcgatgaggcgacgccgccggacgtgaagcaggcgcgatccgtcgcctgatcttcacaatcggtctaaactggctttcgccggcttcgtcgtgcccccatcttgggggcacgactcctcctgaaggacatttccgtgcccgatgctattgaactcctgaagacacgccgctcgatgaaaccgcgcgagatgacgggcccgggcccgtccgcggccgagctcgagaccattttgaccatcggcgcgcgcgtgcccgaccacggcaagctggcgccctggcgcttcatcgtgttcgagggtgacgcccgcgcccgcgccggcgacgtgatcgccaaggtcttcgcccgcaagaatcccggcgcgccggccgccgatatcgaggtcgagaagaagcgcctgaccgacgcaccgctggtgatcggcgtggtctccttcaccaagccgcacccgaaggtgccgccgtgggagcaggagctgtcggccggcgcgagcgccatgaacatcgtcaccgcggcgaccgcgctcggctacggcgcctgctggctgaccggctggttcgccttcgaccgcgacgtgctcgacggcctcggcctgaagccggacgagaagctcgccggcctcattcatatcggcacgccgaccaagccgagcgaggatcgcccgcgcccggcgctgaccgatatcgtgacgcggttctagcagcggtcgtgcccccgtgaactcgtcggcgggccgcctgctggagcccgcatgcaccggcagtgaccaaatctgcaacgcagccttaacgacgcaataggccgctagcagacatcaccaggcgtagcgcacgacgcccttgccggcgtagctgttggtcacattcgagaactcgccctcgaaggtcgctgccgccgaccagccgttgcgccacttcatctcgaccgaggctgtcgtcagcgccgagtccgtcgcctgcgcggcgccgttgacgacaaaggacgaggccggcagcgtctggaacgtcgctgccatcgtgcggttcggagcgtaatcatgcgcccaggcgaaccgcgtgcgcagtgtgagcaggccatcctgcaccgcgaacgaattgtcggtgcggaagccgagttcgctgcgcgggtcggtgacgctcttgccggcatagccgagcgcaaaggtcggcagcccggagatcgtctgctcggcatagctcggcaagttgagagtcgtgaactggccggccgcatagggcgtgatgcccatccacggcatggcgaagcgatagccgccttcgacgcggccggaataggcattggcgttgaactcggcccggagatgatcgagccccacgacgggcaccgtgcgatcggtcgtgatgtcctgccagccgtaggccagcgccgccgtgatgtaggcattgccttcggtgtggcgaacgtaggcaccggcctggaacagatcggagcgtccactgccgaggccgctcacgccgaagctcgtaccgccgcctgcgatggcaaagccggcgaccgtattcggcgagaacagataatccgcgccgacggcggtgccgtagacgctgctggtcgtggcgttcgatccgaccaccgcattgccgctggtcgattgcgaaccgccgaagccggccgcccacacgctccagcgttgctggaacgccgccggcggcgccttggcgaacatcgcgaacgcattgctctgacttgtcgcggcataggcgctgccattaccgtcgtccgcgtaacccgacgcgtccggcgagcctccgccaccggtccggttcatgacggggtcggtcaagagccccatgaacaggtccatggccttgaacgtggtctgctgtgtcgacgtcgcgagttcgcctgagacctgcgtcaggccggtcggcgtcagcgcgccgaacgcgaccggtaccgtgccggtgctgttgaaggaattgacgatggcgttgctgacattgcgctggttgatgttgagcccgccgcctggcggcgtgaagacaagcgcgaggttgagataggcgtgcgtcggatcgtagctcagcgtcgaggtgaagccggacggcaggttggtgttggccagcgtgttgaacgtgccgctgacgccgcctgcggccgagacgatggtgtattgcttgttgacataggtgcctgacgagaagaacgcctgcaccgagccgccgcccagggtggccgatcccgtcgcgttcacgaaggatgcggtcgtcggattgatcgccacctgatagaacgcccccgacgagaatgcgagactgccgttgaccgtcatcgacgatcccgcggtgccgttgcccgctgcgaagatggcggcagtgccgacgctgaggtttgcgactgcaccggtgccgaacaatgcaccgcccgagatcgtcgtggtgccgttgatcgtgccggtgttgttgaaggtgccagcagtgttcgtcaggcctccgttgagcgtgccggcattgctcgccgtgccgctgttggtcaccaggcctgatacggtcgcacccgtcccattgatgagggtgcccgcggtcgtgatggtcccggtccagatcccgttgttggcgatcgtgccgctgttgccggcgacgttggcaacataggtgccattgttgatcaccgtgcctgcgttggtgaggtcgtcatgcagcgtgccgcctgccgcgacgatgatcttgccggtcgccgtgttggtgactgagccgaatgtcgctgcgccgccgctatcgacgacgaagttcgcagcgttggtgagcgaggcgctgcgcgtgatcgcgccgccattgccgatctccagcgtgccgccgttcaccgtcgtcgcgccgagatagctgttggtgccggtcaggatctgcgtgctgttgccgttcttgaccaatgccagcttggagccggccgcgccgccttcgcctcccccaccgttctggatcgcgccggagaacgtggtcgacccgccgttcacacccgtgatcgtcagcgtcgccgtgccgctcgccgcggcattcctgacgataccacccccgttgcttccatccgcaagcgaggcgaccgagttgctgtagcccgacagatcgagcgtcgcgcctgcattgatcaggaaggccgagttgcgcgagaggcccgtcgatgattgcgcgatgacggtgcccgacgcgatgttcgtcgtgccggaatacgtgctgacgccgcccagcaaaatgccttccgcgaaagcacgcggattgctgctcatcaatgtcagcgtgccgcctcgcgacgaggcctcatccgagatcgtaccgaacaagcgaatgaggccgccggcatcgtcgatcgtgccacccctgccggtgatctcgacggcgttggcaaaggagcgatcgagcaagggcccggccgcaagcgtgccgccgttgaatgtcagcgtccccagaccgatcgccgaggccgtctggctcgagggaatgttgacgttggtgaatacggacgcgccccgcaccaccagcgtcccctgcgacagcgtggtgccgccggaataagtgttggcgccggacagcaccagcgtgccgccaccattgacaacaaccgctccggctggagcaccgcccgtcgcatcggagataattccggaaagcgtctgcgccgtcccggccgacgcgaggaatgttgcatcgccggagaccgtgatcgcattggcgatcgcgtaattgccggtgttggcaaatccgagcgtcgtacccgccgccatcgccagggtgccggtacccaatgcggaattgttcccggccgtgagcgtaccggcgttcagttgcgtaccgccggtataggtgttcgcgcccgtcagcgtcagcgaccctccggtgatcttcagcgcaccgccggcatcattctggataccgccgtcctggatcacgcccgcaaatgatgtcgaacccgccgtgatggtcagcgtccgggcgccaagcgacaccgtccccgtctgccccgtacccgtattggcgagcgttgtgatcgacgcgccggcagaagtctgcgagatgtcgaaggtcgctccggtcgcgagattgaccgcgctcgatgctgcgatcgagcctgttcccgacagcgccagcgtgcccgcgttgatcgtggtcccgccggagtatgtgttggtgccggtcagcgtcagcttggtctggctgccgctgagcgccagtcccgtcgcgccggtgccgtccttgatggtgccatcgaacgtcgtcgcgctgccgccctgattgttgaccgtcaataccgcagccgcgccgttgttggtgacggtgccgctgccggacagccccgcgatctgctggttgaagccgccgagatcgagattgctggcggacctcaccgtcaccgatgaattggcgctgaacgcgttcgccgcaccgccgatcagcgagctggcactcacgccgtcgccaactgtcgtgcccccggagtaggtgttggcgccactcagcgtcagcgcagtgttcgcgttgacgagcgagagcgcggtcttgccgctgccgtcggtaatcgcgcccgagaaggtcgaggcagtaccgcccgcgacggtcaggacattcgagttggtgacgttcgtcaccgtaccggtcccgctcagcgctgcgatccgctggtcggaaccgccgaggttgagcgtcccgttgacgacaacaccgctcgatgccgcgatcgcgttgccgacgccaaggttcaacgtcgccgccctgttgatggttgtccggccggtgtaggtctccgtattggccagcgtcacggatccgccggcgttgccgccggtattggcgatcgtcaggccaccggtggtgccgttgccgttgccgatgacgcccgagtaggtgaaggcaaatccgttggcatcgatcgtgccgccggtgatgttgatcgccgcggtattggcgatggtgtaggcgccaccggcctgcagcgtacccccatcgaacgtcacgacgccggtgccgagcggaccggaggtgacggcgcccggagcgccggtcgaggatgcattgacctgggtgatgccagccgacagcgtcgtgccgcccgaataggtattggcagccgagaggctgagcgtgccgctgccgatctgcgccaccttgccgttgccgctgatcgtgccgctgaacgcgatggtgttggaccgatcgaatgcaagcttaccattgttggcgacgtcgccgatgatcgaacccgtcgtgccgccgttgccgagctgcaaggtgccgctgttgatcgtggtgccgccactataagtattcgcgccggtcatgatgaccgtgccgcccgagatggcgaccgccgcgccggtgccggcaccgccggtataaccctggcccgtcggaaggctcgcggtgctgtcgtcggcgatcgtgccgttgagcgtaagcgtgccggtcggattgaacgtggtcgtcgtgccgctggtcaaaaacagatccgagccggccgccgcgcccgcgttggtgcccgcgcctccggtgacgacgctgctcccgaacgtgccgtcacccacggtcagcgaggcgccggcacggacgaacacagcgccgccgaacgctgcgccaccgccggcgccaccagtcccgccatttccaccgccgatgccgccggatccggcagtgctaaagttgctgccggccccgccgccgccgccaaagccgccatttccggccgacgagctcaagtaaccgctgccgccgccgccaccaccatagccgccggatcccgcgccgccgaagttgacactaccgccgccaccgccgaaatcaccgcctttgccggccgtggagctatcagcagccgcgcctccaccaccgccgcctaacgtgccgttcgttccgttcggactgcccggctgcgaaccgccgacaccaccggtaccgccggtcaatccgccgcccccgccg

SEQ ID NO: 7 - DNA, 230163 bp, Bradyrhizobium enterica
  misc_feature (19656)..(19665): n is a, c, g, or t
ctcgctcgcggtggcgacaccggacgttgcggtgacaccgaagacaaagccgttcgctgcggccttcaaggccaagttcggcacgccgccggcctataccggctacaccgcctatgacgaggtctacatcatcgccgaagcgatccagcgcgccggctcgaccgatccggacaagatggtcgccgagctcgagaagaccgacttcgagggcacgatcggcaagatccagttctacggcaagaacgacgagttcacccacggcatcaagtccggcccgggcgccgtcaccggtctcgtgttccagtggcagaacggcaagcagatcacggtctggccgaaggcgatcgcggaagggaagctgaagtttcctgatttcgtgaagctgtcgcagtaatcgcggcgcgagccagcgcgagatggggaggggcggtcacgcggggggccgccccctctgctatttgcgcgttggtggcgcggtctggatcgtcggcgcggcggccgcgagcagcgccgcgcggtcaccgttgcgcggcggatagatgcgctgctggttgatggtctgtttggtgagtttggcggcggctcctgtggtgtgcacctcgcggtcccagccggtggtgtagagcgcgccccaggccccgagatcgagcaccgtcacataccagtcgatattgagcggcagcagcttttctccgaacagatcggcgaccacgttgtgtccggcaaagcggcccatcggacgcgcgaactggcacgacatcacggtcgggtgctcgccgtcgatcaggcaggacgcgacgtcgcctgcggcgaacacgccgggaaggccttcgacgcgcatgcaatgatccaccgcgaggcggccgagcgcgtcgcgcctggccggcagcatcgcggcgagggggctcgcgtgcatcccgccgcaccacaccacggtcgccgccggaatgatctcgcccgagcttaacgtgatgctgtcggcgccgacggcgccaaccctgacgttcagccgtgtctcgacgccgagcgctgacagcgcctcgttgatgaccgggcggccatgcgcgccgaatgtcgcgccgacgacgggattgggatcgatcaagatgacgcgatgatggcccgcaatgccggcggccgccagcttggccgacatttcggcggcgacctcgattccggtgaagccggcgccgacgactgccaccgtcgaacgtgccggcgacgccggctccttgccgagcgccgccagatgcgcgtcgagccgcatcgccgcttcatgggtgtcgacatcgaagccatgcgcggcaaggccaggaatggcggggcggaccagctcgctgccggtcgtcagcaccagccggtcataggtcaaggtctccgcgccggagctcgtcttgaccacgacctcgcgctttgccggatcgatcgccgcgacttcggccacctcgtgctcgacgccgaccggatcgagcagcccgtcgagcggcagcgcgacatcggcgaggtcgacctcgtaattgcgcacccggatgttgtgataggcgttgcgatcgatgacgaggatctcggtatctgccgcccgcgcgccgatctcgtcgcgcttgcgggctgcgccgagcgcggcccacagccccgcaaagccggcccccagcaccaggatgcgcgccatcgctccctccgatcttctcgcggagggagcttgcccgcgcaggcgagctcaaatcaagtgggaagggcgcgagccgctgcgtgatgcctcacgtgcccggccgcgatacctcggtctccttgctggtgatgaactccagcagcaccggcacgccctccttggtcttctggatgccgcgcttgatcgcggggatgatgtcctcgggcttggtcacccgctcgccatagccgccgaaggcgcgggccatcgcggcgtaatcgccggagatgtcggtcgagcggtatttctcggtcgagatcggcatcaccttcaattcgatcgccatcgagaaattgttcagcaggatcgacatgatcggaatccgctcgcgcaccgcggtctcgaaatccatgcccgtaaagccgatcgcggcgtcgccccagacgttgatgcagagcttgtccggttttgccagcttcgcgcccatcgcaagaccgaggccgtagccgagctgcgtcgtcttgccccagccgatataggacaacggctcgaccgacttccagaacggcgagagctggtcgcgcgggctgccggcgtcgtgggtgatgatggtgttgtggatgtcgacggtgtgctgcaggtcccacagcacgcgatagggattgagcggcgcgtcgttgtgcgtcagcttcggcatccacttggcaagccactcgttgtgggaggcggcgatctcctcggcgaccacgctcgcgttgcggtccgcggtcacggtcttgccgatctcctccagcagtgcgtcgagcacgaggccggcgtcgccgacgaggccgatcttggcctcgacatccttgttgatgtggttcgggtcgagcgtcgaatgaatgatggtcttgcccttcggcatcgcgatgccgaacgatgtttcggtgaaggagcagccgatgccgaagatcaaatcggtctcggcgaggaatttcggcaccgcgcgcggcaccgcaaggccgccggagccgagcgacagcggatgcgtctccgggaatgacgacttgccgccgaggctcgtggtgacggggatcgcaagccgctcggcaaggcgcttcagctgcggccaggccttggcgtaatgcacgccctggccggcatagatcaccggacgcttggcgttgacgagcagggcggccgcttccttgatgtgaacgggatcggcgccgtagcgggtgcgcagcaccggcgtgtagttcaagggctccggcacctcctcgttccacatgtcggcggggatctcgacgatcacagggccaccgcggccgttcttcaatcgggtgaaggcgcggcgaaagatgttgccgacttcggccgcgatgttgatcggctccgaggatttcaagaacgccttcatcgcctggctggaattgaagttcggatcgatgttggcgagcctgcgcgcatagcccatcggcagcaccagcacgggcacggattcgccgtagcactgcgcgacgccgcccatcgcgttctcggcgcccgggccgtgctgcatgcagaacgcgccgatcttctcgcccgaggtgaggcgcgagatcgcgtccgccatgtgcacgccgatgcgctcctgccgcaccatcacggggcggatatcggcggcggcggcgtattcgatcaaatggttgaccgggtagcccgtgaggatctcgatcccctcgcgcttcatgatttccgcgatcgcggtgccgagcttcatgacggtcactccctttggatgcggccggttcgctccggcctcgttgtcgtcctgtccgataaaggaacaggattccgccgaccggtaaagccgagcggcgggccggatcgggtagtcctgatatgcgtttacgcccaatcgcggctggtcgccgcgcggggcgaggtcaggatgcaggcaaaactagcagggagtttctctgcaacccttaagcgatcgttcatcctgtccctcaatgggccgtcaaccaatgtggcctagttttgctggcatattacaacggcgcgggacaaaacgccgcgagcgtcggacaggagcttttcatgcgcgcgttgctagcaaggtttctgcgtgacgaggtcggggcgaccgcgatcgagtacgccgtcattgccggtggcatcagcatcgtgatcgtcgccggcgtcaaaggcatcggcaccagtgtgagcggccagttcagcgccgtcggcgcggcattcaagtaagcgttgccggttacgcttccgcttcagccgccttcgcagctccgttccacgcgcgcagaaccgcgatgcgcgcgaatatcagcctgctggccccctcgtttcgcggcgttgatcagatgctcgatcgcgatcttccggcgtgcttcctgctggcgtcgtccgataatgtcatgatgtagtcggcggcctactgcagcgtcagcagcgttccgccgcgatgtagtgcgaccggttcgtcaggcggcgtcgaccaaggcatcttgacgaggacgtctcaggcgcggcggctcgaggtcatccggcgactgccgggggaggcctcgtcagccggccttcttccgcgccgcagtgccctgcgcccgcgtcgccttctcggccttcttcggctcgggcttggtggcttccttgggctcgcgcttgccgctgcccgagatcggcagcagcatctcgcgctggccctcgatgcgcttcttcggcttcttgcccttcgctgcctttgcatcggctttcgccggcgcggcctgcttctcgttggcgaggctcttcttcagcgcgtccatcaggttgatgacgttgccgctggccttcgccgcgggctttgcgatcttgatgccgttgcgcttctggttgatcaggtcgatcagcgcctgctcgtagcggtcctcgaactcctccggatcgaactcggcggacttctgctcgacgatgtgcttggcgagatccagcatgtccttggtgatcttcacgtcctggatgtcgtcgaaatattccttttcgctgcgcacctcataggggtagcgcaacagcgtgcccatcagcccgttgtcgagcggctcgagcgcgatgatgtgctcgcggttggtcagcaccacgcggccgatcgcgaccttgtccatgctgcggatggtctcgcggatcaccgcgaaggcgtcgtggccgaccttgccgtcgggaacgagataataggggcggatcagatagcggctgtcgatctcggaccgcggcacgaattcgtcgatctcgatggtgcgggtcgaatccagcgcgatgtcgtcgagctcttccttcgtgacctcgatataggtgtcggtgtcgaccttgtagcccttcatgatgtcttcggatgagacttcctcgccggtctccgcatcgaccttggcgtatttgatccggtggccggtcttgcggttgatctggttgaaggagaccttctcggtatccgacgtcgccgggtacagggcaaccgggcaggtcacgagcgaaaggcgcaaaaagcccttccaattggcgcgaggggccatagggaaaactccgattacgcaaccgacggaacggtcaaggataacaccgggaaccccagtttgaaacaacatggcccgttgaatctggcaacggcgttaaccgtggcttcagcctgcgccggtttgacgcggtgaccgcaacggccgccaggcgcaccggaacatcgctccgggtcccgcgttggcctttcgaacgggagcggcaatcgccggaatcacagacacttaagcaaagaggtcgccatggccagggaacgacacggtcagatcatcgaaaccccgaccgaggcgcgccaggccgagcccggaccctcggttctcgcactgctctcggcctcgacggggctcgcggtcctgatcctcggtctcatctggttcgccttcttccgggggtgacgctgccagcgccggtttcccgcgtgcgaggcgttcattgttagatcgagacgcaaccagcgccaccctgcgcttgcaacgctgtgggcggacgatcacgtctgtgcctctggcccgcgccgcgcacgcggccgtgtggatcctcggtcttgaggatcgtctggatgcgtcacgcgcgtctgcggcgcgcggtgcatgctgccgtgaccgctgaagtcaaagcccggaccatgtcgcgcagaattttttgaaccaggaatcttctcgatcgacggcgcgcgacgtcacgagattttgcacccggaatctctgatgcacgctgcccgtggcgcgtcacgagatcatcgaaattgactgctagctgatttgaatcagatacgcctcgagcttgagatgttctttccgcgcgaagagaaaaacccgttgctggcgcgcctcaaagagaagagcgtttcaggtgtcttcgtcgggctgacggtgctggccatggcgggatggatctatctgctcagctcgatgttcctgaaattcatgctgtggtggttctcctgaggcgcttcgcgcgcgaggccaaccggcgtcggcgcctgatcattgttgcgccgtttgcttgcacaagaattccagcggttgagcattctttcggcgcgccccatcatgatgttgtcacaagtctgaatgttaataacatcacggctaacgtggacgattgtgatggtctcttctgttttcattctcgcgacggtattcgtcgcaggcttcttctccggctttgccgcgcgctcatggcggtcgcacaagcgccgcgcgcagtatcagatccatgcgccctatgtggcgccgtcagccgccagatcgccgcggcgggaccagccgctcagcgcgttcggccacatgcggcgcgcgttctaagcgtggaacgtttggcgggcacccggaggtcgggtggagcggcggatgagttggggtttggcgggcaacatgcaatcgatcgtcttgtctccgtccattgcggcagccggactggtcgtgtgccagccctggattgacctcgcggaaggatgcgccgatcgcgagggaacttgcgcagcatgagtgatctcagggggcactcgccgaggcggtatgtcgttgacgtcagtggccggcgtgtgctggtcggcctcacgcttgaagagacctcggaatttgagggattggacacctctctgccggtactggatgggccagcccccgccggggagaccttgggcgccgagacgatgccgtcggcagtcgagggacagtggctcgaactctatgacaagcacggcaaggcctggatcaagtggaaggccgacctgagggccgggcaagggcgcgattcacccttttttaactaagaccgggcgattttgagcgatactgcctgaatggcccgaaccggatactgacagatgtttcagctgtttttgcgggctcgcgcgcatgacctgatccggtcgcggcgtagcgaggaaggtttcaaggcacgctcggccgagcgcgacgccgagaccgatcgcgcccggatcggatcgatcatggccgcaatcgaggccgcgctacaggcagccgaaagcgagcaatccggcctcggccgtcgtgtcgacgacgttctggcccgcgccgcggtgactctcggcaacggcaccgacgaatatctggaacgcgaggcgcttgacaattatcatcaggacctgtttgacgccgagatctccaacggccagcgtcggctgaaggaactggcgaccgagattgcgcacttcaagttcatgaaggccgcggtgctgagccgcttcccggactataaacctgcggccgccggcaactgacgcaccctgcggccggaacgcgaaggcagaagctgcggcccgcgctcgatcgcgtgtgcggcttggcccagcgcaaggcgaaaggcacaggcgaaacgtggtgatcgcaggcaatctactcgtcacgggctgcgccggcttcatcggcttccatctggcggagtatttgctgcgggcagggcagccggtcgtcggcatcgacaatctgaaccaatattacgacccggcgctcaagcatgcacggctcgatctgctcaagcagcaccatggtttcaccttcctgcaactcgatctcgccgatcgtgccgggatgaaggcgctgttcgagcgctatcgcttcgaggtcgtggtgcatctcgccgcccaggccggcgtgcgctactccctgcagaacccgcatgcctatgtggattccaatctggagggcttcctcaacattctcgagggctgccgacataccgcatgccggcatttgctgtttgcgtcctcatcgtcggtctatggcgccaacaccaagctgccgttctcggtccacgacaacgtcgatcatccgatcagcctgtacgccgcgacgaagaaggccaacgagctgctcgcgcattcctatagccacctctatcggatcccgacgacggggctgcggttctttaccgtgtatggggcctggtatcggccggacatggcgctcttcgcgttcgcggatgcgatcaccaaagggaagccgatccaactgttcaacaacggcaacatgcggcgcgacttcacctatgtcgatgacgtggtcgaagcgatggtgcggctgatcggccgggtccccgagggcgacgtcaactggtcgggagcgcatcccgatccgggatcgagcaaggcgccgtggcggatctacaatatcggcaacagcaggcccgaagacctgatgcatgtggtcgcgctgctcgagcgcggcttcggccgacaggccgaaaagcagttgttgccgatgcaacctggagatgtccttgagacatcggcagatgtctccgatctggagcgtgacatcggctttcggccgcagacgcggatcgaggacggcattgccaagtttgttgcctggtatcaggcatatcacaacgtcgatcggacgtagtgcgctcctcgcgaatccaggcgcgagaaaaaacctggccaagcttggaatggagtctggcaatgcgagttatcaatcgttttgcggttgtcgcggcagcggtcatcttcagcgcagtgactccggcgcacgcgattgacgcccaggtcgcacgggcctgcgacgcgctggtggcgcgggcatttccaccgcggcaacctggcaatcccgcttcgggcagcgcgaggggcggcgcgaaggatgagcgggactatttcaacacgtgcgtcgccaatggcggaaaaatgggcgacgagacgcatcccaagtcgaagtagcgcagcgaccgcggcgcgtcgtgaattagcgttccttatggcagtgatggcgcgaacggctgttcatcgcgctcgatcatgcgagcgcccggcagatgaagcccgagccgctcgcgccttctgctgcagctgaatcgcgccagcggcactgtcttgaattagaatagtattgtcgcgtctggcgcggccgaggcgaatttcttgcacgaccgaacgtgcagcgtcgtattctttcgtcgcatcgtgggagccgatcggagcgtttgttatccggcggcgcggcgacaccggtaacggttcgaaacattttgcgaacggtgtggatcgcggcattggtcgctgcatccatgctgctcggttcgacctgttatgcgcagagcaaatctggtcgatccagcgcagcagatttagtgtgtgtacgccggcgttggtggaatatctggttcgaggctggaacacctcttcaagcaaccggcctctgacgcggcgacattgcgatcgctcgcaagcatgccgccggtttcaatcgcaatcgcagccagcaatgatcgtcgaatgattttatgctcttggtcgcactccacggccggcgccgactgcgctatttggctgcgcgtcgcatcactgccgcaagcatcccatcgcaacgacagaatacggccatcgattaaacctttcgcgatcaggttgtggaagcgaaaactggaaaaattactgtcggtgtgatgttggtcgcaaacctgccccattaaccgctttccatgtgcgtgatctaactctgtcatcgaaacttcaatcacatcgctcatacccttaaccgcagagcgagggcgcgccatgaagcagcacaagattcaacatttgcatcagccgatcgaggaggcgttgctcgcgactaaccaatcgctgcgcaacgaggttgttgcgctgatgttggatatcgctgagctgcgtgaaattcacgagcgcccggttgcgtcccgctcgtttggtgtatcgcgtcagcagactgccccgcgcgccgcattgcaccggggttcatcgctgacattcgtctgcgaattccttactgcgcgattgccaccactttcgcgccggcgcggcgagggtggtggttcgtccgtgctcgcggacaactctatctaaaatagaagcgcggattgggctgccggatgccggcggcttcggcaacaggtctgtggtggacagcggggccgggtcagtgctcttggcgcaccggcttgtgcgctacgacatcggacagacgctcgcgcaggatccaggtctgcaacaccagctcgacggcggtatgccggagctcggaagtctccgcgaccaggcgttccaggacatcggtcgcctcgctgggcggggattgctttccttcgaagaccttgagacgcgccatagtgtcgatccccgtaataattgtcgatcagaagctggctctgacaagcgtcagcacggaatagttcgcggattgtcgggcggtggtgccgcctgatggcctcgggtgggaaagcgcctaatcgataattcgtggatcgcgttattagtgttaggtttcgtgaaaataatcctcaaatatgttgaagctctcgtgacgcctaacgtctctgtaactatcgctgcacgtgcgcgcctgcaagccgccgaacgctggggttgcgggattaatttgctggagtgctgtgaaactctcgcttgactggcgacgtagatatcgcagaggcatgacgcactcacaatctgtcgaaggaccgattggatgttctcatttgcttctcattcaggaatgcaaacggtgcgccagttacccagatcaaattctcatacgcagaaagtcgtataacttttcctgtgaggtcggttcggcgcgggaatatcgctcaaatattccggtaaataccttgcaggttcggcgtttcttcgcaaaatgcagcgttatcgacggcaaattcgaggctcccgaaggccccccggggaatccgtaatttgaatttcctgttgcatttacatagcttataggccatgcgatgattgctaatctagggggcaatgagatgaccaatgaggcgtcattcaactgacgagatcagttccaaggtcaagcaggccgaggaactcatggcgcgggggcagtcacaagcccaagcgtgcaaggtgctgggcgttagcgtgatgacatttcaccgctggcgcaagcaggaggccgaacgcggccacccggggaatggtactgtgaccgcacttgccgctcgcaccgatgatcgagatgggatcccccacgcccataaccgtattgacgaattgcggctggaaaatgaacggttgcgccggatcgtaaccgacctattgctcgagaaaatgaagatcgaggagaagctggcggtcaggtccagcggcgggaacggtttgccccgccgtggtgaagtccagagctgaccaaggctcatccgttaatggattcgtgagggcctgggagccagcaacagctggtcgctcagatgcgctttttctgatcgtgcgcgtagctcttcgaggattggacgcagcctcgcctgtgcgaggtccaagccgttgacgatgtcctgattcggcatgtcggccggaaagcgggccgatcggagctttgtttcgaccgccttgaccagcacctcgacgtcgtcgcggtgctggccagcgaccagttcggcgcccatcaggcggatcaagtggaggagggctaccagcgcggcctcggtttcgccagccgatgaactcatggacgctctctgcctgatattgcgggcaggccttgcgggttcatggcttgcccgatattaaacatgtgaatcgttaacacgaatgttaattaccgatgaccgacctttcggacgctcgattagcgaaggtaccggttaacttcggcgccttctcgttcgcttttgcctcgctcgaagcgtttgccgtcgccttcgagatgatcatcgtcgtgctgtccagcatcattggcggcgcggcctatcatctgttctactaccacacggtttatagcaacagcttcgagggttttctagggatcggggttctcgccgcgatccttcacatgttcgtggcgaagtcgcagggcctctatcatgcgcaggtgctggccggcctcgaccggcgctggagcagcctcctcggcggatggttgctggtcgtcctgctgatgacactgatcatcttcctcctgaaagtcggctccggcgtctcgcgcggctcggtgatgtcattcggcctgatcggcggcctcgggctggtggccggacggatgctgctgcaggcgccgctgcaacgcgcgatcgaccgcggcatgctggcgacccgccgcgcggtggtggtcgggatggcggacgaattgtcacgggtgcggcaatcgagcctgctgtgcgatttcggtctcagcgaggtgcggcggattcagttgaccggccaggcccacgacgcgggcgatcgcacggcggttgagtcggcgattcgtgccgcgcgtgagtgcggcgccgacgagatcattcttgcaatgccctggcagcaggagccacgcatccagttcgtctgtgatcaattgcgggcgtcaccgttgccggtgcggctgctgccggatcgaaccgcggaacgcttcctggcgctgcggatggtggtgagcggcccgatcccgacgctggaaatgcagcgctcgccgctcacctcgctcgagcgtgcgggcaagcggctgttcgacatcgtggcatcgagcggcctcctggtgctgttcgcgccacttctgatcgggaccgcgattgcgatcaagctcgactccaaaggcccggtgctgttccggcagcgccgcaacgggttcgacggcaggccgttcaccatcctcaaattccgctcgatgcatgtgctcgaggacggcgatgtcatcatgcaggcgcgtccgaacgatgcacggctgaccgggatcggcgcgacgctgcgccgccgcagcatcgacgagctgccgcagctgatcaacgtgctgcgcggcgacatgtcgctggtcggaccgcggccgcacgcgctggcgcatgacgacaaatattcgaagctgatcgcgagctacgcgcagcgtcagcatgtcaagccgggtatcaccggtctcgcccaggtgcagggcttgcgcggcgcgacgcccgcgatcgaggacatgcagctgcgcgtcgcgcacgacctgatctacatcaagagctggagcttcgtgctcgacctgcgcatcctgttgcgcacggtcggtgcggtgctgcggcacaagggtgtctgacggccggatgtcgtgacgacctggcatccgacggccgccaatgccgacacgccttactccggaatgctctgtttggcgtccttgaattccgcctcgatgatgcgccggttggcgtcggtcgccacgcgataggcctggccgaccgcacccttcagctccggcgcgcgggtgatgatcaggcggacctgtcgccgcagcaggtcgaccagctccacatcgcgcgtggtgtcgacctgcgccagcaggatcaggcgcggcgcgaccaggtcgctgcggttgaagccggtgtagtaggacatcttgagcgccttcgatgcggtcgggttcagccagtcgaaccgcccggtcgcgggggcgaggccgaaccaggcgccggcgtccatcggcgagagtcgaagcgcgcgcgtgaacgcggcttcggccgcctcgggggagctctgtaattcgctccagccgtcgcgcagccacagctcgctcctgaccacgccgatgtcggcagcgaacgacggcttgccgcgcaatgcatcggcggcgagccaccaggccgacaacgccagcgtcgcggcgccgatcgtggccgtggccgacgcgaagcccgctgggagctgccgtgcgtatcggcggatcgtgtcagccattgcatcagccatggcgcgcggcccgatcgccggtcatcatcagcgatcgccgtgcgccctcgagcttgacgcaggtcaggcggccggtcgcataggcgccggtgtcgacattgatgcggttgtgcagcagctcggcctcgtgcaccggcgtgtggccgtggaccacgaccttaccgaaatcatcttccgacatcaggaagtcgtcgcggatccagagcaggtcttcccggcgctgttggttgagcgcgatgccgggcctgacgccggcatgtacgaagaaatagcggctgtgcacataacagatcggcagcgagcgcaggaaggcaagatgggccggaggcatctggtgaaccagcgcctgcgcgagtgccctgcgttcctcagcgtcgggattcggcgagggcgtcagcccgtaggacatcaacgtttgcaggccgccgaactgccgccattgcgcgagcatgtcgggattgacgagaaactccagcagacaggcctcgtgattgccgagcaggcagaccatgctccggtttcgccgccgctgatcgagcatcgcgatcacatcgcgcgaatccggtccgcgatcgatgtagtcgccgaggaacacctggatcggccgcgccggccggaacttgcggatatcggcatcgatgcgggcgcagatctcgctcagcaaatcggcgtgcccgtggatgtcgccgacggcgtagatgcaggtctcatcgccctcgtcatgttcgaggtcgccggtctggccgacaatacgccggaggaggttgcgcatctgccgctcagcccgcctgcaaccgtgaacggctgatgcgctgtgccagtcctgttccgatcacggctcccaacacgatcactccgggcagcgccggcaattccggcaaggtgaaggcggcgagcagcagcgtcagcagcgcggccgcggccgccgcgggataggaccagtcacggcggcgattgcgtgcaccggccgtgaacgccgcgatgcccacgatcgtaaccgcgagtagagtccagaacatggcggaaccgaactgggcgatcaaggcggcggcgctgctcgccaccacgggccgcgtggtcgcgccctgccagtccgtgtaggtggacgccaacatggcggtggtgccggcgccgctgccgagcgcgggcaggtcggcgagcagattgtgggtcgattgcacgaactcggccggcgcatcggcgaatgcgattgcaagcgccacgtcggggtgacggttggcgaccgcggtcgccagcgcgatcagcgcgatcgccgcggcggcgccggcgctgctccagcggtgcagatgaagctttcgcgcggcgaaaatcatcaggacgagaccgacgcccgcagcgaacgcgaccgctgcgccgcgacggccgtaccagcaggcgcaggcggtgcagaacagcgtgctggcggcgaacagccagcgcaatcgcaaaagctgcgccgccgtgcggccatcagcatggccgccggcgtcgagcgcgcgcgccaggctgagcggtacgcccatgagaacgacgatcaggaagccgttcgcggtctgatcgcgtgccgcgtcgccggcaccaagccagaatttgatcggatcgctgtacagcagcaggatcagtgccgcgacggttgccgtcgccgcgctgctacgggccaccatgtcggcgcggcgggcatcgatcgcgatcgccgcggctgatatcatcaccgataacagcgacagccagaccagcagcgcgccaaggctggcgccggtatcgatcgtgatgctgccgctgagcggtgctcccagcgtttcgccggcgaacttccacaccggatgcgcgaggaacggcagcggcagcatctgcaggatgatccagagcaccggcaccagcgctgtcgtgacggcgggcccggcgaccgatttcaggaatgacagttcacctggacggatcaccatcaggctcgccagcaacccaagcgacgtcgcggcgccaacgaggccggtgacgaacgaggcgtcgaacagacccagcggaatcgacgcaccgatcaagatgcagatgaaagccgtgacgttccacacgagcggggcaagtcctgaggagggcattcctgcggaggatgacgacgcaaggcagcgggatgccccgggctcgcggcgaggtcaatggaaaatgcagcgcgccgaatgcggcggcctcgtgccgcgtcaatgcgggcggcgcagggcgagcaacggcgtcgaggtgcgggaccagaacagcggcgcgaaggcgcttgcgagatatccgccttgcaacgatacgaccgcgatgatcatgagcaggatggtctcgggccacgcgaggcgctcgcctgcgataacggcaagcagcgcgagttccgcaagcgtgacgggcaccagcaccaggcagtgctggcgccgcccgacaacggcgccgccgatcaaattgcaaaggaaaataagtaacataaccaaaccctgcctccgcatcctagcgggccgggtcctaagccggggttaacccggtggtcgcgaggcgcgccggcatggtgtcggcccgcgcgaatggggcggctttgttagtggattaacattcagtacgggtgcaggtcgccgtagctgtaggcggcccaatagtcgcggccgccatagggtccgtaggcgccgtagagtggcgcgcaggaatagcgatccggacagccgtgccagcggacccgtttccattggcagacatcgccgtgacaatgttgcagccgctagcaattgccgctgacgcgctgcgcggcgcgcggggcagcggaaacgctcaattccgcggcaaaaaccccggagccgccaagcagcagggcgacggttcccaatgcgatcgccaatggcttcatgcgagccatcgaaccctctaccgttcactcaaaccatctcattcacagataacgggaacatcacacgaaatcaaagccggagtgatgccgctcgggccgtttggcctacggcggcgcagggtgtcgccgaattgcctcactccgctaacatttcttatcaatcgtaccacagtatatcgcggaaccttgtgattgtgatggtcggcgtgttacggcacggccggagtatttgaatgtcgcgcgcgaatttcattcgaacaatgatattgcttgcggccgccgtttcggtcagcggttgctattacatgccgaccaacggtccgacgagttccgatgtcgtcgccgggcgcggcttcgcccacggcttcgtggtgctgtcggaaaccgccgacttcttctacaaatgcgacgacttctacagccccaaggacgagctctcgatccgctggaacgatcccgcgatcggcatcaaatggggcgtcgataagccacagctgtcggcgaaggatgcggatgcgccgctgctcgccgacgccagcaatcttcccagctacggacaaatctgatgcggattcttttgacgggaacacgcggccaggttggcagtgcgctgaagccgctgctggaaggtcacggcaccatcatcgcgccgccgtccgcgaagttcgatctgtcgaagccggagacggtgacggcccagctcgaaaagcctgaagcccgatctcatcatcaatccggctgcgtacacggcggtcgatcgtgccgaggacgagcgtgagctggcctttctggtcaacgccagggggcccgaggcgctcgccaaatgggcggccgcgaaccgcgtgccgctggtgcatttctccaccgactacgtcttcaacggctcaggagaccggtcgtggcgcgaggacagcccgaccgaaccgctgtcggcctacggcgccagcaagcttgccggcgatgtcgcgatccaggcggcgggcggcgcgcatctgatcgcgcgcacctcatgggtctatgccgcgaagggcagcaatttcctgcgtaccatcgcgcggctcgccggcgagcgtaaggagctgcggatcgtggccgatcagatcggcgcgccgacgacggctcaagcgatcgccagtgcggtcgccggcattgtcctgccgaacatcacgacgctgcacgatcagctcatgcgcaggggcggcgtcgtcaatctggtttgcgccggcgaaaccagctggcatggctttgccaccgccatcgtcggtgggctgcggtcgcggggcgtcacgctcgccgtcgacaatatcgttccgattgcgacggccgatttcccgaccaaggcggtgcgccctggcaattcgcggctggatctgacgcggctgaaagcgcagttcggcgtcgcgatgccgacctggcaggaggcgcttgcgcgcgagctcgacgcctatgtccagctcagcgcgccggcgcacgcttagagcgtgaggggattgggttgaattgaaacggcggcggagcttcacctctccccgatggggaaaggtgaagcgagcgccgcggcacagccgctcagcgcggccggccgatgctctcgtaggtgaagccgtgcgcggccatctcgtccggacggtagatgttgcgcaggtcgacgacgaccggatgcttcatctcctgcttgatgcgcttgagatcgagcgcgcggaactggcgccactcggtcacgatgaccagcgcatcggcctgccgcgcgcattcataggcgtccgtgcagtactcgatctccggcaattccttgcgcgcttgctccatgccgaccggatcgtaggcgcgaaccttggcgccgaaatcgatcaggccgttgatcagagggatcgacggagcctcgcgcatgtcgtcggtatcgggcttgaaggtcaggccgagcacgccgatcgtcttgccgcgcagctcgccgccgagcacgttggcgaccttgcgcgccatcgcgcgcttgcggttgtcgttggcggtcagcgtcgcctcgacgatcttcagctgcacgtcgtggtcgagcgcggtcttgaacagggcgcgggtgtccttcgggaagcaggagccgccgtagcccgcgccggcatgcaggaacttggttccgatccggttgtcgagcccgatgccgcgcgcgacctcctgcacgttcgccccgaccttttcggagagatcggcgatctcgttgatgaaggtgatcttggtggcgaggaaggcattcgcggcgtatttgatcagttccgccgtgcgccgcgcggtatagaggatcggcgcctggttcaggtacagcggacgatagacttcgcccatcaccttcttggcgcggtcgtcctcggtgccgacgacgatccggtcgggatggcggaaatcttggatcgcggcgccttcgcgcaggaattcggggttcgaagccaccgcgaaatcggcgttcggactggtctcgcggatcaggcgttcgacctcgtcgccggtgcccacgggcacggtcgacttcgtcaccaccacggtgaacttcttgagcgcggcgccgatctccttggcggctgcatagacataactcagatctgcatggccgtcgccgcgccgcgagggcgttccgaccgcgatgaacacggcgtcggcgtcgccgaccgcgcccgcgagctccgtcgtgaaggtcagccgtccggaagcggcgttggtctcgacgagcttatcgaggtcggtttcgtagatcgggatcttgccgcgcttcagggcttcgatcttgccggcgtccttgtcgacacaaacgacctgatggccgaagtcggcaaaacacgctccggacacgagacctacatatcccgttccaaccattgcaatcttcatgaatccgctcgtcgatcggtgtggagaggaggagttagcactagcacaattggcgccgacaacgccaagttttatagnnnnnnnnnntagcactagcacaattggcgccgacaacgccaagttttatagcgtatggtttgtgttggagctcggcggctttttgtgcaaacggtgatgggctcggtgcaatcgagtgcgcgctagtcgcctcggacgcgccatggacacattctcaacttgaaatcgaccgacaatcgagccgccgtttgaggggtggacatgagcacgaagacgattggcaagcagaagccctcgagagctgaatacgcgtcgttgcaaacgcaattctccagatacgatcgcacgacgttttctggatttgtgtatgaccgcgccgatctcggccggcgctataccgtcgagctgctcgtcgacggcgagccatacatgtcatcattgtgtgacgagtttgtaacagagctcgccgctgccggaatcggcgatggacgatttggctttaccttcagcgtgcaggatgaggtcggcggcagcgccgcaatcatcgaggcgcggctggccaatatcggaggtgccgtcggtgctccgattcgctgcgatgtcgctgcaccggacgcgcagtggcaccggatctgcgagatcaagtgggctggtggcctgcgcttcgagggctggcttgcgcaggacctggccgaggacatcgagatcctgatcgcgcagcggccggtgatgaccgtgaagcccaccgggtggaccaacgtcgcgcggggcggcgagttcggcgtcggccgccggatcgattttcatctgcccgagcattttgccgacggccgtgtgcgcgggctgtcggcgcggacggtgtccggacggagcctgatctccgagccggtcgcattcgtcgcgttcgagcgcggactggagcagaccatcgcggagctcggacgctgggacagcgagcggttgcgcggacaattgttcgatcagctgttgccggcttcggtcccgtttcacacctatcgcagctggaaggaacgcttcgcgccgacggcgatggagtctgacgctccatcggaggccgcggtcgtcctgatcggcgaggccagggtggacgaaagcatcgagagtctcgaagcccagcggcatgcggcctggtcggcggtgtgcctgccgacgcgcgggttcagccggttcgatccgggagcggcgcgcgaattcatcgacggcgatgccgccaacggcacattcttcgtcttctgcctgagcgggacgatcctggctgaagatgccttgcatcgcttcgccgaagtgcttgcttccgaacccggctgcgatctcgtctatggcgacgtcgaaatcgccgcgggtgccggcgccgtctggccgctggcgtttccagcattcgatctcgaacgtgcgctcgagcagggctatggggcgtattgctttgctgtgcgccgcgaacgcgccgtggcggcgctgcgatccgcaacgtcgctctacgacatcttcctgtcctgcgcggagcgggagcgaacctgtcatctgccgggatcggttgcggcgttgccgggaattgatgcgcccgccgcaaccgtcgagcttgtcgccgcaagcgaggcctatttcgcgagggacggcgtcgaggcgcatgtcgagccgcggccggcgggtctgcttcccgccgtgcgggtcaagcgcgccgtcgactggaatgagcgcaccaccatcatcatcccgaccaggaatcgcgccgagcttctcaagcgctgcatcgagacggtcctgccggccgcgcacgagaccaacgcccggatccttgtcgtcgacaacggctcgagcgagcctgacgcgctggactatctggagggcctttccgacgacgacatcgacgtgatttcggtcgacgggccgttcaacttcgcggccatcaacaatgccgccgtcgattgcgtcgacacggagaacatctgcttcctccgcacctggtcgcaggcgcgttatcgctgggtcaggatgcagaccccggcgaaccccgatcattgggccgcgatcgcgcaggccggcgcctgaatttcctcgagcagggccccatcgattgacagtggcgcggcgagacatttcgccgcgccgctttcgttcgatgcatgtggcggcgggcatccggaacgattgccggcttgaccggttgatcccgttcacatccctcgagccatcgtcatgaagctggccggcctgtgcacgatcgcgacgctggccgtcgctgccgcaggcgccgcgcttgcacagggcagcggacagaccacgcagggcggagcgcgctattcgatcgatggaccgggcggcggcgttccgacatcgcggccgccggcgacgaggccggtcccgccggcaacccggtttatccttatgggaggcgacacgcgccgccggtcgggcaacagaccggtgtaccgctgcggtcgcgttaaccgtcccgcttgccgcacatccgttcgctcttaacgctattcccatcgtcgttttgccgcgtccggcggaatgtcgtacccatgcaacgattgcatttgttgaggcgcgggactggccggcgcagggacggcattttcaatggcgagcaggggttcgatcctcatcacgggcggcgcgggatatatcggatcccattgcgccaaggccgttgccgaggccggctttgttccggtcgtctatgacaatctctccaccggtcaccgcaacttcgtgcaatgggggccgctcgtcatcggcgacgtcgccgatcatgacaggatcacggccacggtccgcgagcacgatgcgcttgccgtgatgcacttcgccgcgttcagcgcggtcggcgaatccgtcgcggacccgcagaaatactacagcaacaacgttgcgggcacgctcggcctgctgcgcgggatgcgggaagcgggttgcgaccgcctggtgttctcctcgaccggcgccgtctacggcaatgccgggcgcgatccgattcccgagagcgccgcgggtccgaccgtcaatccgtacggccgctccaaattcatgatcgagcagatgctggccgactatcgcgcggcctatcggttcaactcggtctgcctgcgctacttcaacgcctgcggcgccgatgcttccggcaccatcggcgagctgcgcgatcccgagacgcacctcattccacgcgcactgatggcgctgctcgggcacgtgccggacttcgcgatcttcggcgaggattacgagacgcctgacggcaccgcggtgcgcgactatatccatgtcgacgatctcgccagcgcccatatcgcggcactcgaactgctgttgaagggcgacgccggcggcgtgttcaacctcggcaccggcaccggctattcggtgcgcgaggtgctcgacgcgatccgcgccgagaccggcgaagcggtgccgtgcgtggtgcgcgagcgccgggccggcgatccgccgatcctggtggccgatccctccaagtcggaaagcggtctcggcttcaaggcgagccggtccgatctcggccacatcattcgctcggcctgggcgtggcaccagaaggcgcatccgcgccggcgttaaagcgcgatgagatcaggttgaatcgtcatcgcgctttagcttgcggagttctccgcgcgcgatttcagccggccgaactggctgcgcagcaccagcaggatgaagtgacccgcgccgatgccggcaaaaccgcccgcgaccttcacgaccgcgtcgagcagccggccgtggcggtccggtgtcagcaattgcatcgcctccagcgtgaaggcgctgaagacgacaaacagcacgatcagcgcggtgcgccgcgggtagcccagcacaaaggccagtcccatcacggcatacgcggcgaagcgctcggcctgcgggtgcaagaacgttggacggtcctggattggcgacagtgtgacaaatgcgatgaaggccagcgcgagccagccggcgaccacagcaaacgtcttgatctttgaaacaagcaaaaaactattcccggtccctgcgccccgccgtgctggattagcgcatcgccgatatcaacgataattaaatgcccgccgagggttaacccgccgccgtcggtgagctggctcacggcgccggcgcattggtaacacgatgttgggttagccggtgcgtatcaaatattaggtattttgataccatcaattggaacccgtcgcagttccatccacatctgaccgatggaaccagcggcgcttgcgcgggttcccgggatggtgcacctgacgaaaaaattagatttgcgtcgcggatccattcataggccgttcacggcgcgaagcctcatttgatgccgaactatcgcaatgctcactctcggaggccaaagtgcgtctgctcgtcgttgaggatgacccggatctgaaccgccagctcaccaccgcgctgacggacgccggctatgtggtcgatcgcgcgttcgacggcgaggaagggcatttcctcggcgacagcgagccctatgacgccgtcgtgctcgatatcggcctgccgaagatggacggtatctcggtgctcgaggcctggcggcgcaacaagcgggtgatgccggtgctgatcctcaccgcgcgcgaccgctggagcgacaaggttcagggcttcgacgccggcgccgacgactatgtcgccaagcccttccatctcgaggaggtgctggcgcggatccgtgcgctgttgcgccgcgcgaccgggcatgcccaggtcgagctggtgtgcgggccggtagcgctcaacacccgcaccaagcgcgtgaccgtcaacggcaacccgatcaagctgacctcgcacgaatacaatctgctcgactatctgatgcaccacaccgggcgggtggtttcgcgcaccgagctggtcgagcatctctacgaccaggacttcgaccgcgactccaacaccatcgaggtgttcgtcggccgcatccgcaagaagctggaagtcgatatcatccagacggttcgcggcctcggctacatgctgtcggcgccgacttgaggcatgatccggaaaactgcgaagcggttctccctcgcgacaaacgcgtagcgtttgcgcggagatcatgctcttaaagcgttttcgagcgacgcggataccccggtcgctcgcgtgaagaaaacgcgatcaaacaaaaggatgagggcatatcctttacaatcggatcatgctcttggagtgcttgatcggcgtgcacgggcattgtcatgatccgcgccgggaggactggattcgcagatgtctgaatccctgatgtctgttgccgctgacacgctgttcgagcgcgtggcgtgatgggcggcagctcgcttgcgacccgcctgttcgtctcggcgaccgcctgggtggtggtgatcctggcgatcacgggcgtcatcctgtcgtcggtctaccgcgacgcgaccgagcgcgccttcgaccggcgcctcaacctctatctgcgtaccctgatcgccgaagtggcgacgccggacgagccggcggaccgccagttccagtcgctcggcgagccgctgttcgacctgccgctttcgggctggtactggcagatcacccgcaccgacaccgaaaagggcgagacccgcgcctcgcgctcgctgtgggacaagaagcttccgaagctcgaggagcacggcgccgagctgaccgccgccggcgtccgcctcggctatgtcgatgggcccgagggccagagcctgcgggtggtggagcggccggtcgatctcggcgccgacggcaagttcctggtcagtgtcgccggtgacgccaccgagatcttcgatgagacccgcagcttcgactattatctgttcggcaccttcgcggcgctgggcatcgtgctgctgctgaccacgatcttccaggtgcgctatggcctcgcgccgctcaagcgcatttcggatgcgatcgccgatatccgctccggccgcgccgagcggctggagggacggtttccggtcgagatcgcgccgctggcgcgcgagaccaatgcgctgatcgatgccaaccgggagatcgtcgagcgctcgcgcacccatgtcggcaatctcgcccatgcgatcaagacgccgctgtcggtgatcgtgaacgaggcggcgtcgcatggcgccgatcccttcgccagcaaggtgctggagcaggccgatgtgatgcgtgaccaggtcgcgcaccatctcgagcgcgcccggatcgccgcccgcgccaccattgtctcgaccatcaccgatgtcgcacctgtcatcgaggcgctgcggcggaccatggagaagatccatcgcgaccgcgacctctcgatcgaggcgaaggccgatccggcggcgcggttccgcggcgagcggcaggatctggaggagatggtcggcaatctggtcgacaatgcctgcaaatgggcggcctcgcaggtgttcatcgaggtcagcgtggtgccgccggaggcgccgggcgccgggccgaagctgcgcatcgcggtcgacgacgacggccgcggcctgtcggaggacgagcgcgccaaggtggcccgacgcggccagcggctcgacgaatcgaagcccggctccgggctcggcctgtcgatcgtgaccgatctcgccggcctttatggcggcaagctcaccctgagcgatgcgccgatcggcggcttgcgggccgagctggtgttgccggcggtgtagggcgggtacccatctgtgaacgccagccgaacaacgacttcattcgcgtagaagcggacaaaagaggcgcgcttagtcgtctcggctaagggccaattgcagaccactcgtcgggaggtcattcgacgatggttgggaagcgcatcgcggcaaaaaggaatgtcgcgcctcccagcgaagcgagtacaaccgatgccacagcgacagctgtcgccagtcccgacgcccgggcgaccaaaccgagcgcgagcgcgcaaaaccccatgcagagatagccgacgagatagaaggccgagagcacgccaccccggccgtcggccggcgaaacggcgtttagcagggtcagcgcgcccaggaagagaagcgcatagctgatccccgccagcgaggtcgaaacgagcaaagccggcagcgagtggacgttcgtcgccagccacaagaacagaacggcgagaacggccgcgatggagccgagaaagaatgccaatcgcggcggcagcttccttgcaacgccggtgactgccgccgagacgacggcgaaactcgccaggacggcgccgttcatcaactcgttggcggagccgaccaggtcgtgcgccacttggcctccgagcgaaaggagaacggcgccgctggtgaaagccgtcgcggcgccgatcgctgccacgcaaaattctttccgaatgcttgccggcacatgcggcatccgtagagaccatggctttcggctccctacatgacgaggaaggaaccagactgcggtgatcagcgtggcgatcaccagcgcgagaacgacaaagtcgagccgcagcggatagggcgcgtactgaatgagggctccaccgagaagaagcgcagtggcgaagccgagcgcttgtgccatgttggtcgcggaagcggcacgttcaggatcgccactcggactgaactcgaggatggcggctgtcgaagcaccgctcgcaaggccaaccccgatccccattactgcgcgggccgtaagaagccattcgatatcgagcgcccacgccagtgccagggcgcctgtcaaggagaagacgagcgcggcaagcatggtccgacgtcttccgacgtgatccgataaatcgcccaggaaaaccagcgtaccgacgacgaatatcggatagatcgcgaacacgctcgtcgtctggaggggcgacagctgccattcctcggcatagagccggtaactgagagccggtgcggcgctcgtccaaagcgtatgcatcgaaacggcgagcgatacccaaaaactggctcggcggctcaggaccatttttggaagggaatgtcggccatccgacgagcggtggccgacgtgacggtctcccatcagcgcagaccgccgccggccgaaattttatcaccggtgacccagcgcgcatcgtccgaggccacgaaggcgacgacgtcggcgatgtcctgcggctgtccgaggcggccgagcggcgtctgggtgacgatgccggcttcgaactctgaagcgagcattccggcgctgtgcgtgccttcagtctcggttaggctggggctcacggtattgacccggattttcctggggccgagttcgttggccaatacgccggtgatggcgtccaccgcgcctttgctggcggtatagactgccgtctggggcggggtgatcgcggtgacgcccgagccgatgttgatgatgcttccgccttcgcgcaggtggggagccgcggcctgcgtcaccagcagcaaaccaagcacgttgacgtcaaacatcttgtggaactgcggctcggtgaccgactccagagggccgaattcgtagacgccagagttgttgaccagaatgtcgaggcggccgtaggcggcaatggcagcgtcgaccacagcctttgcttccgccaccttggacacgtcgccctgaacggcgattgccttgccgtccgcggcgatgatcgatttgaccacggcttccgcgccagccttgctagacgcgtaattgacgacgagcgctgcgccacgcgcggccagggtcttggcaatggcggcaccgatgcctttcgatgctccggtgacgatggcgaccttgccggtgagattagacatgacgactactccttgaagatgccgctcaggcggcttgttcctcgatcgcatcgacgcggtcggggtagaaagcgagatggctgttgatttcggctaccgcctcatagggcgcttcgtaggtccagaccgcatcggtcgaacgttcgccggcggacggaatgctgaagtaggccgcatcgcccttataggggcagtaagtctgcgtcgccgacctcgcgagggctgccatgtccacgtcctcgcgcggaatgtagtgaaccggcggatacttggcctcgagcagcgtgaaggctcgccgcgtgtcagcgatcacgcgtccgccgacagtgacgatgacgcgcttatcgttccgctcgagggtgatcgggtggtcggggccggggatcttgatcgtttgtagggtcatgatgtttactttcgatctttgttttcgctcaaagcttcgatccgccgtccacgcgcagcgtgtctccggaaacccagcgcgcggcgtcggaggcgagaaaggcgatggcgccggcgatgtcgtcgggctgtgccacccgcttcagcgcctgcagagaaagcgtgaaatcgcggccggcctcggtcctggcgaaactggacatgtcggtctcgaccacgccaggcgcgaccgcgttgacgcgcacgcccttcgctccgaggaccagggcgaaatgcttgaccagggtgtcgatggctcccttggtggctgcgtaggcagcgagctctcccacggccgcatgggccgcaagcgaagaggtgaagatgacgctggatccttctttgaggatcggcagcaactgctggaccagaaagaacggagcccggacgttgacggcgaagagctcgtcgaaatctccgatcgtggtctcttcgatcgtcgcggctttggccactccggcgttcgcaacaaggatgtcgagccgttcgccgacgatctcgcggaccttggcggcgagcctgtgcgcgccttgggcgtccgagagatcgaagccgatcgcctcggccctgcctcctgtggtcttgatctcgtcgactaccgagcgtgcctctgcggcgttgcgtccgtagtggatcaggacctgggctcccgccctggagagagcgagggcggcggctcgcccgatgccgcgcgaggcgccggtgacgagcgcggtctttccacagcacgatttcatgatgattttccttctatgaaatcaaggacaccggtcggacgcgctggaagcgcggccgaccggcccgacgaccctcgtctttgttatgcatccaggaacatggtggtgtgggccacgaagagctccgggtactggttctgaggcccgtggctcgaatccggatagacgatgagttgcgcgttcggcaggcgctgctgcagcgtgaatccgttgatcgtgggtatgatcaggtcgttgctgccgtcgaccaccagagtcggatgatggatatcggccaggtaatcccacactccgtcggtcttctcgtttgacttgacgatcgccgcgtactgcgccgtggccgatgcctcgctcacctccgggctgcggtccttgcggcgatacttgcgttcgaggtacttcagtccggccgcgcggccggttgcattgggcaggaaatgcgcggcgatccacagatgttcgggcggatcgtaggtggcagagaagatctctgccgatttgctggcagcggtgtcggcgccgcgcggcccggtgcccaccaggaccagtttgcgcaccagatcgggagcctgcacggcgatctcctgagcgaccttgccgccgaccgaatagccgaggacgtcagtcttgccgatcccaagcgctttgatgaaggcgatggcgtctgtcgccatgccggggatggtcgacggcgtctcgcccgtgctggctccaatgcccgcgttgtcgaacaggatgacttcgcgctgcgcggccaggccgtcggtcaccgccgggtcccaatggtccatggtgccgcggaaatgaatgttcatgacgatcggtacgccgccggtcttgccgaagcgccgataggcgaagcggatgccgttggcttcgacgaattgggtaggcgcagtttggtgtgtatgcgtggtcatggtagagctcctttatctatgagatgagcggacgatcggattcagcttgcggtcttgccgccgttgacccgtacgatctgccctgtgatgaacgaggccttctcggacgcgacgaaaacgacggcctctgcgatttcctctggcctcgcgccgcgcttgagcggcacggcggcgtaaaaggccgctctcttttcgggcgagccggtcaggcgatcgagcatcgcggtgtctgtcggccccggcgccacagcgttgacacggatgccgaacgctgccgcctcgagtgccgccgatttggtgaggccttcgacggcatgcttgctggcgacatagagcgacaggttggctgcgccgcgctcgcccatggtggaggagatgttgacgatgcttcccgacccctgaggctgcatgaccctgagttcgtgcttcaggctgagcagggtgccgaacacgttggtgtcgaacatcgcggcatagctttccagcgtggtcgaagtcaccgggcccggcgtgccctcggtgccggcgttattcaccgcaacatccagccggccgaaacgcgcgaccgtctggtcgaccagaaagccgatgtcatcctcacgtcgcacgtcggctcggatgaaggctgctttggcgccgaggctccggagttcggcctgcagagcctggccttccgcctctcggcggcccgaagcgaccacggtcgcgccctgcttggcgaaggcgatggcggtagcgcggccgatgccggtcagagctccggtgatgaggactacgggggtggacatggcgaaagctcctcgaattgggcactagccactcggtccctgcccagagggcatggtcagaagctggtgtctcgtcggtgttggaagctatttgggctcagctagcgcttttgaaaaagactttgtaagttccgcatccatacctggagagcatggaatggagcttcgtcatctccgctacttcgtcgccgtcgccgaggagggaagcctcacggtcgctgccgaaaggcggctcaacaccgctcagccatccctgagccgccagatccgcgacctcgaatatgaggtcggcgtgccgttgctcacccgcagcgtccgcggcgtggagctcacggaagccggcaaggtgttcctcgatcacgcgcgactggcactgatgcaggccgaagccgccaccgaaggcgcccgccgcgcggcccagccaagcaagcaagtgttcgcgatcggcttcaccaccggacaggaagtcgagtggctgccgcgcgccaccggtttgttgcgcaacgaactggccaacatcgaaatccgcgtatccagcgatcactccgcgacgctgctggaggaactcgcgcaccgcaggctggacgtggcattcgtgcgctcagaacccactccggatatcgagttcaaggtggtggcgcaggagcccttggtggcggttctgcccagcgatcacaagctcgcacagcgagagactttcgatccgaagaagttggtcggcgagacctatatcggcatctcgaaagtgccacgtgtgctgcgggccatcatcgccggttacctcgatcgctgcggcatcgagattactccggcattcgagatcgacaactatgcgatggcgatctccctcgtttcatccaaccgcggggttgcgatcttaccggcctcggcaaagaattttctgccctggtcggtggtgagcctaccgctcgaaggagcgccgccgaccatcgacgtaacggtcggctatcatcgcgccaacgcttcgccgatcttgaagacgtttctttcaagaatcgacggtttgaatgcggcctagccggcccaccggcttcggtggcctcgtcctctgctcaaatgggggcgctggaaccaggccacccaaattatccgcttcgggtcaaggcgatattcccgacgtctggtccgcgtgtctgcttcgcccctgaaagcgggcgtcccagtttatgagtacgcgccctgtcctcgcttcggcgccgctattattcctaaacggcttcttaacgcgcccgcctctatcatcgcgggcggacgggctgcggcgtttgccgggcaccaagctttcacgaccgggcgcatgagccagaaatcgaccgagcggctgagggattatctcgcgcagcttccgccgcaatcgcaggcgttgctgatgcgggagctggagcgcgcggtcgaacgcggcgacgacgtcgccgtggccaatctggtgctcgagcagctgcgcaagatcgtgcgcggggccgaggaggacgagcggatcgagccgcgcagcgacgatccggcgcggctgctgttccggccgctcgagccgttccttgccgagaccaatttcccgacccggcccggccagctccggcgcgcctcgctgctgccgatctggcaatggctggcccgcgagggtgcgccccaggcggcgcgcgacttcgaggcgacgctgggggtggcggccgagagcggtccgatggagatcgccgcgcgcaagttccagctggcggctgctgaagccatcctcaagatcgccgggccgagccaggacgaccgtcagcgcgcgctgtcacgcgtgggcccgccgagcgtcgtcgaggacctgctgccgatcggcctggtgctgcaggcccgcgaagcgctcgaaaccctgggcagccggctgccgagccagatccgcgtgttttccgattcccagatcgcatccgcgatggaggcgctcaaactgccgtcgctgcagacgccgcagctattgccgttcgcgctgtcgttgattgcgcagcggctcgccgcgccctggcagatcatccgtctcgccatcaagatggcggcttccgacgacgagttgcgggttgcggcaacgccctacggcatcgccgtcaccatcgcgctgcatgacctgtcattcgtcgcggcctgtctgcgcaccgacatccggcgcgggcatttcgaatatgtcagcgagcagctcaagaccctgcatgacggggtccgcggcctgcgcaccgagctcgatctgcgcaacgactccacctggggccgccagttgacgtcggtccgcgccgacacctccaacgcgctgcaatcggagatcgacagcgtgccgggccgggtccgccgcatcctgcgccagcgcgccgacaaggacatcaccgccggcgccaagatcgacccgtccgaggtcgaggacgccgccgccctgatcgatttcgtcgcggtgtgccgcacctacgccagcgagctcgcgatcaacgaggtgacgctgcggaccttctccgacctgcagcattatgtcgagcagtcgaccgaggggctggtgcagtcgctgcgcggcggcgatgcccgggtccggtccttccgccagcagcaggtcaaggccgcgatccgcttctgcgaggtgctgttcggccacgactacgcgtcgctgatgaaccgcgcggcggagaatgcggtgaccggcgagcggaagtcgtcgcgggcggggtagcattaccgctgacggcgaatgtttgcgcgatttcggaataatggaagtgtgcggctgagttgcccgacgtgtcaagtcggcattcgggagccggcagccgtccgccggcacctttgcatggggttgttttcgatattttggtagcgcgcgccttggtccgaatatgcgcttgcaataccgccggaacggcaccggaagccgcctgattccgaccttcggtcgatccagcaattgtcaattgccgggctcgccgccggtagtgtaaagcgattctaaggcggcttgccggaagccgccggtccatccgggaaccgcttgatgacgctgtggtttgtgttcgcgctgatgacggtcgcggcgatctttgccgtgttgtggccgctcagccgccgcggacgggcggacaccggcggcagcgaggtcgtggtctaccgcgaccagctcgccgagatcgaccgcgacatggcctcagggatcatcggcgccgccgaggccgatgccgcgcggatcgagatcagccgccggctgctggccgccgccgaccagagcggacgcgaggcgccggtgcagggcagtctcacgctgcggcgtgccgccgcaatcgtggcgctggtcgggctgccggtgatcgcttcgggcgtctatctcgcactcggctcgccgcggctcggcgactttccgctcgccgagcgcagcaaggtggccgatgccaaccagccgctcgccaatctggtcgcgcaggtcgaggcccatctggagaagaacccgaccgacggccgcggctggaccgtgctggcgccggtgctgtcgcggctcggccgctacgatgacgcggtccgcgcctatcgcaacgccatcacctacgccggcgacagcgccgatcgccgcgccgatctcggcgaggcgctgatggggagcgccggcggggtcgtcaccgcggacgccaaggcggagttcgagcgcgcggtcgcgttgaatggcgacgatgccaaggcgaattacttcctgggtctcgccgccgagcaggacggccgcaaggccgatgcggctgcgctctggcagaagatgctggcgaaggggccgtcggatgcgccgtggcggccgctggtgcaggcggcgctggtgcgggtcggcggcaccgtgccggacgtcgccccgggcgttagcgcacccacgctgcccgacggtgcggtcgcggcggcgaaggacatgagcgaggccgatcgcggcgccatgatcaagggcatggtcgaccggctggcgacgcggctgaagaccaatggcgacgacgtcgagggctggctgcggctggtgcgcgcctatctcgtgatgggcgatcgcgacaaggcgatgagcgcgctcgcggatgcccgtcaggccgtggccaacaatgcggatcggttgcgtcagctcaatgaagggttgaagaatctcgggcttgatggatagggcatgacgccgaaaagtgcacagcggttttcggggaacgtcatgcgcaaggatggaccatgaccaggaagcaacggcgtttgacactgatcggctgtgcgctcgtcgtgctcgcgatcgccgcggggctggtgttgaacgcgctgcgcgattccatcgtgttcttctcgacgccgtcgatggtcgccgaaaagcatctcggccccggcaagcgtttccgcctcggcggcctggtggagcagggctcgctcaagcgcggcgacaatctcgcggtgaccttcaccgtcggcgatggcggcgcgacgctgccggtggcctacaagggcatcctgccggatctgttccgcgaggggcagggcgtcgttgccgaaggcgcgctcgatgcgtcgggcgtgttccgtgccgacaccgtgctcgccaagcatgacgagacctacatgccgaaggacgtcgccgacgccttgaagaagcagggccattggaaggacgactacggcgccaagccggacaacaagccgggcaacacgccgagcgcctccgcggcgccgacccagggagccatgcggtgatcgccgaaagcggacattatgccctggtgctcgcgcttgggctcgcgctgatccagtcgatcgtgccgatcgtcggcgcgcgctggcgcgatgcggcgctgatgaacgttgcgcgctccaccgcgcttgcccaattgctgttcgtcgcggcgtcgttcgcggcgctggtgaccttgcacgtcacctcggatttctcggtcgccaacgtcttcgagaactcgcattcgctgaagccgctgctctacaagatcaccggcgtgtggggaaaccatgaaggctcgatgctgctgtgggtgtcgatcctggcgctgttcggcggcctcgtcgcggccttcggcaacaatctgccgctgtcgctgcgcgcccatgtgctggcggtgcaggcctgggtcgccagcgcgttctatctgttcatcctgatcacctcgaacccgttcctgcgcatcgccaacccgccgatcgaggggcgcgacctcaatccggtgctgcaggacatcggcctcgcggtgcatccgccgatgctctatctcggttatgtcggcttctcgatctcgttctcgttcgcggtggcggcgttgctggaggggcggatcgacgccgcctgggcgcgctgggtgcggccgtggacgctgatggcgtggatcttcctgacgctcggcatcgcgatgggctcctactgggcctattacgagctcggctggggcggctggtggttctgggatccggtcgagaacgcctcgctgatgccgtggcttgccggcaccgcgctgttgcattcggcgctggtgatggagaagcgcaatgcgctgaaggtgtggaccgtgctgctgtcgatcctgaccttctcgctgtcgctgctcggcaccttcctggtgcgctccggcgtgctgacgtcggttcacgccttcgcgaccgatccgacccgcggcgtgttcatcctgctgatcctgttcgtcttcatcggcggcagcctgtcgctctacgcctggcgcgcgccggcgctgaagcagggcgggctgttcgcgccgatctcgcgcgaaggcgcgctggtgctcaacaacctcctgctcaccaccgcctgcgcgaccgtgttcatcggcacgctgtatccgctggcgctcgaggttctgaccggcgagaagatctcggtcggcgcgccgttcttcaacttcaccttcgcgccgctgttcgtgccgctgctggtcgcggtgccgttcggtccgctgttggcctggaagcgcggcgacctgctcggcgcggcgcagcggttgatggttgccggcatcgttgcgctggtggcaatggccctggtgcttgcgtggacctatggcggcgcgaccttggcgccgctcgcgatcgggcttgcggccttcgtcatcatgggtgcgctgtgcgacctcgccgaacgcatcgcgctgttccggattccgctgtcgctctcgctgcgccgggcgcgtggcctgccgcgcgcgacctggggcaccgccttcgcacatgccggtctcggcgtggcgctgatcgggatcgtctgcgagaccacctggaacagcgaatatatcggctccatgaagccggacgacgtcgcccgcgtcgccggctatcagctgcggctcgacggcctgaacccgcggcagggcccgaacttccgcgagatggtcgcgcaattcaccgtgacgcgtgacggcgagaagatcagcgtgatgaccccgtcgaagcgcaacttcaccacgcgcggcgcctcgacgaccgaggccgcgctgctgacccgcggcgcgagccagctctacatttcgctcggcgacatcgcgaccgacggcgcaatcgcggtgcgcatctatcacaagccgctggtgctcatgatctggtggggaccggtgctgatggcgttcggcggcctgctgtcgttgtccgaccgccgcctgcgggtcggcgcgccgaagccggcgaaggcggccgcgcgcgcattgcaggcggccgagtgatgcggtcgcgcgcgcttgcagccgctgtgcttgcggcgaccctggtgctcggcgcgatgccggcccgcgcggtgctgcccgacgagatcatgacggacccggcaaaggaggcgagggcgcgcgagctctccaaagagctgcgctgcatggtctgccagaaccagtcgatcgacgattccgaggcgccgctggcccgcgacctccgcctgctggttcgggaacggatctcggccggcgacagtgatcgccaggtgatcgatttcctggtcgcccgctacggcgaattcgtgctgctcaagccgcgcctcaacgagcatacgctggtgctgtggctgaccccgccgctggcgcttttgctgggtggttttgcgctctggcgcctcggccggcgcaagggcaatccggcagccggcgggggcgattccggccccggactgacgcccgacgaagaggctcgcctcgaacggctgctggcggcggactccgcgccggacaagtcgctttagttcctttttaagcgattaatttgcctgcgctattctgccgcagcgccaacctgctcgattaccaaagtttaattccgcagccagcgcgccgtaaggctgatgaccccatgttcaggtccatcaggtgcccgcccccgcaccggtgaatctggccttggagatttcaacacatgaccgaccgtcccgacctctcgtcccttccgtcctacaaggcgccgaagcgctcgctgctctctgcccgcaaacttgcgctgatggcctcggtcgtggccggcctcggtgccgccacctatggcttcagccccacccataacccggccgacctgttcacgacccctgcgcatgcgcaggtcaataacgaggtcaagaaggtccagcagccggtcggatttgccgacatcgtcgagcgcgtgaagccgtcggtgatctcggtcaaggtcaacattcgcgagaaggtcgcgaaggacgacagcaacaatgacgattcgccgttccagccgggttcgccgatggagcgcttcttccgccgcttcggcggtccggatggcttgcccccgggcctgcgcggtggaccgcgtggcggtggcgtggtgacgggccagggctccggcttcttcatctcggctgacggctatgccgtgaccaacaatcacgtcgtcgacggcgccgacaaggtcgaagtcacgaccgacgacggcaagactttctccgccaaggtgatcggcaccgatccgcgcacggatctcgcgctgatcaaggtcgagggcggctccaacttccagtttgccaagctctccgacaccaagccgcggatcggcgactgggtgctggcggtcggcaatccgttcggcctcggcggcactgtgaccgcgggcatcgtctccgcctccggccgcgacatcggcaacggtccgtatgacgacttcatccagatcgatgcgcccgtgaacaagggcaattcgggtggcccggcgttcgacgtctcgggtgaggtgatgggcgtcaacaccgcgatctactcgccgtcaggcggcagcgtcggcatcgcgttctcgatcccggcccagaccgtcaagagcgtcgtcgcccagctgaaggacaagggctcggtcagccgcggttggatcggcgtccagatccagccggtgacttccgatatcgccgacagcctcggcatgaagaaggccgaaggcgcgctggttgccgaaccgcaggccaacggccccgcggccaaggccggcatcgagtccggtgacgtcatcaccgccgtcaatggcgagccggtgaaggatgcgcgcgaactcgcccgcaccatcggcggcctcgcgcccggcaatgccgtgaagttgaacgtgctgcacaaggggcaggacaagaccgtcaacctgacgctcggccagttgccgaacagcctggaagccaaggctgacaccgacaacaacagcgacaagggcaactcgtcccgcggcaccgacgtgccgaagctgggcctcaccgtggcgcccgccaacagcgtggccggcgccggcaaggagggcgtggtcgtgaccgaagtcgatcccaagagtgctgccgccgagcggggcttcaaggaaggcgacgtgatcctcgaggtcgccggcaagaccgtcggcaccgccggtgaggtgcgtgatgcgatcaccgcggcgcgcaacgacaacaagaacagcgttctcatgcgcgtgaagagcggcggttcgtcgcgcttcgtggcagtgccgctggccaagggataactatctatgagttggaacgcgtcgccggcattcgtcgcccccgccgacggcgcgttccggggggcgggcgccttgctcgctccctatgttgcctttcgatggaatatgcccccctccgtcggaaggtctcagggcggtggagtcccccagcttcaccgcccactttttcccgcgcatgatccggaaaagtggataccggttttccggtcagatcatgcgcccacaacagttccggaatatgcgcggtcgtcttgcatgtgcaggccggccgcgccatgctgacagagggcccattcccgtgaccgccaccgctccgcaaatgcgcatcctgatcatcgaagacgaccgcgagtccgccgactatctggtcaaggcattccgcgaggtcggctacatcgcagatctcgcctccgacggcgaggaaggcctgtcgatggccgagaccggcgattatgacgtgctggtggtggatcgcatgctgcccaagcgtgacggcctgtcgctgatcggcagcctgcgcgacaagggcaaccggacgccggtcctgatcctctcggcgctcggccaggtcgatgaccgcatcaagggcctgcgcgccggcggcgacgactacctgccgaagccctattccttcgccgagctgctcgcgcgcgtcgaggtgctgtcacggcgcaatgtcgggccggccgaggagaccacttacaaggtcggcgacctcgagctcgaccggctgtcgcatcgcgtcgcccgcggcaaggacgagctgaccttgcagccgcgcgaattccggctgctcgaatatctgatgaagcatgcagggcaggtggtgacgcgcacgatgctgctcgagaatgtctgggactatcatttcgatccgcagaccaacgtcatcgacgtccacatctcgcggctgcgctccaagatcgacaagggtttcgagcggccgctgctgcataccatccgcggcgcggggtatatgatccgtgacggcattcggtaaactgatccggaccacggcgtttcggctgacgctggtctatctgttcctgttcgcgctgttcgccgcctcgctgctggcttacttcgcctggaacacgcgacggctgatcaccgagcagatcacgacgaccgtcaacgtcgagatcggcgagatcacgtccatctataatcgccgcggcctgcacggcctgctgaccaccatgggcaatcgcgcgctgcggccgggggccaatctctatctcctgaccgcgccgaacgggcaggcgctggccggcaatgtcggctcgctggcgccgggtgtgatgagcgtgcagggctggagcgagaccgcctatcgccggatcgacgaccaggacaagaccgatcaccgcgcgctggtgcgggtcgctgagatggacaacggcttccgcctcctggtcgggcgcgacctcgaggagcggcggcggctgttcggcatcgtcgccaaggccgcgcaatggtcgatcctagtcgtggtcgtgctcggcatcggcggcggcatcttcgtcgcccgccgcgtgctgcaccggatcgacgccatgaccggcaccaccaggcgcatcatggcgggcgatctctcgggccggctgccggtcggccgcagcggcgacgagctcgaccgcctcgcggaaaatctcaacgtcatgctggagcgtatcgaggcgctgatgacggggctgaaggaggtctccgacaacatcgcccatgatctcaagacaccgctgacgcggctgcgcaaccgcgccgaggaggcgctggcgcgctccagcagcgaggccgactatcgtgcggcgctggagcggacgatcgaggaatccgacgggctgatccgcaccttcaacgcgctgttgatgatcgcgcgggccgagtccggtcaggcgcgcggcaacatggacgatttcgacggcgccgacgtcgccaacggcatccacgaattgtacgagccgctggccgaggacgatggtatgacgctgcaggtcaagactgcgccggcgcctgttcacggcaaccgcgaattgatcagccaggccgtcgccaacctggtcgagaacgccatcaaatatggcaagcccgacccgggcgtcgagccgatgaaggcggatgcgcgggagatcctgatcgaggcgcggcgcgagggcgatcaggtcctgctcagcgtcaccgaccacggtccaggcatccccgagggcgatcgcaagcacgcggtggagcgcttcgtccggctggaggcgagccgcaccttacccggttcgggtctcggcctcagcctggcctcggcggtcgccacgctccatggcggcgagctcaggctcggcgatgcccatcccgggctggtggccacgctggtgctgccggcgcgggcgggcggcagtgacaggcttgcggctcaaacgcaggatgtgccacagaaggcggcatgaatgccgccgcgccgggaaacgcggatcgacactgtctggccgcgcggttcgcggatggaccgcgtgtcgccgcgcccgaatccgctgatcagcgcctgactgactggttcgccgagctcgagccggcgcaatcggccgcgctcgcagtcttgctggagcatccgtttgcacgcgacatcctgcgcggcattgccgagttctcgccctatctgttcgagctcgcgcgcgcggatgccggccggctgatccggatcctgtcgtgcgacccggagtcgcatctggcggggctgatcgagaccgcctcccgcgacgtgctcgccgccggcagcgaggccgacgtgatggtgctgcttcgccgcatgaaggcggaggccgcgctgatgatcgcgctgtgcgacatcggcggcgtctggccggtgatgcgggtgacggcggcgctgaccgacatcgcggtgaattcggtgcaatcggcgctgcgctatctgttccggcaggaagtcgcccgcggccgcatgaccgccgccgatcccgagcatcccgaagtcggctcgggcctgatcgtgcttgcgatgggcaagatgggcgccggcgagctgaactattccagcgacatcgacctgatcgtgttcttcgatcgcacggcgacctcgctcgccgaggacatcgagccgcagccgttcttcgtccgcgtcacccaggcgatggcgcggatgctgcagcagcgctcgggcgagggctatgtgttccgggtcgacctcaggctgcgcccggacccggcctcgacccaggtcgcgatctcgaccgacgcggccttgcactattacgagcgcgagggacggacctgggagcgcgccgcgatgatcaaggcgcggccctgcgccggcgatcccagagcgggcgaggcgctgatcgccgagctcgcgccgttcgtctggcgcaagcacctcgattttgccgcgctcgccgacgtccacgacatgaagcggcagatgcagacctatcgtggccagagcgagatctcggtcgagggccacaacgtcaaggtcggccgcggcggcatccgcgagatcgagttcttcgcccagacccagcagctgatcgcgggcggccgccatcccgagctgagggtgcggccgacgctggaagcgctcaatgtgctcgccgacagcaactggatcaccttcgaggcgcgcgacgagctgacgacggcctacgaattcctgcgccgggtcgagcaccggctgcagatgatcgccgacgagcagacccattcgctgcccgaagcgcccgaggacgtcgagcgttttgcgcatttcttcggctacgagaaccgcgaggccttcgccaaagacctgctcggccagctcaagatcgtgcagaaccactacggcaagctgttcgagggcgacgacccgaccggcaccgcgaagctgccggatgtcgactatggcgccgggcccgaagacggccgcctgatcgaacatctcgcccaactcggcttcaagaagccggtcgcggtggccggcaccgtgcagcagtggatcgagggcgattatcgcgcgctgcgtgtcgaggcgacgcgggcggcgtttctcgaattcattcccggcctgatcgacggtctcgcgcatgccgaggagccggacgacgcggtggcggcgttcgaccgtttcctcggcgcgctgcagcggggcggaaggctgatctcgctgctcagccagaaccgcgatttcgtggcgctggtcgcattaatcctcggcgcggcgccgcggctcggcgacatgctggcgcggcaaccgcagatcatggacggcctggtcgatccgcgcttcttcggcgcgatgccggacaagaaggaattgtcggagcggctggccgccacgttgcaggatgcctcgtcctacgaggacttcctcgatcgcctcaggttgttcggccaggagagcctgttcctgatcggcacgcggatcctgtccggcacggtgtcggcgcagcacgcgagcacggctttcgcagatgttgcggaaggcatcgtgcacaccgtgcacggcctcgtcaccgaccagttcgcagcgcaatacggtcgcatcaaggggcaggagaccgcgatcctcgcgatgggtcggctcggcagccgcgagatgacggcgtcctccgacctcgatctgatcacgctctacgatttcgacagcgaggcgcccgactccgacggcgagcgttcgctgcacggcgcgcagtattttgcccgcttcacccagcgcctgatcagcgccttcacgacccggaccaattacggcgtgctctacgaggtcgacatgcggctgcggccgtccggccgcgccggtccggtcgcctcgcggatcgatgcgttcgcggactatcaggagcgcgaggcctggacctgggagcacatggcgctgacgcgcgcgcgcgtgatctcgtcgtcagcggaattccgcgagaggatcgaggcgatcatccgcggcgtgctgacccggccgcgcgatccggcgtcgaccgccgccgacgttgccgacatgcggcgcgcgatcgcgctggagaagggcgaggacgacgtctgggacctcaagctcgccgccggcgggctcgtcgacatcgatttcatcgcgcagtatctgcagctcgcgcatgcatcagtgaagccggagatcctcagcgtctcgacgctccaggtgctcgatactgccgccaagctcggcctgctcggccagtccgaagccgagatcctgcgctcggcggcgcggctctatcacgacctcacacagatcctgcggctgtgcgtgaccggcaagttcaatccggagaccgcgggcgaggatctgcggcgcgtcatggcgcgcgccggcgatgcgccggatttctccgcgcttgaagcgcgcctgcgcgagacccagagcgaggtccgccgggttttcaacgcgatcgtgggttagcggtagccgactccacgatctcaatcgcgtcatccccgcgcaaaggctttgcctttgtcgctggaggtgcgagccttgcggcgcaattgcgccgctgggcgagcctcgaaggatgcgcggccaccagccgggccgtcgacccttcgagacgccgctgcgcggctcctctgggtgacggtgagaaacagtgcggagtttgcggccggctaggcctgctgcctcagcttgagcagcgcgtcgagcacatcgggctcgaggccggcgccgccggcgtcgagatgggcgaagatctgcttgcgcatccgcgggtcccagaacttccagatgtgctcggaaatgccctgcacggcacggtcgtggccctggctgtggaagaactttccgatctggttcgccatatagaccagtttgtcaggcgacgacgacataagcggactccttgccgggcactgcgcctgtgacgcgttccggatgggtaaagatctcaaatccgtcggcgcgggcgattgcggcgagcgtgatgccggcggcgtccgccatccgcaccgcaagcgctgtcggcgccgatacggccgcgatcagcggcgcgccgatcgcggcggtcttctgcaccatttcgaccgagacgcggctggtcagcagcacgatgccgtcgctcgcgcccaccttgtcgcgggccagcgcgccggcgagcttgtcgagcgcattgtgacggccgacgtcctcgcgcagcgccacgatgccgcgcgtggcggtccagaacgcggcggcgtgcacggcgcgggtctggtggttgatctcctgcagcggcgccaccgccgcgaccgccgtcatgatctcgcgcggcgagaagatgcggcccgtcggcaccaccgcggccggccgcaccgcctcgctgatcgaatcgaggccgcacaggccgcagccggtcggaccggcgatgttgcgtcgccgctcggcgatccgctcggccctgtcgggcctgagccacatccgcagctcgatgccgtcgtcgagctcgacgatgtcgagggtctcgatctcctcagtcgattgcacgatgccttcgctcaggctgaatccgaccgcgaagtcgccgagatcctcgggcgaacccatcatcacggcataggtgccgccattataggtcagcgcgagcggcgtctcctccgggatcaggcgcgcgccgtcgctgaagacgccgtcgcgccagaccttccggatcgccttgtggacgggctcgcgcatcgctactccgcggcttccacgacaggcgcgatgcggcgggagatgcgcgcctgctcgtcataggccttctgccagtcggacggaccgttcgacggcgagatctgcacggcggtgaccttgtactcgggacagttggtcgcccagtccgagaagtcggtcgtgatgacgttggcctgggtgtccggatggtggaacgtggtgtagaccacgcccggcgccacgcggtcggtgatctcggcgcgcagcgtcgtctcgccggcgcggctcgccagccgcacccagtcgccgtcgcgcacgccgcgctgctcggcgtcgtgcggatggatttcgagccggtcctcggcgtgccacaccacgttctcggtgcggcgggtctgcgcaccgacattgtactggctgaggatgcgcccggtcgtgagcaacagcgggtagcgcgggccggtgcgttcgtcggtcgcgatatattcggtgaggatgaacttgcccttgccgcgcacgaagccgccgatatgcatcaccggcgtgccctccggcgccttctcgttgcagggccactgcaccgagccgagctcgtcgagcctggcgtaggagacgccggcgaaggtcggcgtcagcgcggcgatctcgtccatgatctcggacggatgagagtagttcatcgtgaaacccatcgccttgccaagcatgatcgtcacttcccagtcggcatagccgttgagcggcgtcatcaccttgcggacacgctggatgcggcgctcggcattggtgaaggtaccgtctttctcgaggaaggtcgagccgggcaggaagacgtgggcgtagttcgcggtctcgttcaggaagaggtcatggacgatgacgcattccatcgccgacagcgccgccaccacgtgcttggtgttcgggtcggactgcaggatgtcctcgccctgcacgtagagccccatgaaggagccctcgatcgcggcatcgaacatgttggggatgcgcaggcccggctggttgttgagcttgacgttccacatcgcctcgaactgctcgcgcaccgcatcgcccgagatgtggcgatagcccggcagctcgtgcgggaacgagcccatgtcgcaggagccctgcacgttgttctggccgcgcagcgggttcacgccgacgccgggccggccgatattgccggtcgccatcgcgaggttcgcgatcgcgatcaccgtggtggagccctggctgtgctcggtgacgccgagcccgtaatagatcgcgccgttgccgccggtggcatagattcgcgccgcctcgcgcagcgccttcgggtcgacgccggtcatgatcgcggtcgcttccgggctgtgcttgtcctgggcgacgaaggcggcccagtcctcgaactcgctccagtcgcagcgctcgcgcacgaaggcctcgtcggcgagcccttcggtgacgatgacatgggccagcgcggtgagcacggcgacgttcgtgccgggcagcagcggcagatgcagcgcctttacgtgcggcgattccaccatctcggtgcggcgcggatcgatcacgatcagcttggcgccctggcgcagccgcttcttcagtcgcgaggcgaacaccgggtgggccgaggctgggttggcgccgatgatcagcacgacgtcggtatcctcgaccgagtcgaaatcctgggtgccggccgaggtgccgtaggtctgcgacaggccgtagccggtcggcgaatggcagacccgggcacaggtgtcgacattgttgttgccgaagccggcgcggatcagcttctgcaccagataggtctcttcattggtgcagcgcgacgaggtgatgccgccgaccgcgtcgcggccgtatttctgctggatgcccttgaacttcgcggcggcgaagttcatcgcctcgtcccacgacacttcctgccagggatcctcgatccgttcgcggatcatcggcttcaggatgcgctccttgtgggtggtgtagccccacgcgaagcggcccttgacgcaggaatggccgcgattggccttgccgtccttccacggcaccatgcgcaccacttcctcgccgcgcatctcggccttgaaggcgcagccgacgccgcaatatgcgcaggtggtgacgaccgaatgctcgggttggccgatctcgatcacggatttttcggtcagcgtcgcggtcgggcaggcctgcacgcaggcgccgcaggagacgcattcggagccgaggaagctctcgttcatgcccggcgagacgcggctgtcgaagccgcggccggagatcgtcagcgcgaaggtgccttgcacctcctcgcaggcgcgcacgcaacgcgagcagacgatgcacttcgagggatcgtaggtgaagtacggattggattcgtccttcggcatccaattgtcgttttcgcagccgtgcgatttggcgaacacgtggttctcgccctcatagccgtagcgcacgtcgcgcaggccgaccgcgcccgccatgtcctgcaattcgcagtcgccgttcgcggcgcaggtcaggcagtccagcggatggtcggagatgtagagctccatcacgcccttgcgcagcttcttcagccgctcgctctgggtgtgcaccacgaggccgggcatcaccggcgtggtgcaggaggccggcgtgccggcgcggccctcgatctcgaccaggcagagccggcaggagccgaaggcgtcgaccatatcggtcgcgcagagcttcggaatctgggtgccggcttccatcgcggcgcgcatgatcgaggtgccctcgggcacggtgatctggttgccgtcgatggtcagcgtcaccatcgcctcggatttggatttgggcgtgccgaagtcggtttcctggatcagcgacatcgtgatttccttgctattccgcggcctgcagccgggccggtgcgggaccaaagtcttcccggaagtgtttcaatgcgctcatcacggggtagggcgtgaagccgccgagcgcgcagagcgagccgaacttcatggtgttgcagaggtcttcgatcacggcgaggttttccgcgacgcgctcgccattgatgatcttgttgatggtctcgacgccgcgggtcgagccgatccggcacggcgcgcacttgccgcaggattcgatcgcgcagaactccatcgcgaagcgcgcctgcttgaccatgtcgacggtgtcgtcgaacaccacgatgccgccatgcccgatcaggccgtcgcgcgccgcgaacgcctcatagtcgaacggcgtgtcgaacagcgcgcgggggaagtaggccccgagcggtccgccgacctgcaccgcgcgcacctcgcgtccggtgaaggtgccgccgccgatctcgtcgacgagttcgccgagcgtcacgccgaacgcggtctcgaacagcccgccatatttgatattgccggcgagctggatcggcatcgtgccgcgcgagcggcccatgccgaaatcggcataggccttggcgccgttgtcgaggatgaaggggatcgccgcgaatgacagcacgttgttgatcacgctcggccggccgaacaggcccttgtgcgccggcagcggcggcttggcgcggacgatgccgcggcggccctctaggctctcgagcagcgaggtctcttcgccgcagacataggcgcccgcgccgacccgcacctcgagatcgaactcatgcgcggagccgccgatgcacttgccgagcaggccggcgcggcgcgcgcctgcgatcgccgcgttcatcgcctcgaccgcgtgcggatattccgagcggatgtagatgtagcccttggtggcgccgaccgtgatccccgcgatcgtcatgccttcaatgacgacgaaagggtcgccttccatgatcatgcggtcggcgaaggtgccgctgtcgccttcgtcggcgttgcagacgatgtatttgcggtcggcactggcttgcgccacggtcttccacttgatgccggtcgggaatccggcgccaccgcggccgcgcaggcctgacgtggtgacgtcggcgaggatctggtcggaggtcagcgtcagcgcccgctccaggcccttgtagccgccatgggcgcggtagtcgtcgacggagcgcggatcgatcacgccgcaacgggcaaaggtgaggcgtgtctggcgcttcagccaggggatctcgtctgtgagaccaagccgcagggcatgcgggccattgccggccatcgcatcgagcagggatggcacgtccgcaggtgttaccggaccgaaggcgatgcggccctgcgcggttgccagttcgaccatcggctccagccaatacagcccgcgcgaaccggtcctgacgatctcgatcggcgtgccgcgcgcggctgcggcttgcgcgacggcgagggcgacctcatcggcgccgacgccgaccgcgccggcgtcgcgggggatgaagatccgcatcgtcatcgctgtgcctccgcgaccagcgcatcgatgcgcgcttcatcgagccggccgaccacgcgaccgtcgagcatcgccgagggcgcggtggcgcatagcccgaggcagtagatcggctccagcgtcacgcgctcgtccgcggtggtattgcctagggaaacgccgagttttgcctccgcgcgcgcggcaagccgatcgccgccggcagcctggcaggcctcggcgcggcacagcttgaggacgtggcgtccggccggttgcttgcggaagtcgtggtagaaagtgaacacgccgtgcacctcggcgcgggacagattgagtgcctctgcgaccatcgggatcgcgggctcaggcacgtagccgaacgcttcctgcagcgcgtgcaggatcaccagcgtggcgccttcaagcccggcatgttcggcgatgatctcagcgccgcgcgccctgtcccaaggttcgtatcccaccgtcatccgcgcttctcacgatccgttttttgctccgcacatcagagttggaattgttcgaaacatcaataaagctgtctcatgcggcgattgcgaaacgcgattaatagcgttgtgcgatgggacgatttaggatcgcaataatggtctggaatcacgcacttccgcgccgctttggatttcggaatcgcacccggatcgtgctacctatggacgcgtcgggctgccgttttagggcgccgttttccgagggggtttgagccttgatcgacaagctggaactgctgctggcgctggccaaggaacggcatttcggccgcgctgcggaggcctgcggcgtcacccagccgaccatgtcgaccagcctcaagcagctcgaggagatcctcggcgtcatgctggtgcagcgcggctcgcgcttccagggcttcacgccggagggtgagcggacgctggactgggcgcggcgcatcgtcggcgacgcgcgggcgatgaagcaggagatcaacagcctcaaggacaagctgtccggcgagatccggatcgcggcgatcccgaccgcgctcggcatggtggcctcgctgacgacgccgttccgcgcgcgccatccggatgtgcgtttccgcatccagtcctgcacctccgccgatgtgctcggcctgctcgaaaatctcgaggtcgacgccgggctgacctatatcgagaacgagccgatcggcaaggtccgcaccatcccgctctacaatgagagctatcggctgctgacggcgccggacgcgatgttcggcgaccgcaagcaggtgacgtggaaggaggtcggcaccgtgccgctctgcctgctcacgcccgacatgcagaatcgccgcatcatcgaccgcgcgctgacctcggtcggcgcggaagcgacgccgacgctgacgtcgaactcgctgctcgtgctctacacccatgtgaagaccggacgttgggccagcgtgatgccggccaagctcgccgagacgctgggcctcgcggacgccgtgcgcagcatcccgatcgtcgatccggtggtggactacagcatcggcctcgtgatcccgcagcgcgatccgatgacgccgctgatcgcagccctggtgcaggtcgcgcgcgaggtcgcgccgaagctggagagcgcgtagcgtctcgcggccgtcggtacatcgacctcatatctcgaggcggtagtaaagtgaatgcgtttcgccgtccggctcccatggcgaggtggcccggaaccccagccgttcatagagacgatgtgagaccgccagcatcttgttgctggacaggcgaatgctttggtatccggcggtccgcgcgaagcggatcaatccttgcgcgatcgcctggccgatgccgcgcccgcggtgagccggcgtgagaaacatgcgggtcagctcgcattcccggtcgtcgacgcgcctaattgcaccggtgccgacaatctcgtccgcgacggtcgcgcacagaaacagtgcgcgatcgccgtatgcagtttccgcgtggtcgacatccccaagccgtgtatggatgaattcgcgcgcgaagggatccggatgatcgccgaaatgttcctgccagacggcttcaatgagccgtcggacctcagtcgcgtcgccgggccggaacggccggatgatgcagtccggtacgagcgctaaatcatcttccattgacgccgcctcttaaacgttgacgcgcgatgtgttgttcagctccgctatcaggtcggcgcgccggaggccgacctggactccgacccgatcgacggagtgggcgattggcgggctggacttcgcgaccgcgaccgtgacgctgtcgatcattgcgaagcgctgaagcaggctttcggcaatcgcttcaccgagggtttcgagtgtctggaacctggccgatgatgcaatctcgacggtggcctcgacaacggcgtcgtacctgacggagcaattcagatcgtcgctgcggtgggttcggacatcacgcagcatcgccgagacatcgaacgtgaatcgctggccgagcgaccgttcttcctcgaacaggccgtgataaccatatgtcctgagtccggtgatcgtgatcgacgtcagcttgggcggctcctgcaagaagcgtttgatcgggatatcccgattgcccaggcgaacggcaggtcgtttcgcgcttcccgatggtgctccatccaaggtcgccagtcgcgcgaggaggcaacggttagcagcattctccagcaccggcaacgggcaatgagggcactgccgccatgcgttggcgatagccgttgttacgccgcttccggcagcttcatctgcagcgtccgcggatcgcgggggagcgagacgcggaccacggtgccgacgccgagcttggagcgcagcttcatcgagccgccgtgcaaattggtgagcgagcgggcgatcgcaagtccgaggcccgagccctggtagctcttggtgagctggctctcgacctgctcgaacggcttgccgagccgccgcagcgagtccggcgcgatgccgatgccgctgtcggcgatcagcagcacgatcgagtcttcgagcatctggccgcgcaccagcacgcggccgttgtcgggcgtgaacttcacggcattggagagcaggttgacgatgatctgcttgaccgagcggcggtcggcgacgaccgagatcgtgttttcgatatccgattccagcgacagccccttgtgctcggcgcggccggacaccacccgcaaggactcggcgaggatgccggagaggtcgagcggctccatgtcgaacttcatgcggccggcttcgatcttcgacatgtctaggatgtcgttgatgacctcgagcaggtattttcccgaggtcaggatgtcgtggcagtactccgcatacttgtccgagccgagcgtgccgaacaggccggagcccatgatctcggagaagccgatgatggcgttgagcggcgtgcgcagttcatggctcatattggcgaggaacttcgacttcgcggcgttggcgtcctcggcgcgggtcttttcctgcgaatacttctcggcgaggtcggcgagctcgacggcctgccgctccagctcggattgcgagcgctgcaggtcgatcacggtggcgcgcaaccgcagatcgttgtcgaccagcttctgctcgtgcgccttgatgcgggtgatgtcggtgccgaccgagacgtagccgccgtctttggtgcggcgctcgctgatgtgcagccagctgccgtcgtcgagctgggcctcgaaggtccgggcgcccggcgccggcacgccgctttcgtgcaggcgggtgcgcacttcgggcatgctgccgacctcgatcacggtctcgtaggaggtgccggggctgacggcgctgtccggcagcttgtgcagccgctggaagtgcgagttgcagagcacgagccgatcatcggcatcccagagcacgaaggcttccggaatggtctcgatggcgtcgcgcagccggaggtcggcttccaccgacttctcggcgagactcttctgctcggtgatgtcgaccgcgatgccgatcaggtgcaggccgccgtcagcggcggcctggctgagctcgcagcgcacccgcagccagatccagtggccgccgacatggcgcatgcgaaaactctggtcgatgtgatcgatcttgcccgagatcagctggtcggcgaagtcgaacaaattgatgtcgtcggaattcaccagcgcattgacctcgccgaaggtgaggaggtcgttgcggctgtcgaggccgagcagggtgaacatcgactgcgaccagaagatccggccgcgcgacaggtcccagtcccacaagccgcagcggccgcggttgagcgcggtgtcgatccggccgcgcacggcatcgttgatcaggtcgccctcgcgggcgcgggtcgattgccagtggaaggcgaagccgaggatcagcaccacgaagctcgtggtcgccgacagcgtcaccgagagcgcggcgtccgagccccagatcggctcgttcatctcctggatgaccacgacctggccgggcagcgacttgacgagctgcgagatcgccagcgcgccggtgccgttgggcagggtcatgtcgctgaccgcaccctgctgacccggagcgatcagaagctgcgcggtggagacgatgtcgaggatgcgatcgttctcgccggcgccgtcgatcggcacgcgcgccagcacgcggtgatcggcgccggtgatgatgacgtggcggccataagcggtgccccaggacgggatcaggtccggcaacagctcctgcatcttctcgatatttgtgagccgctcgcggcgcaccgaggtcaggcggtcgagacgctcggcgaggatgtcggagagcgctgcaaggtcgcgcttcatcgcgccgcgcttctgccggttctggtcgatcacctggacgaaggcgccgaggcagatcgtgatgaggaaggcgatgatgagcgtcgggacagcgcggcgcagtgcaggctcggccgtcaagagcctgtgataggccggtttcgcgatcgattgcgccaatcccttgatcgaatcggattggacgcacgcgttcgctgcatgcgcgcgcgccatgccctagacccccgctctaagctgatttttacccggatcggatgctccccacgatgcatccgaatcatgatcatttgaatccagatttccgggactgtcgagagtcaacgattcgttaatgcgaaataattcttgctcaaaacagaatcagcaggcgcaaagtgagtccgaaaggggaacggctccgtagaattacgcgcgcgccggttcagcgtgactgatcacgcgcttcacggtcgggaacgcgcggcgcagtttgcgttcgatctcgtcgacgctttcgtgcaccttgatcacactcatcgtaggcgcggctcggcaatggaaattgacgacctcgccggcgtcggtgttgcggacccgcacgttgtgaatgtcgtggatcgcgccgccatcggcaaatccggccagcgcggtcttgattgcttcgacgcgatcggccgcggcgtcggttccccacggcagttccggctggagcggctcgatatgggtgtcgacctcgacgtcctcgccgaaatcctcgcggatcgcgcgctcgagctcatgggcgatatcgtgcgcggcgtccagtgccatgtcgctgtcgagctcaaggtcgatgccgacgatcagcttgccgtcgatgtcatggacggtgacgtggtggatggcgaggccggaattgcgtgcgatcaccatgatgcgctcgcgcacgctctcgttgtcgcgcgccaccggcaccgcggtgaaggtgaggtcggcgtcgccgagcgccttgttcaccgcctcctgcgcccggcgcttgatgtcctcgacgcggtcgatcgggtaggtgcgcggcactttggcgatggcatcgatgaagtgcgtcgcgccgaccatgcggacccgcaggcggtcgacgtcgaccacgccgggcacggccttgatggcggcggtggccttgtcctgcgcgccttccggcgcgcggtcgagcagggtctcgaccgtctcccgcgccatgcgcaggccgagcagggcgatcatcacggcgaccgcgatcgccgccgcggcgtcgccccaccagaagccgaggccggccagcaccaagccgacgatgacggcggtcgagcccatcacgtcggaagcaaaatgcagcgcgtcggcggcaagcgcctggctcttggtgtcgcgcgcggcacgatgcaacgcgcgggcacgccacagattgacgccgatatcgaggaggagaacgatgaacggaattgcggagatcgacggcggcggcgcgccttcgcgcaaatggctgtaggcctgcaccaggatgccgccggctagcacgtagagcatggcgatgacgccgagcgccgagacgctctcgaacttgccgtggccgtaatgatgctcggcatcggccggctggtccgatacccgcaccaccgcccaggtgatgatggtggcgaccaggtcgatcgaggagtgcagcgcctccgagatcagcgccagcgatccgatggcgatgccgacgacgaatttcgcgaccgccatgctgccgctggcaaggatcgagatcgcggcgacggatgtcttggtcgatgatgtgctggtgttcgaagaggtcatgggcggcggtgtagcaggcggacggtgaacatcaagtgtcagtcgtcgttcgtcacgcgcaatcgcaactcacttgcaagagcgtctcttagtcgtggagttgttgcgaactattccgaatctcaagacgtgcactgcgcaagctcatcggccgtacgtgtttgcgccaatcacgccgtcgtcctggctctcgccaggacgacattgcgcgatactgcgcgccatcattacgcacctgtctccggtgtcatcgcccgcgttcgcgggggcgagggattgacggatttttctgagttgcccgtcgtgtcgaattggcaacaatcctcatcaccgcaagagggcgatcccgcttatcacaggacgtcaagcacgctatcttgccattgcttggacaagaataagcgggaggctggggccctgacgggtaccgagcggcagtctcggatgacattggacggaagagggacaggccaatgaactccacacccactccgaatgcggctgagccgggtgagggcccggccgcgagcgccgacgaacggctcgctgaagcccaaagggagatcgctcgcgctgacgaagagctcacgcgcttgagtgagcggctcgccaagatggagcgcgacgctgcgcccccgccgcgggcaccatcgccgccgtcggccgaacctgtcccgccttcggtcggccctgctgcttcgtccggacctgctccgtccggagttgcttcgtccagacccagcccgcaatcatcgtcgggaaggccggctttccgggcccttgccgccttgtcgatggtggcgtgtgtcgttgtcgcagtcctcgcctcgcagtcgtcctatggtgcgagagccaagctggttgtcgcccgctgggtgccgcagctcgcttcagcgccatcatcgcgtccggatgatccgccgcttcccgcgccgcgcgctgcatctgcccttcaagttgccgcggcggaggccgctccaccgcaaccggcgccggcgcctacgaccgcgacgccggaggctgcaccgaaggcgacgcaggacgccgcgccgcaaactcctgcggcgcctccggagcaaaccgaactgctgaagaccatcgcgcgcgatctcgcgaacgtgcagcgaaacatcgaccagctcaaggcggagcagcaacaaacggcccgcgagagctcaaaggccatcgaggagctcagggcaagccaagaggaattgaagcgggcgctggcgaaggtttccgagcagaagacgtcagcgcctccggcgcagccggctcccgccccgcgcaagccccagcggacatatgagccgccctacgcaagggcgccgcctcgcatgccgccaagggagtggctctacgacgactggtagcggtcgacgcggcgatcatcggatcgcaccggagcacccgtgatgatcgtgaagcgcccctcgatcgggtgatgcgaccgggagggacatcatgaacgttgtgacggcgatgcctggtccggtgtttggaaggcggcgtcgggcggcgctccctgggatggtcgacgggcggcggttgccggcagcacgatcactttcgctccgaccttcacccgctcgtaaaggtccatgacgtcgtcattggtcagccggatgcagccggacgagacccgcttcccgatcgtatcgggcttgttggtgccgtgaattctaaattcggtctcgcccagatacatcgcccgggcgccaagcggatttccgggaccgcctgccatgaaccgcggcagataaggctggcgcgaaatcatctccgcaggcggacgccaatccggccatgctgtcttgcgggccacggtctgttcgccggaccacgtgaagccttcgcggccgacaccgatgccgtagcgcaatgcttgcccgtcgttcagaacgagatagaggaatgtgttctcggtatcgatgacgacggtgcctggcgtctggtgactgacatagtcgaccacctgccgatcaagtcttgcgggtgcgacagcggattttggtgtttcgacccgaggcgccggggtcgagatgggagccgcgacaggaaccggcactggtatgtgaacgggagttggtgtgcgagctggagctggagccgacagcgccagggcttgatgcgcggtcgatctttttgtcggttgaacgctcgtcgggcgagacagcaaggcgtagcccaatgcggcggcggccatgacgccaattgcgactcgtccggccaccggtagtgcgagcgtctccgtcttcgcacgttttgcccgctttgccatatctttccccaagtccctgtgcctggacgagttacccagcaaattctaacaaactgcgaagcgggtttgcctcggctggaagtcgttaagcatcgttaacgccagcaggctaacccgctcaacggactcgatcgagctggtgcggaaagtgacgccgatatgcttttcacgcgctgtcgaaggagatccgttcagtcatgttgctgacgcaatctctgtcttaaccgggcgagaaccaaaaacactgtgtgggaccgccgcggttcccacaatggttccgtcgccggaactggcacgaagccgcaaagagctggccccgagttaacgcctccacgcttacccggccacgtgttgcggaatcgggaaccaacgatccagaaaaatcagtcaaggagttatgatgctgttcggctcgagcgccgcaatttgcggcgccgtagttgcgctcgctatttttggccgcgctgctggaagtgaaatcggtgcggttcattcaagcgtcgtcgtcgatgccgcttgtggagatgcgatcgtcggcgcagcatccatgtacaatccgttcgagcccggcaaggaagagggcggtccgagcacagcctccggcgagcgctatgatcgctcggtctgggcggctgccatcaagacgagcctgcgtcggaagtttggtggggtccaattcggcgcgaggccgaaatatgccctggtcgaggctgtcggcaagaaggtcatcgtcaagataaatgatgtggggccgcttaggcctggccgcatcatcgacctcaatgagcggacgatgcgctatttcgatccgagtctggaacgcggggtcattagcgacgtaagagttagcccgctcgcgggggattattggactcccggaccggtcggttgaacgtcgcacgcgaacgagccgagctgagcggcggctgcagccgccgccggactgcgcttcgtcgactgatccgccctccacgccacgctacagcgtcaccacgatcttgccgaggtgcttgttggcttccatgtgctcgaaggccttgccgatgtcggcgaatttgtagacctggtcgatcggcagctgcagcttgcgcgcctcgaccgcgggccagatgtccttgcgcacctcctcgaagatctctctgatctcctcgatcgagcgggtgcggaaggtgacgccgatatactggatgcggcgcgccgcgtgcaggtcgaaattgaagtcgccatgggtgccgccaagccggccgacattgacgatgcggcccttgaccttggtcgccttcaggttctggttggcgactgatccggagacctgatcgacgatcagatcgacgccttcgccaccggtcgcctgcaatacctgatcgacccaggcgggatctttggaatccaccgcgagatcggcaccgaattccgtcaagcggccgcggcgcatcgcatcggtcgaggagcccacgacgagcctggcgcccttcagctttgcgatctgcatcgccatcaggccgacgccggagctcgcgccctggatcagcacagtctggccaggctgcaatgcgccgttggtcacgacggcgttgtgcatggtggcgagcgcgacgggcagggtcgcggcctcttcgaagttcatgttcgacggtgaacgaaacagtctgccgtgatcggcgagcgtgtactcggcgaatgccgcgccgccggagcccatgatcttgtcgccgaccttgacgcccttaacattgggcccgagttcggcaacctcgccggcccattccatgccgagcacggtgccgacgccgccggccgcgccatgggcgtggcccttggtcatgccgagatcggcgcggttcagcccgcaggcgtggaccttgaccagcacctgcgtgcccttagggacgggtcttgcgacgtcggtgatctcggggccgttggctccgtagacataagctttcatgaggttctctccagctgttggccgaggcgtgtcgcaaggcacgtcgcgcacttgttgattgatgtcagggctggtgaacgtccagctgcttgcggaagaaagcgagcatggcagcgttcaattcgctatggaacgcaacgcggtcgaagcccggccggtccgtgcagatcttaggcagcttggccgccagagttgccgagcacggcgccaggaacacgaaatgcccggcgttgcggaccacgtgatcatccgtcttgatcggcagtgcctggttgatcgccgcgacatagccgggattgatctcggtgatcttgtcctcgccgctgagctcggaggcccagagctggatcgggatcgtcacgtccttcaaggcgtcccgatcgaacagcggaccgaatgccggatcggcgatcaccatcgccttgacgcgcgggtcgtgcacgatcgcctgcgtcggcagcgcgttgcgtcgcaattcctcgcagctcggcttggggtagggcacgtcgcagaaggccgtcgccttgctgatgtccggattggcaccggcgacgatgagcccggtgtaaccgccgcgggaaaagccgaagaagccgatcttgccgggatcgagcttggtgcgatccggccatgcgtcgagcatgtagtcgaccgcccgcttgatgtcggcggaacgctcgacgagcgcggcaagcgtattggcccggctcatgtcgcctgcgccggtgtcgacgggatgattgacggcgaccacgacgaagcccgcatcggcgagcgtctcggcggtgtcatgctgatcggtgaagccgccgccgaaaccatgcgaggtcaggaccagcggcagcttttcgcccacgacggggcagttcgctgttccaggtagcgtcgtggtcgccagcttgacctcgcccgccggagcggcgcagggcgaccacaccgcaatctgtagcggttcggctccgtccgtcttcaccttgatgagccgcagaccggccgcgtgggcgcacgcggccgagaggcaaaacgcggccgcaacggccgcctgaaacagacgcatgcaaacccccgctggagcggttttggttccgattgaatcagaaccgaagctctagcttttattttgacgcgttgtctttacacgaaccggtgtccgctattcggcagcctggcgcttggccccggacatcattgcctccagccgttcgcgaatgatcgcttccgcctcgtgcacgatgcgcgagatgagctcggcgcaggacgggatgtcgtggatcaggccctgcacttggccggctgaccagatgccctcgtcggcatcgccggtcgcgtagaccatcttgccgcgggcgccggcgaccagctcgcggacgtcctcgaacttggcgccctccttctccatttgcaccaccttggtcgagatcgcgttcttggcgacgcgcgaggtgttgcgcatggtgcggaagatcagctcggtctcacgctcgtcattggcgacgatgcgttccttcaccagctgatggatcgggctttccttggtgcacatgaagcgcgtgcccatgttgatgccttcggcgccgagcgcgagcgcggcgaccaggccgcgggcatcgccgaagccgccggaggcgatcatcgggatcttcaccttgtcggcggcggccggaatcaggatcaggccgggggtgtcgtcctcgccgggatggccggcgcattcgaagccgtcgatcgagatcgcgtcggcgcccatccgctcggcggacagcgcgtggcgcacgctggtgcatttatgcagcaccttgacgccgtgcttcttgaactcgtcgacatgctcctgcggcttgttgccggcggtctcgacgatcttgatgccgctttcgatgatggcctggcgatactcggcgtaaggcggcggcttgatcgcgggcaggatggtgaggttgacgccgaacggcttgtcggtcagctcgcggcaacgcgcgatctccttgcgcagatcgtccggcgtcggctgcgtcagcgcggtgatcatgccgagcgcgccggcattggcaacggcggcaaccagctcggcgcggccgacccattgcatgccgccctgcacgatcgggtggtcgacgccgaacatctcggtgaagcgtgtcttgatcattctgccctcgtttccatcggaatattccgcgacgcggacggccgcgcacggtgttgtttttggatgtcgagggaaggatgcagtcctgtccggcaaatgtctaccggtgacctgcgacgcgcccatgcggaaatgacggggtgctggggtcaggcgagggcgggcacaattttcgttggctactcaggcgccggtgatcacacgcagcgcctggccaatgacgctggagtaattgttacgccggcacggcgtccttcttcgacgcggcggtctcctcgtcgaacgcggccgcgatgtcgcgcatgctgacgacgccgatcaggctgtaattgtcgatcacaggcacgtggcgaatgtggtgcttggtcatcagatgacggatgtgctcgagcgtgtcgctcgatgtgcatgagacgagctgctgtaccgagaccagttgcgagaccttcatgccggcaccggccgcgccgtgctcggcgatcgcgcgcaccacgtcgcgctcggtgaacatgccgaccgcggtgttgccttcagtgcgaacgacatccttgaccacaagcgcgctgatattgctggcgcgcatcagctgcgcggcgatcgccacggtttcgttcatgcgaaccgtcgctacgcgaggggtcttcttgcgcaggatatctccgacttgcatggcaacctcctttgggtcatcgaggacagaattctggtatacaaaataccaattgtcaaccgaggtgttggcggaatctatcaccagggaacagcttaaataggcaggtttgctgacgtttcgaacaattgtgagcggtcgtgagctcctcagccgatcggcagttctaggctccatggtatctggtatctctgtatgcgccaaaagaaagaggcgcaccgaagtgcgcctcgatcagttcgacgggacatcacaaaccgggcggtctcggtcagaccgtcacgatcacgccgtctccgtcacgccgttttggcgcccggcgcagtctcggttgctgcggcggcctcattgccgttgatgaacgtacggcgcatcggcttgatcacgagcagcgccatcagcgccgcggtggcgttgagcgcaaccgcgatcacgaacaccgcctgccagccatagttggccgcaacgatgctggcggccggcaccaagagcgccgcggtgcccttcgcggtgtagagcatgccgttgttggtggtcgcgaatttcgcgccgaaggtgtcgccgcaggtcgccgggaacagcgagtagatctcgccgaacacgccgaaatagaccgcggtcgccagcacgaacaccagcgggttgtggccccaggtcgacagcgtcagcagcatcagcgcgccggtgccgaacgcgatgaacatggtgtgctcacggccgatattgtcggagacccagccgaagaacggccgtccgaaaccgtcgaagatgcggtcgagtgaaatcgcaaacgtcagcgccgccatctggaagccggcgagcgagaccggcgttgtggcgatcttgtagtcgtgcgcgatcggtgcgatctgcgccgccgccatcaagccgccggaggcgaccatcacgaacaccagatacatgacccagaagatcgggctgcgcagcacctgcggcggcgtgaaatcgaccttggtctgcggcaggttgagctgcttcttcttcggcgggatcgcgacggtgggcggctggatgaagaaggcgaggacgaagacgatcaagccctgtccgatgccgaaatcgaagaaggcggcctgatagccgctcgcggcgatcatgttggcgatcggcaccacggtcagcgcggcgccggcgccgaagccggccgcggttgcgccggcggcaaggccgcgccgatcgggaaaccacttcagcgcgttgccgacgcaggtgccgtacaccgcgcccgcgccgatgccgccgatcacggcggcggtgtagagcaaagtgagcgagtccgcataggagttcagcacccaggcgagcgcgatcatgatgccgccgaacatgatgacgagccgcggaccgtatttgtcgacgaaccaggcctcgaccggcaccagccaggtctccgtcaccacgaagatcgtgaaggcgaactggatggcggcgcggccccagtgatgcgcgccgttgatcgggtcgacgaacagcgtccagccgtattgcaggttggcgatcatcgccatgcacacgatgcccatcatgagctgcagccagcggaaaccactcgatgaagcttgtgcttgtgttgcggcggcattgctggaaaccatcaaatcctcccgagcgcgctggtgttcttgtgacccagtgtcgcaattgttgtggcgtatcgtcgcaagctcggcggatgttggtatactatattccagaaagcaagcctgtcgttctgctgcgtcgcagcaaaactggcatacgacgcgccggttcgctcccattcgaactcctgccggacgccgaaaatgacgacgcccggcgttcagccgggcgctttcgtcagcagcagcgtcgcgcgttgcactaagccatcgccgccgatttctcgaccacgattttccgccacggtttgagcaccgcgattgctagcagcgaggcgaggatgttggcgcccgcggcgatgacgaacacattgtcccaatggcccgacgtctgctgcatgtagttggcgatcggcaccaagagcgccgcggtgcctttcgcggtgtagagcaggcccgcattggtggtggcgaacttggcgccgaacgtgtcggtgcaggtcgaggggaacagcgagtagatctcgccccaggcaaagaacacgaagcccgagagcagcacgaaccagatgggatcgtgaccccagagatagagcatccagatgccaaagccttccatgccgaacgcgatgaacatcgtgttttcgcggccgatcatgtcggagatccagccgaagaacggacgggtcaggccgttgagcacgcggtcgatggtcgcggcgaaggtcaccgccgtcatggtcatgccgatcagcgtcaccggaacgctgtcgaccttccagtcgaccgcgatcggcttcaggttcgccgtcaccatcaagccgccggcgccgacgatcacgaacatgaagtacatcagccagaagatcggctgccgcagcacttcggtcggctgatagttgcgcctagtctggatcagcttggcgttctgcaccacctgcggcacttgcccggccttcggcgcgagcaggaagaaggcgagcagcacgatgatgatgccctggccgagaccgaaatagaggaaagtggtctggaagccggagtccttgatcatcgcctggatcggcgccaccgtgagcgcggagcccgcgccgaagccggccgcggtgatgcctgccgccagcccgcgcttgtcgggaaaccatttcagcgcattgccgacgcaggtgccgtagacgccgccggcgccgatgccggcgatgatcatgccgagatagtagccgttcagcgaggtcgcctgcgcgttgatcgcccaaccgatcgcgcagagaatgccgccgatcagcacgacgaggcgcggaccgtatttatcgacgaaccagccctcgaccggcaccagccaggtctcgaacagcacaaagagtgtgaaggcccactggatcgatgcacgatcccatccaaacgtcttctggatgtcggggacgaagaacgtccacccgtattgatagtttgcgatcatcaccatcgcggcgacgccgatcgcgagttgcgtccagcgataggcgtcgctgacgcgcgcggccgcgggggccgccgttgcctgaaccatgtccgacattcatcctcccagtgcgcgctttgtcattctgcttgtggcgcggcgcgatcatcttggtattcgatatgccaaggttcaagctggcgcaggggcagcgtgcgcatatgccgcagaagactcagcagctgcgcgaacactagttcggcgcgcaaaaaaatggccccggaaatcggggccattggtcgaaggttcaatgtcaggtcgcatcttgcagcgaaacgcgcgcgcgcttgagtgcgacgggaatccccgtgtgtcagaggccgaagcgcggcaggtcgccgttgcggttggagatctccgcgctcttcatcagcaggcggtcgatcgtggcaagcagacggccgaacaaggaggaagagggcgcgagcgcgatggcagtggtcttgatggcagtggtcttggacattgacgtcccctttggctggaggccggcaacaagccgccttatcgtctgcagccaaattatgtataccagatgccacatgcaacgagcttgtttgcatagcagcatgcggtactgtgcattgcagcaaaatgggccgattggcatcccagattgatcggaggcccccaacccggggactgccgtcagaaagaaaggccgcccaaatgggcggccttgagtgactgggtttgcgtttcttcttggccggtggaagggtcggggccagatcccttcaccgcgtccagtcttcgcccgcgcacagcgatcccatgcagccgcggacgttcagcgtgcccgacgacaccagcgtcaccgagctctcataggtcttgccgtcgtcggcgttgtagatccggcccgcccatttgttcgggcctgccggctgcatgttgatgaacagcgagatgcccatcaccggccgggtccgctgcgcgggatcggcattcttgtcgtcgagctgcggcttgccggtggccttgtcggtcggctccttcagccagacgacgcggccgcacagcgcggcgccgcagcgatggaccttgatcctggcgtcgccggactgggtcagccagacgcctgccggatcgttggccctgtcgatggctttggcggcgtcggcggtgccgccgagcagcgggatgtggaacgcggccacgatcaggcggcgggcaaggtgagcatggatcagctgctttaaggcccaaagcgggccgtcgtggtctggaattactatcatcatccaccttcttcatgaaaaatttcatgataaacatgaaataaatcacgttttaggttgagtcaacaacattaccaaggcatgatgcatcccagccgtaatggcctgtttggcaaaatttttttcgggtgggtgcgatggggatatcggtgcgtgagcagcgccagctttggtttcgaaggctcgatcgggcgttctgggtgatctgggccgcgctgccggtggtgctgtggctggcctatcagcgcaccatcaccgcctcggccacgatcgccgagagcctcaccggcgagcaggcgaaatgcgccgccatcgtcgccaacccgctcgccatgtcggcgaagggccaggtgctgttctggtcgctgttcgcgcttggggtatcgttttacgcggtgctgatcggcatccttcatcgcatggtcaaccgattcgccaatgggcggatcttcgtgtccgaaacgctgcaaggtgtctggtggatggggatcttcctggtggtctggccgtttgtggatacgatcacgaccattgcggtgagctatgccctgtaccagctcggcgacatcaagttcttcctgccgagctacggcgtcgacgtcagcaccgtcgccggcggcgtcttcctgatggcgctgaaattcgtgatcgagcacgccatcctgttgcagtccgaaaacgacctgacgatctgaggtgatgccggtgcccatcgtggtgaacctcgacgtcatgctcgcaaagcgcaagcgccgcctcggagaccttgccgacgcgatcggcatctcgatccagaacctgtcgatcctgaaaaccggcaaggccaaggcgatgcgtttctcgacactgtcggcaatctgccgcgagctggactgccggccgggggatattttggaatatgtgccgggtgatgagggcggggacagccagagcggtgagggcggttgattggaggcgcgattcccgcgcgccgacggcctctcaactcatccagcgcggcagcggcagattcttcttgcgcaggaaatccggattgaagagcttggactggtagcgttggccgccgtcggcgaggatggtgacaatggtcttgccggggccgaggtcgcgcgcaagccgcatcgctccgacgatgttgatcgcactcgagccgcccagcaccaatccctcatgttcgatcaggtcgaacaggacagggagcgcctcctcatccgtgatttggtaggcgatgtcgatcggcgcgccttcgaggttcttcgtcacgcggacctgaccgatgccctccgtgatcgagtcgccttccgtcgtcagtttgcccttggtgaaccagttgtagagggcggcgcccatcggatcgctgagcgcaattttgacgttcggattgcgttccttgagggcgcgcgccacgccgcccagggtgccgccgctgccgacggcgcaggtgaagccgtcgatccttccgtcggtctgctgccagatctcgcggccggttgtgcgatagtggccgtcgctgttggcgacgttgtcgaattggttcgcccagaatgcgccgagttccgcggcgaggtgcgcggaataacgcgcatagtggctcggatcggaatagggaacggcgggtatcaggcgcagatcggtgccgtagagccgcagcaggtcctgcttctcctgactttgggtgtcgggcatcacgatcacggaacgatagccgcgtgcattggccacgagcgcaatgccgatgccgacattgccggccgtgccttcgacgatggtgccgcccggctcgagcaggccgcgctgctcggcgtcgttgatgatcgcgagggctgcccgatccttgatcgagccgccaggattgaggaattccgccttgccgtagatgtcgcaaccggtggcttccgatggcccgcggagcttgatcaagggcgtgtcgccaatcgcatccaacagacccgcgcgaatagtcatggtgccccacccctcgtttgctcggctatcttaggcggcgctcctcagcatgttggtgctgttcttgccgcgaattgggaggcatttgtatcgtttgtggtgcaacagcggtggtttcgttctcttgagcggtcgaaaggcaatccgtgcagagcgtgccgctgcgtttcctccctgcaacaaaaatggccgcggttgcccgcggccattcgtggtcttgattgcgcgcagcccttactccgccgcctgcttcctcggcggatcgagcgcgccggaatcgtggatctccgcgacctgatgatcggagaagccgagcacctcgcgcaggatctcgtcggtgtgctcaccgagcagcggcgagcgggcgacttcgctcggcgaatccgacagcttgatcgggttgccgaccgagagatacttcccgcgggtcgggtgatcgacttcgaccacggtgccggtcgcgcgcagcgactggtcctcggcgagttccttcatcgacaggatcgggccgcaggggatgtcgtccttgttgaggatctccatcgcctcgaattttgtcttcgtcatcgtccactgttcgatgcgggcgaagatctcgttgaggcgcggcaggcgggccggcggcttggcgtagttcggatcggtcttccaggagggctcgccgatcacgtcgcagatcttctcccagaccggggcctgggtgatgaagtagatgtaggcgttcgggtcggtctcccagcccttgcacttcaggatgcggccgggctggccgccgccggaatcgttcccggcgcgcggcacggcatcgccgaacgggatgccttcgccgaactggctgtattccttgagcgggccgtgggcgaggcgctgctggtcgcgcagcttgacgcgcgacaggttcagcacgccgtcctgcatcgccgcggtgacgcgctggcccttgccggaatgggtgcgatgatagagcgcggtgacgatgccgagcgcgaggtggaggccggtgcccgagtcgccgatctgcgcgccggtgacgagcggcaggccgtcgcggaagccggtggtcgaggcggcgccgccggtgcactgcgcgacgttctcgtagaccttgcagtcttcatacgggccggggccgaaacccttgatcgaggcgacgatcatcttcgggttgatggcgtggatcttctcccagggaaagcccatgcgatcgagcacgccgggcccgaaattctcgaccagcacgtcgcactgcttgatcagcgcggtcaagacttccttgcccttcgggttcttggtgtcgagcgtgatcgagcgcttgttgtggttcagcatggtgaaatacaggctgtccacgttcggaatgtcctgcagctggccgcgcgtgatgtcgccgacgccggggcgctcgaccttgatcacgtcggcgccgaaccaggccagcaattgcgtgcaggtcgggcccgactggacgtgggtgaaatcgagaatgcgaacgcccttgagcgccttggtcataatgttttgctccgtactctggtctgcccctgcacccgcagggagtgaagtgggtttgaggggttacttcttcttcaaaacgctctgcggattgaggttgccgatgcggccgctctccgagcccgccgccggatcgatcaccgcgttgatcagggtcggcttgccgctatccagcgccgcattgaccgcacgcttcagctcgtcgggcgaggtggcgttgacgccgacgccgccgaaggcctccatcatcttgtcgtagcgcgagcccttgacgaacacggtggtcgccggatcgtcgccggcgctgttgacgtcggtgccgcgatagatgccgtcattgttgaagatcacgacgcagatcggcagcttgtagcggcagatggtctcgacctccatgcccgagaagccgaacgcgctgtcgccttcgaccgcgagcaccggcaggccggtctcgaccgcggcagcgatcgaatagcccatgccgatgcccatcacgccccaggtgccgacgtcgagccgcttgcgcggcttgtgcatgtcgacgacgccgcgggcgaggtcgagcgtgttggcgccctcgttgacgaagatggtgtcggggcgttccgcgatgatggcgcggagcgcgccgagcgcaccgtgataatccatcggcgaggcgttgctcatcagcttcggcgccatcttggcgacgttgtcgtcgcgcttcttcgcgacggtcgcgagccagtcgttgggtgccgcagtccagttcgcgcccatcgcatcgaggaacgcggagacgcaggagccgatatcgccgaccacgggggcgacgatctcgacgttggaatccatttccttcggctcgatgtcgatctggatgaacttcttcggagcttcgccccaggtcttgcccttgccgtgcgagagcagccagttgaggcgggcgccgatcagcatcacgacgtcggcttccttcagcacggtggagcgtgccgcacccgcgcattgcggatgcagatcgggcaacaggcccttcgccatgctcatcggcaggaacggcacgccgctcttctcgacgaaattcttgatcgcctcgtcggcctgcgcataggcggcgcccttgccgaggatgatcagcggacgcttcgcgctcttcaggacgtcgagcgcgcgcttcaccgaagacggggaggggatctgctcgggcgctgcgtcgatcaccttgaccagcgacttctggccggcatcggcgttcatgacctggccgaacagttttgccggcaggtcgagatagacgccgcccggacggcccgacaccgcggcgcggatcgcgcgcgcgaggccgatgccgatgtcctgggcgtgcagcacgcggaacgccgccttgcacagcggcttggcgatcgcgagctggtccatctcctcatagtcgccctgctgcaaatcgacgatctcgcgctcggacgaacccgagatcaggatcatcgggaagcagttggtggtggcgtgcgccagtgcggtgaggccgttgaggaagccgggcgccgacaccgtcaggcagacgccgggacgcttggtcaggaagccggcgatcgaggccgcatagccggcgttctgctcgtggcggaacgacagcacgcgaatgcccgccgcctgggccatgcggcccaggtccgtgatcgggatacccggcacaccatagacggtgtcgatgccgttgagcttgagcgcatcgatgacgaggtgaaagccatcggtcagctcttgctcggtgcccggtgcctcggactttgtagcggtattcagcatcggcatcgtctccctgatcgttctttggttcggacgatctgatcgtcgtctgaagcgggtgtggactctcaaacttacgtgaacagctctctacgtgaacaactcttggccatgggcctcgacataggcggcaaggccgagcgtgtgatcgcgcgcgcgcttttcggcgagctcggtgtcgcgcgcttccagcgcctcgatgattccgagatgctcgggcagcgaggtcgcggtgcggtccttgcggccgatggtgagctggcgatagccgcgcacatgcagcaagaggtcgttggtgaggtcgaccagcacgggcgattccgacagcgagatcagcgcctggtggaaggcgatgttggccttggaatattcctcgacgtgatcctgcggcagccggtcgtcgctgaagtccttgaagaagtcgcgcagcgacgagatgtccttcttgcgcgcggtggtcgtgatcaggcgcgccgccatgctctccagcgccgcccaggcgcggatcatgtcgacgatctccgccttggtgcggcggaccacgacgatgccgcggcgcggcacggtcttcacgaaaccgtcctgctcgagcatcgcgatcgcttcgcggatcggcgtgcggctgacgccgagacgctcggacagtgcgcgctcgtcgagcatcacgggctccggcgtcgcgtagatgtccatcttcaggatcgcttccttcaaggcttcataggccttgttcttgaagctcgtctcgggcgcgatccggacgatggcgatatctgtgtcagccatggtgggcgacgccttggtctgtttcggttctggcacgactcgtctcctcctcttggagacgtcttcttagcagaagaaatcaccctagatttttggcatgccaaataccagaatgtcaagccgcccttatttttcggactttttgatcgtcgaccgatcttgacaattacgtttttggcataccaaatgccacaaaatttgtcccaggagaaagccgatgtcaaattccaaggatgcggtccgcaagattctcgatgcggtcagggccgacaagcgcacgagcctcaccgcccccgaaggcaaggtggtttgcgacgcctacggcattccggtgccgaaggagggcgttgccaagtccgcggccgaggccgcccggatcgcctccgacatgggttttccggtcgtgatgaagatcgtctcgcccgatatcctgcataagaccgaggccggcggcgtggtggtcggcgtcaaaagcgcggccgatgccgagaagagctacgagaccattctcgccaacgccaggaagtacaaggccgatgccaagatcgagggcatccaggtccagcagatgctgggcggcggcaccgaggtgatcgtcggttcgatcaccgacggctcgttcggcaagctggtcgccttcggcctcggcggcgtgctggtcgagatcctcaaggacatcaccttccgcctcgcgcccgcgaccaaggacgacgcgctgtcgatgctcgacggcatccaggcgcacgagatgctgaagggcgtgcgcggcggcgaaccggtcaatcgcgaggcgctcgccgacgtcatcgtcaaagtgtcgcagctggtcagcgatttcccggaaatcgtcgaactcgatctcaatccggtgttcgccaccagcaagaacgcgatcgccgccgacgtccgcatcgtcgtcgacttcgactacaagccgcgcccggcgccgcgtccgaccgaggagatcgtcgccgcgatgagccgcatcatgcagccgaagggcgtagctgtcatcggcgcctccgccgaggacggcaagatcggcaattcggtgatgaagaacctgatcaacggcggctacaagggtgagatctatccgatccatccgaaggcggaagagattttgggctacaaggcctacaagagcgtcaaggacgtgcccggcgtgatcgatacggctgttttcgcgatccccgcgaaattcgtcgccggcgcgctcgccgaatgcggcgagaagaaaatccccggtgccgtgctgattccctcgggcttcgccgaagccggtgcgccggaattgcaggccgagatcgtcgaggtcggcaagaagtacaacatccgcctgatggggccgaacatctacggcttctactacacgccggccaatctctgcgcgaccttctgcaccgcttatgacgtcaagggccatgcggcgctgtcgtcgcagtcgggcggcatcggcatggcgatcatcggcttctcgcgctcggccaagatgggcgtctcggcaatcgtcggcctcggcaacaagtccgacatcgacgaggacgatctgctcgccttcttcgagcaggatcctaacaccaacttgatcgcgcagcactgcgaggacctgaaggacggccgcgccttcgcggaggccgccaggcgcgtctccaagaagaagccggtgatcgtgctgaaggccggccgcacctcggcgggtgcgaaggctgcgtcttcgcacaccggcgcgctcgccggcaacgacaagatctatgaggacgtgttcaagcaatccggcgtgatccgcgcccgctcgctccggcaactgctcgagttcgcccgcggcgtgccggtgctgccgacgccgaagggcgagaacgtcctgatcatcaccggcgccggcggctccggcgtgctgctgtctgactccgtcgtcgacaacggcctgtcgctgatgcagatgccgccggacctcgatgcggcgttccgcaagttcatcccgccgttcggcgcggccggcaatcctgttgacatcaccggcggcgagccgccgatcacctacgtcaacaccgtgaagctcggcctgtcggacgagcgcattcacgcgctgatcctcggctattggcacaccatcgtgacgccgccgatggtcttcgcccgcaacatggtcgaggtgaagaaggagatggaggccaagggcttcgtcaagccgatcgtcgcctcgctcgccggcgacgtcgaggtcgaggaggccgccgagtacctgtaccagaacggcatcccggcctacgcctattcgaccgaactgccggtcgaggtgctgggcgccaagtacaaatgggcccgcggcgcggggctgctctgatcgtctgatcagccggagaccaaaagccgcctcggagatcgtccggggcggctttttcattgcaccatccggcgcgccgcgccggcttgccttccgcatctgatgtgctactgatatgtcagatgagacggaggaagcgatggagttggctgcaacaggaatgaccgaccgccagcgcaagtatcgcgcgacctaccgcgagcgggtggtgggctggtacaatggttggctgcatgtcgtgctgatctacacgatcgggttcacggcgctgtacgtctacctggccaatctgcacgacgtgaaatggtgggaatacctcaccatcccggtggtcttcctgattgcgaatttcttcgaatgggcggtgcatcgcttcgtcatgcaccggccctcgaatgtgccgctgctgcgcgcgatctacagccgccacacgctgatgcatcatcagttcttcaccgaggaggaaatgcgcttcgccgatcatcacgattggcgcgtcaccttctttccgccctatgcgctcgtggtgttcaccctgatgtcgatcccgccggcgatcgtggccgggctcgtgatctcggccaataccggctggctgctgatcacgacgaccacgtcgatgtacctgatctatgaattcatgcacttctgctgccacgtcgaggaaaacgccttcgtgcgcaacatgcccttcgtcaacaccatccgcaggcatcataccgcccatcacaaccagtcgatcatgatggagcggaacatgaacctgaccttcccggtgatggactatgtgttcggcacctccgatctcaatcgcggcctgcttggccacgtcttcaacggctacagcacgcgctacgtgaagaccgacatgcgacggacggcgcggacgccgcgggtcgtggtgaaggagcgatcggtgccgcatgccgcagcttgaacccaatctcgccggcctcgcctggttcgggctgctgtggagcgtgtgctgcatcggcttcctgcagctggccgggatgtatccgctgcgccggcgtaccgtcctgccggtgacgatgacgacgatattgtgggcgatgctgctcgccggcacgctggcattcgccctggtggagctgcgctggaccaccatcattgtggtgggcggtgtgctgttcctgttcctgcccgagctgtttcaggcgctgccggaatggtggcgcgacggacgggcgggattgcggctgtcctgttgcgccatgatcgcagcgctggcgctgctgatcggcgtggctgcgccgtcgtttcacatctggacctgaggggacgtttcgatgccaagccacatcaagctcatgttgtcgctggcctgcctcgccaccgcggcctgcggatacttcttcatggtccatctggggcagcagggaccgagctacgcggtcgccttcctcggtgtgttcgccacggtcgcgatgtggatcttccccgaggtcgtcaagaaggacttcaagatgcgtccgccggggtcttgatgtgatgctgcagcacggagaggatccgatggcgaactataccggagaccgaaccatcgacggcatttccgtcctggtcgacggcgcgccgctgtcaccgcattacgaccagcttcgtctcaccgaacacggttttgagtggagctatgaaggacccgagccggcacagctggccttcgcgctgctctatgatcacctgcacgacgccacggtcgcaaaggcgctgtatgagagcttcatgcggcgcatcgtcgccaacttcgacaatgaatgggagctctcctcggccgatctcgatgaggcggtggcggcactgcggtccggacaaacggcctgaccccctgatttctccacgagagaattttgagatgacgctgacctgtcgtgccgcggtgctgcatcaaagcggaacgccgctctcgatcgagcgcgttacgctggcgccgccttcgccaaccgatgtggtggtgaaggtgcgtgcggcggggctctgtcacaccgatctggaggtgatcgacggatcgctgcgttatcccctgccgatgatcctcgggcacgaggcggccggggtggtcgaacaggtcggcagcgcggtgcgtgacgtccgcatcggcgaccacgtcatcctgtcatggaacccgcattgcggacactgctttcagtgcgaccgcgcgcagccgatcctgtgcgagacctatctcgccaggggtctggaaggcgtgcatttcgacggtacgtcgaaggcgcaactcgcgggcggcggcggcctggcgcatctgatgttcctcggcgcgttctcggaatatgtcgtgctgccggcgcaacaggcaatcgtcgtgccaaaggagatcccgttcgaccgtgcatgcctgatcggttgcggtgtcatgaccggcgtcggcgccgcgctgaatgtcgccgagatctgtcatggcgataccgtgatgatcaccggctgcggcgcggtcgggcttgcggcggtgcagggcgcccggctcgccggcgccggtgcgatcatcgcggtcgatctcgacgacgcgaagcttgcgctggcgcgacagctcggcgcgacgcacgacgtcaacgcggcacgcgaggacccggtccagatcgcgaaggcggcgacgcgcgggcgcggcgccgacgtcatcctcgaggcggcgggccatccactggcgtttcggcaaaccgcggaggcggtgcggccgggcggcgaggtgatttggctcggcaagatcgacgtcacgcaggacgtgagcttccgctggggcgcgttgatgggcgagaagcgtttccgtcgctcgagctatggcggcgcgcggccgcggcgcgacttccccttgctggcgcaggcctatctcgacggccggctcaaactcgacgaactgatcaccggtcgctgctccctcgacggcatcaatgatggcttcgaggcgttgcggcgcggccggtcgatccgcacggtcgtcgaattctgaattatgaagcatgatccgggaaagtgaacccggttgtccgaaaggatcatgctaaaaaaaggttcctacagcgtcgaacgcgcgaaactctcgatgtagtcgatcaggctgtcggaggcagcgcctgcggcgtcgacgcggcgctcggcgatggcttcggcgacatcggcatgcagccgcgcggcgagcggcagatcggccgcttccttgtaatgctggtaccagaatcggcgcgacaggccgtgcatcaggcccatggcgcgggaggcgaattcgttgcgcgacgccgcggagatcagtgtgttgaactgatgatccagccgcatgaacagcagatcgtcggacttttccgctgcgcgccgcatgccggcggcgatctccgagaactgcgcacgctgctcgctggtggcgcgctcggcggcgccgcgggccatcagccgttccagctcgcgccgcacctcgagcaggcggagttgggcgcgaaggtcgatctcggacaccagcacgccgcgacgggccaggatgttgacgaggccgtcgcgcgacagccgctgcagcgcctcgcggatcggggtacggccgatgtcgagccgcttggcgagcacgagctcggagagcgcggtgcccggaggcaattgcagcgtcacgatcagctcttccagctcggcataggcgcgatcggtgagggtgacgtcgccctgcgggagaagggcttgcgcggcagcgcgcggcttgccggcggcggacgattgccgtgccggccggcggcttcctgctgcgcgggcgcgcaccgtgctggatcgtttgctcgaatctgccatcgggatcttgcgtgctgctgtccagcagatatctcacacgccccgatcgcactgacaaggccgcccgatcggcactgcaccgaatccggcggcgtgcagcgaacggccgcgcatcatcagtgcgaaatgctctccagcgtccggccgcgggtttcctcgccgagcagcagcaccgccagcgctgccaccacgaacgcgccggcgccgagcgcgaacacgccgctctgtcccgccgcgggcaggatcacgccgatcacatacgggccgatcagcgatccgattcggccgaccgcggaggcgaatccggtcccggttgcccggacatgggtcggatacagttcgggcgtataggcgtagagcgccgaccacatgccgaacaggaagaactgcatgcagaggcccgcgatgacgagctgggtctggtccgccgccgagccgtagaagtggcaggcgatcgcgccgcagagcaggttcattgccagcgtcgccttccggccccaggactcgacgagccacgccgagaccaggaagccggggatgcccgcgagcgaaatcaggatggtgtagaacacggatttggtgatcgggaatcccttggcctgcagcagggcgccgagccacgtggtcaggccgtagaagccgagcagcgcgaagaaccacacggtccacaacatcgtggtccgcctggcgtagatgcccgaaaacagcgtcctcaggccggttgttgcggatgcgggggcgggcgcctggcgcacgaccggcggcagctccttgccgccgatgcgatcgcggaccctgctttcgatgtcgcgtacggtcgcttcggcccgctcggaatagccatgcgaagcgagccagcgcggcgattccggaacatagcgccggaccacgagcacgaacacggccgggatcgcctgcaggatgaagacccagcgccagtcggcggcctgcagcacgaagtaggtcaacaggcccgatgcgatgaagccgagcggccaaaatccctcgaggaatgcgatgtagcggccgcggttgctggcgggcatgatctccgagaccatcgattgcgcgaccggaaattccatgcccatgccgaagccgagcagcagacgggatgccccgagcgcggtcgccgtcgtcgagagaccgcagcacaggctgcccaagccccagaagatcatgctgacctggaagacgcgggcgcggccgaaacggtcggccagcaggccggcggaggcggcgcctatgaacatgccgaggaagctcatgctggacagtagcccggcttccgccgtcgacaggccgaaggtctgacggatcgagccgagcacgaaagtgagcgcggcgaggtccatgctgtcgaagaaccatgcggttgcgatgattccgaagatccaacgctgataggaggtcagcggcaggcgttcgagccgtgccgcgatgtcggcgacctgctgtgcctgcgcggttcgcgcgacggcggccggagccaggcgtccggccgatgcggtgacgtcggaaacggtcattgctgtcctccccaggtggacgttgccgggctcttttcggccctctttcataagatgtcacacggatagcagtgatatgtcaattggtgatcacctgcgcgaggcgccggacggtgccgaaccgatcggcgccttgcgcgcgcgttcggtgatcagatcgacgatcggtgccgttccggagcggcatcaagacccggttaacggcatccgagaaatcggggcctaacggataatccggctttaatggggagccgactaaacgtctctggttgcagagtgccggatgccaggaagcatccgatcttgcgtccgaaggaggcgtattccccgtcatgtcaattcaggtcgattcggattttgcgagcgacgatcgcgccagggcgcagatcggcgcggcggtgagctacctgctcagggatacgaccggcgtcgcgcgtgagcatgccgtcgagacgattgtcgagatggtgcgcgagattgcgagccggccggctggtaccgaaatggcaacgcttcagccgctgatgagcggcgtcgcctaccgcgactttgtcatcgatgcgtaccggcgcgacgtcgatcgctggcgcgcgaccatccgccgctctaacggcaagaagatccggatcgcctcgccgccgtcggtgcgtgacgaggcgacgacgacggcggatgcgatcaccgccgagaaggccatcgagttcgccaggcgcgcgatcgacctcggtgaggtgatttgacccgcattgcgggccgccgccgtggcccgtccggcggccacttggtctatgcttgtcgtctatgcttgggacgcgcgatgtgcgagtcttgatccatcgcatcccagcagagatatgccatgccgtcagaacttcgctcgccccgccttgccgtcctgatcgacgccgacaatgcatccgcaaagatcgcagatggattgttcgaggagatcgccaagatcggcgaggccagcgtgcgccgcatctatggcgacttctccaatccgaggtcgaagggctgggccgacatcctgtccaagcacgccatcatcccgcagcagcaatttgcctatacgaccggcaagaatgcatccgacatcaccctcgtgatcgacgcgatggatctgctgcacagcggccggttcgatggcttctgcctggtgtcgtcggacagcgatttcacacggcttgccgcccgcatccgcgagcacggcatcgacgtgttcgggttcggcgagcagaagacgcccgagagtttccggcaggcctgccgcaggttcgtctacaccgagaatttgcgcggcggcgcgacgagcaatcaggatgccgccgtgcgtgcccagccattgcagccgcccgaggccgcgacgcccatcctcaagaaggtgatcggtcagatggccagcgaggacggctgggtgacacttggtgaggtcggacggcaactggccaatctggcgtccgatttcgatcaaaggacttacggcttccgcaccttgagcgaactggtgcgcaggaccaacgctttcgagatcgagcagcccaagggcggcacgacgcgaatccgcatcaagccggcggaggcgccgtcgccgagcaggccagctccaaggcggcgagcgccgagacggcgagccgatcagaagccgccggaatgaacggcgcgcggctcggtcctgttccgagccatccctgaatctgaaccaacgatgaatgccgcttcggatatcatccggagcggctttcttatttgtgctggaaccgaagcgagttgcggcggaactgaaatttgcgcgcaaattgccgcgccggaactggaacgtctcactacctgcgatgttgaaggggcatcttgcaactcggaggaggagaatatgaacaagcgttttgccgtttcccttgtcgctgctgcgtcgctgttcgcgtccggttcggcgttcgcgcagtccacgaccgctgctggcgccgccaacggtgcgcggaccggcggcgagatcgcgggcccggtcggcgagatcgtcggcggcacggttggtgctgctgtcggcgctggcctcgagattccgaatgcggtgatcaccgcgattccgcgcgacgagccgtcggtggtggtgcaagagcgcgtcgtggtcggcgagccgctgcccgacaccgtcgtgctgcgcccggtgccgcgctataccgaatatcgctacgcggtcgtcaatgatcgccgtgtgatcgtcgagccgcgcacgcgccggatcgtcaagatcatcgactgatcgcgcgacgttgctaatggtcgacatcctcgcgggcacatcgcccgcggggattcgtttggccccatcaattttggtcccatgaataccggcatggcacgggtccgcttttttcatgaagtggcccgttggcctgacgaccggatcccttagactggcctgcaacggacgcagcgagcgttcgcgtcaaaagcaggggatggaaacatgggccgcaagatcgcgatcgtcggcgcgggggcggtcggcggctatgccggcgcgcatatggtgcaggcgggtgaggacgtcaccttcatcgatccgtggcccgagcatgtcgagcacatgggcaagcacggactgcgcgtcacccacgcgatggatgtcgccgaattctcggtgccggtgcgggcgctgcacgtcaccgacgcgcagctgctcgccaaggagaagccggtcgacatcgccttcgtctgcatgaaatcctacgacaccgcctgggccaccatgctgatccggcaatacctggccgccgacggctacgtcgtgtcgttgcagaactgcatgaatgaagagaccatcgccggcatcgtcggctggggcaagacgctcggctgcatcgcgagcagcatcaccgtcaatctgccggagccgggccacatccaccgcggcgccggcaagggcggcgcggcgcataccgtatttcgcgccggcgaggtgcatggccgcatcaccgcgcgggcggaggaggtctgccggctggtcgctcattccgacagcgccaaggtcacctccaatctctggggcgagcgctggtccaagctcgtggccaacgtgatgggcaacgggctgtcggcctgcaccggtctagcgggcagcgaggtgctgcaaagcgagccgttgcgccgcttctcgacccggctcggcagcgaggcgatccgcgtcggccaggcgcaaggctatcagctcgaggaaatcctgcatctgtcgcccgatacgatcgcccgcgccggcgagggcgacgaggccgcaacacgcgcctgcgacgagcagcgtcttaaggacagtaagcgcacctcatccgcgcagcgcccctcgatgggccaggacatgcagaagggccgccgcaccgagatcgaattcctcaacggcttcgtggtgcgcgagggcgaaaagctcggccttgcctgcaacgccaacgccgcgctgaccgacatcgtcaagcgcgtcgaacgcggcgagctgaagccggatccaaggcacatcaccgagctgaggatgaattgaaccgcgttcgatatgcgacgaagctttgctcgcaacgacggtgaaaatgttgaggcgttcgcctacagcagctgcctgacccccatgccatgcatgaaccgctcgcggatctgcacggggtcgcggcgggtggtgccggtgccgggcttgtcgtcgatgcggacaccgatcagcgtcgggcctgcggcttgtttcgactgctcgatcagccgctcgaaatcgtcctcgtcggcggcccaggtgctgttggcgaggccgctcgcgagtgccaccgcgacgatgtcggtatggctggccgccggggtcggttggctgccggtgatctggtagatgccgttgtccatcaccaccatggtcaggttgtcaggcgccaatgttgcgatggtcgagaggcagccgagctgcatcaacagcgagccgtcgccttcgagcgcgaccacccggcgcttcggctgcgccaatgcgacgccgagcgcgatcgggaaggcgaggcccatgctgcccagcatgtagaaattctgcgggcgatggcctgcggcccagagatcgaaattggtgttgccgatgccgccgatcacggcttcgtccttcaatttgctgacgaggcgctgggtcagatcgaatcggttcatcaccttggtgttgcgctgtgtgctggtcatggccgatctcacttgtcgaaggtcttgccgccggtcagcagcggcgagaggatcagcgccaccggcgcctgggtggtgatcgcctgcttgatcgagcggtcggcgatgaattcgagctcgtcgagccttgtgatggtgtgatgctccatcgccagcgaatccagcaccgggcgcatggtgcggcagaccagcgcctggccgtagttgaactcgccgagcgtgccgcgctcggacacgaacatgatcagcgggatctggtagggcaccgcgagcgaggccagcacgttggcgagcgtggcaaagcccgaggtctgcatcagcaccgcgccgcgcattccggccatccaggcgccggagacgatgccgacggcctcttcctcgcgcgcggtcggaaacgtcgtgaaatacggatcggcgtgcaggttcttgatcagcgtggtcagcacccggtcgggcacatagggcaccagcttgatctcgttccgtttcagcgtctgcagcacgatgccgtgccaggtcgcccccgacgtctgggacgaggcttgttccgcggccgccatcctgttctccctcatcgtgcgatgctgatgttcgcttacggatcgaaacttgacgccgtgcccgtgattgtcaacatgccgaggccgcaacgcgatctgcggaattcggccatcgccgtgccgaaccggcgtgcgatacaggcggtaacgacaacgggcggcaacgatagcgggacgggaggcgtcgatgaccggatgggtctggcggaccgccattgcggcagcagccatgcttgcggccggctttgcgtccgcgcagccatatccggccaaggccgttcacatcctcgttccctatccacccggcggcggcgtcgacgtgctgacgcgcacgctggctgaaaccgtatcgaagacctggacgcaatcgatcgtggtcgagaaccggccgggcgccggcggggtgatcgcctcgcaggcgatcacgggctcggcacccgatggctacaatctgatcatggtggcgagcggccacgccaccaatccattcctctatccgaagctgccctacgatacgttcaaggatttctcgccgatctcgctgttggcatcgtcgcccaacgtgctgctggtgcgcgcggactcgccattcaagtcggtcggcgacgtcatcgcggcggcgaaggccaagccgggcagcctgtcgttcgcccatgccggcaacggcacctcgacccatctggccggtgagctgctgaacagcctcgccaagatcgatctcagggcgatcccctacaagggcggcgcgccggcgatcaacgacctgctcggcgggcagattccgatgtcgttcaacaacgggccggaatcggtcgggcagttgcaggccggcacggttcgcgcgctggcggtgacgacggcgtcgcgcgcgccgttcctgcctgacgtgccgagtatgtccgataccgtgccgggctatgacaccgaggtgtggtggggcctgctcggtcccggcaacatgccggccgatctggtggcaaagatctcgcacgatttcgtcgcggcggtgaacaccgaagcggtcaaggagcggctcggcaagctcggtgcgatctcgatcgggtccacgccgaaccagttcgccgccaagatcaaggccgactacgaaaaatggggcccgatcatcaaggccgccggcatgaaggcggaatagcgatggccgcatcagagatccccgcctgcctgccgccgcttcccgtgacgccgccgcgcgagaagctgccgccgaaggcctgcgacacgcacgcgcatgtgttcggcccggccgaccgcttcccctatgcggagaatcgcagctacacgccgccggacgcgccgctgcaaaactatctcggcatgctcgatgcgctcggcttcgcccgcggcgtgctcgtgcagggcagcgcgcacggccgcgacaattcagcgatgctggatgccttgcagcgcgaacccgcgcggctgcgcggcgttgcggtggccgatgccgatgtggcggcgggcacgctgcggcaatggcatgtgcttggtgtccgcgcgttgcgcttcaaccatttcttccgtggcggccagttgcattatcgcggcggcattccgcttggcgtcgccgagacgcatgcggctgtgatggccgaactcggctggcacctgcagctctggatcgacgtgaaggatctgtccgacacgatcccggcgctgaaggcgctgggcctgccggtcgtggtcgatcacatgggccgcaccgatgccgccgcagggatcaacactgcgggcttccagagcctgctgcgtgcaatagatgaaggctggtgctgggctaaactgtcaggcgcgcatcgcctgagccggcgcgcgccggattatccggatgcgcggccgtttcatgaggcgctggtatccgccaatcctgagcggctggtgtggggcggcgactggccgcatccgcgggtcgagggcgaaatgcccgacgccggccatctgctcgacctgttctacgaatggactccggatgccgcgacacgtcaccgcatcctggtcgacaatcccgcaagactctatggcttcccaaactgagagctgcccgaagacatgaccgtcaacaacaagcgcgtgttctacgttaaatacctcgcccacgagatctatgtcgacatcctgaagcagcggccggatgtccggctcgaccgtctggagaacgacacgccggaggcgcaattcgcccccgtgctggcggatgcgcatgcctaccagatcggcgccgcccgcgacgagctggcgccgcatttccatgcccatgccgagctgctgaagcgggcgccgaacctcctgatcgtctcctcgaacggcgccggcttcgatcccgtcgacgtcgatgcctgcacggccgcaggcgtgctggtcgtcaaccagtccggcggcaacgccaattcggttgccgagcatgcgctcggcatgatgctgacgctgtcgaagcggatcatccaatccgaccgccggctgcggcgcgaggccaatgtcaaccgcaacgaattgatcggcaacgagctgaaggagaagaccgtcggcatcgtcggcctcggcaatgtcggccgccgcatcgccgaactgtgcaaggggctcctgcacatgaaggtgatcgcctacgatccgtatcttgcagcagacgagatggcgaagcggggcggcgagaaggtcgagctcgacgatctgctgcgccgcgcggacttcgtctcgatctcctgtccgctcgacagcaagagccggggcatgatcggcgcgcgcgaattcgcgctgatgcaaccgcacgcctatttcgtcaccacagcgcgcggcttcatccacgacgagaaggcgctggaagaggcgctgcgcgacaagcgcatcgccggcgccggcctcgacgtctgggccaaggagccgccgccgccggaccatccgctgctgcagttcgacaacgtgctggcaagcccgcacaccgccggcgtcacccgcgaggcgcgcatcaacatgggccggatcgccgccgaacagatcctcgatgcactcgacggcaagcgcccgccgcgcatcatcaatcccgaggtatggccggtgtatgcgaaacggttcgagcaggcgttcgggttcatgccggggtagatgcctccgcatagggtgaggtgagcacgccggtcaggcctgctcccggcggaggccgcggctgcgtgcggccaaattatcgaaaacaaccccatgcaaagtagccgggcgttcggccaggcaacttgacccgtcgggcaactcaggggtaaatttccaatattccgaaatcgcggaagtgccctgccttgcggggagagataccgcaagggcgcagggaacccctccgccggtgcgtccctcgcgcaaatggcgtgagtgagccatgagtagctggttgcggcggaatccgatcgagcgcggtcacaactctgtcgcaactccactaaaccctaagctgtgcctttctcgcaacgtgtaacggaaaagctcacaagaagtccgtctcttcgttgttccacgacccggagtgcggcaatctgtcccacaagggatgctctggggtggctgaaggtgaagaccgggaatatcgctgtggtgccggatcggtacctcggtgttggattttgtgcgcgacaagcgcttgttttgttatgtgtcgccctgttcgcgtttgtggcgctgatcgtcaccgccttgcccgccgcggctcaagacgcgagttggagtgcattcccgtttgcgggaccccttcccgggacgcacgatttcaataccggcaccaactggacaggaggaagcgtaccgaccggcaccgccatgttcggtgtctcgaatgtcaccagcctctcgttctcgtccaacaccagcgtcagtggctggaccttcgacgccggggcttccgcctttagtttcggcgtgagccagacactcaatttcaatggcgccggcattgttatcaacggcggcagcgccaccatcaacatcggtcaatttggcaaccaatttggcgcggtacagttcgcaaacgcgagcacggctggtcgcgctaccatcaacaacggcttcagtctcatattccgcggcagcagcacggcgggcaatgctgtcatcaacaacaatctcttcttggacttccttgattcgagcacggccgccaacgccaccatcaccaatagcggtggtataacgaacatcgagaatcgcgccagcggcggcagcgcgcgcttcatcctgaacgggatcggcgtactcgacatttcgggcgtcgcgatcggcggcaccacggccggttcgatcgagggcgacggcaatgtccatctcggcgcgaagaccctcgcggttggtggcaacaatctctcgacgacattttccggcgtcatcagcggcaccggcgggctgaccaaggtcggcggcggcactttggcgctgttaggcaccaactcttacacgggcgcaaccactatcaacggcggtacgctggaggtggacggctcgatcgccagctcgtcgagcgtgacggtcaatgccggcggcaccttgagcggtaccggcatcgtcggtcccgcgaccgtcaatgctttggatgggagcacaaccatcgttgtgggggggaacgataggtttacgctgatagacgtcggcggcatcatcgtcatcgtgccgaccgtcaagtccgccgtcccgtggagcggcagtgccgatcccgcggccgccctcaccatcggcggcacattggcgcccggcagtgcagccaacacgacgggctccctgaccgtcgccggcaatcttgccttccaatccggcgcgatctacgccgtgcaggtgacgccgtcggttgccgcatcgaccaatgtgctcggaaccgcgacgctcggcggggccacagtcaacgcgacgttcgccaatggcagctacatctccaagcaatatacgatcctgacggcgacgaacggcgtatccgggacctttggcgcactcgccaacagcaatctgccggcaaacgtcaccgatacgttgagctacgacgccacccacgcctatctcaatctagtgctgaacttcgcgattccgggcggcgccaatgctaaccagcaggcggtcggcaatgcgctgagcaattacttcaatgcgaccggtggcattccgttggtgtatgccgcgttgtcgccgcctcaactgtcccaagcttcgggtgagctcggcacgggctcgcaacaaaccacgttcgacgccatgacccagttcatgggggtcctcactgatcccttcatgaaccggaccggatcggccactcccagcccgggacctgccggctatgccgacgaagcgctaggctacgcgagcggcgcacacgacgcgtatgcgatgttcaccaaggcgccgccgacgccgttcgtgccgcgctggagcgtgtgggcggccggattcggcggctcgcaaaccaccgacggcaattctgcggtgggatcgaacaacaccacgagcagcgtctttgggaccgccgtcggggccgactatctgttctcgccgaacacgattgccggtttcgcgctcgctggtggcggtaccaacttcaacgtcaacggcatgggcttcggccgatccgacctgttccaggccggtggctatgtccgccacaatgaggggccggcctatatctcggcggccctggcctatggctggcaggacgtcaccaccaatcgcaccgtcaccgtcgcgagcatcgatcagttgcgcgccgagttcaacgcaaacgcctattcgggacgggtcgaaggtggctatcgcttcgttaccccctgggccggcggtctcggcatcacgccctatgccgcgggccagttcacgaccttcgatctgcccggctatgccgagcaggccgtcatccgctcatccgcctttgcgctcactttcgctgcgaagagcgtgaccgacgtccgaagcgaactcggcctccgaaccgacaagtcgtttgcgacggccgatggcgtcctgacgctgcgcacccggttcgcctgggcgcatgatcatgatccggaccggtcgatcgccgcgaccttccaggcgctgcccggcgcaagcttcgtcgtcaacggcgcagcgcaggcctccgattccgcgctgaccacggcagcggtcgagatgaaatggcgcaacggctggtctgcggcggcgacttttgaaggccagttctccgatgtcaccgcgtcctacgccggcaaggggggcgtgcgctatacgtggtgaaggcggctcaagaatgctggagaaaatctccgtcgttgtggacgcaaattaagcaacaaacccactgccaaagcgctgcctcgcgaagtgtccgttgttattttccctgagatatcgacggcttagccagatatcgccattttcctcctgtgcccgaccattccggtacggaaggacgatgtgtcatgcgaggggtccagtcattgctccgcaacgcgcccgcgaaaatcggccgccgtcttgcgcagatcgtcgcgatcgccgctgccagcctgccgcaggccggcgcgtagttttccactgctcgcgaggcgccgcagccgcgcgcgccccgaattcactctctccgatcttgcgtcagtgctagcgtgtggtcttccggctcttccggtccagcggggagggttccatgtcacgcttcgtcgttcatttcatgaaggacgtgctcggcggcaatggccgccagcgcgaggtctgccagggcgcactcgagatcgacgccttgagcgaaggtcaggccaccgagatggccaaggtcaaattctgccaggaacaatcgttgtgcgactggtccctgcacgccgaccgcatccgaatcgaggcggccgacttgcagatgacgtaacgcgcgcgcctatcgccgcttactccggcaggatgcgaaccgcacccttggccgcgctgctcgcgaacgccgcataggccttcagcgcagtcgagacggcgcgcttgcgcggcgcggccggcctccatgccgcgctgcccttggcctccatcgcggcacgacgccgcttgagttcggcatcgtcgaccttgaggttgaccttgcggttcgggatgtcgaactcgatgatgtcgccttcctcgaccagcccgatcaggccgccttcggcggcttccggcgagacgtggccgatcgacaggccggacgatccgccggagaagcgaccgtcggtgatcaacgcgcaggcctttccgagccccttcgatttcagatagctggtcggatacagcatctcctgcatgcccgggccgccgcgcgggccttcatagcggatcagcacgacatcgccggccttcaccttgttggtgaggatggcttcgaccgaggcgtcctggctctcgaagatgcgggcgggacctgagaatttcaggatgctctggtcgacgccggcggtcttcacgatgcagccgtcttccgcaagattgccgaacagcacggcgaggccgccgtccttggaataggcatgcgcggcgttgcggatgacgcccgtttcacgatccacatcgacctcgtcgaagcggcggtcctggctgaaggcttcctgggtcggcacgccgccaggtgctgcccgatagaaattgcgcaccttgtcgctcgatgtccgcaccacgtcccagcggttcagcgcgtcgtccagcgtcgcggcatgcacggtcgggccgtcggtcgtgagcagcttggcgcggtcgagctcgccgaggatcgccatgatgccgccggcgtgatgcacgtcctccatgtggacgtcctgcaccgagggcgcgaccttgcacagcaccggtaccttgcgcgagagacggtcgatgtccgccatcgtgaacggcacctcgccctcgcgcgcggcggcgagcagatgcagcacggtgttggtcgagccgcccatcgcgatgtcgagcgtcatcgcgttctcgaacgacttgaagttcgcgatgttgcgcggcagcaccttggcgtcgtcctgctcgtaatagcggcgggcgagatcgacgatcagatggccggcctcgacgaacaggctcttgcggtcggcatgcgtcgccagcacggagccgttgccgggcagcgcgaggccaagcgcctcggtcaggcagttcatcgaattcgcggtgaacatgcccgagcaggagccgcaggtcgggcaggccgagcgctcgatcacctcgacctcttcgtcggtgacgttggaatcggccgccgccaccatcgcgtcgatcaggtcgaccgcgcgcttcttgcccttgagcaggatcttgcccgactccatcggaccgcccgagacgaacacggtcggtatgttgaggcgcagcgttgccatcagcatgccgggcgtgatcttgtcgcagttcgagatgcagaccatcgcgtcggcgcaatgcgcgttgaccatgtactcgacgctgtcggcgatcaattcacgcgagggcaggctgtagagcatgccgtcatggcccatcgcgatgccgtcatcgactgcaatcgtgttgaactccttcgccacgccgccggccttctcgatctcgcgcgcgacgagctggccgagattctgcagatggacatgcccgggcacgaactgggtgaaggaattcaccaccgcgatgatcggcttgccgaaatcttcgttcttcatgccggtggcgcgccagaggccgcgagcacccgccatgttgcggccgtgggtggtggtgcgggagcgataggcgggcatcataaatccttgggctatggccattttttaagggagatggcagcccttatgcccgcccatggatgcggattcaagcgcggaaccgcatggctgaaccccgcaattcgggcaatgccgggcggtcggcttgatctcgggcggcgcggtgcattaggtggacgcgccgggaagccggacacgagacaacgaacaagaaacaacgaaaagggagtgacacgtggcaaggctgcccctgattgatccggataccaccggcggcgacatccgcgcggcgttcgaccgcatgccggtcaagctcaatatcttccgcatgatggcccatgccgaagccaatgcgattccgctgatgcggctcggcaattcgatcctgcacaagcagaaactgtccgcggtcaaccgcgagctcttgatcctgcaggctgcgcagctcgagggcggcgcctatgagtggcgccagcacgtcccgatcgcgctcggcgtcggcgtcacccaggcgcagatcgatgcggtcgagcgcggcctttacgacgatgccgcgctcaacgccgccgaacgcgcgctgcttaccttcggccgcgaggtggtcgagaaggtgcgggtcggcgatgcggcctttgccggcgttcgcaagcacttcagcgagcaggagatcgtcgaggcgatcatagctctcggcttctacatgatgatggcgcggctgacggaggcgaccgagaccgatctcgatccggccgccggcatggcggtctatgagggcggcaagaagcggggttgatgggatgtcggagacttcacaagacaccaagccagagcgctatatccgtccgctgagcgcggaatcctccggcactgcgccgggcaggggacgcctcgacggtcgccgcattctggtggtcggcggcggccagcgcgtgttcgatgcggcgaccgatccgatcggcaacggccgcgccatgagcctgctgttcgcgcgcgagggggcgcaggtcgcggtcgcagacctcaaccgcgcctccgccgacgacacagttgcgcggatcgccgctgacggcggccgcggctccgccatcgcggccgacgtcaccaaggaagccgacgtcatcaggatgattgatgaagctcatcacgcgatgggcgggctcgacggcatggtgctcaacatcggcaccttcggcaagaccgggctcgacaatgtcagcgccgaagaatggaacaggatctacgacgtcaatgtccgcggtcccatgctgtgctgccgtgccgccctgccgaaattcgaagacggcggctcgatcgtcttcatctcctcgatcgcggcgctgaaggcgggatcgcagatggcggtctacgattcctccaaggcggcgctcggcggcctgatgcgcaacatcgcgcataccggcgcgcggcgcggcatccgcgccaatctggtctatccgggactggtggacacgccgaacggccgcgaggccggcgccggccggccgtcgcgcggcaagagccaggtcccgttcggccgtcaggcgacggcctgggagatcgcctatgcggtgttgttcttcatgtcggatgaaagcgtctatgtcactgcccagacgctcgcggtggatagcgggctgagtggaatgtagccgatcggatcaggtcgaacagcgccacgacggcgctgcgctccttcgccccgttcttacgggatcgagacaagccaagcttgctcttagggggtggggtgaggggctgtctccgcgcagacggtagcaactcaacccgcggcgactccccctcacccgcatcgcatcttcgatgcgatgcgacctctccccgcaggcgaggcgaggtgaagtgcagcgcatcgctattcggcggcgatgctggtggaaatcgcaagcgccaccttcgggccggtcttcgccgcgcggcggttcttcttggcgaagcgactgccggccaagagcgcggcggcggcgcggagttgctcgcgcagccattgattggtggtgtcgccctcggcggtggcgtgccagtagagataattgacgtgcgggctgatcgggaacgggcaggggaagcactgcaacagcccggggtcctccagcacggaagctgcgctttccgacgccgtcagcagcatgttgctgcggctcacgacatggcaggcggtcgcgaaattctggcaggtcaggcggacggtgcgcgtcaggccgaggcgctgcagctggaaatcctcaaacgacacgccgctgcgccgcgacgtcacgcagacatgctccatgcgcaaataggccttcttgtcgagccgcgcgcggagctcgggatggccgcgccgggcgaacacggcgatatgctcggtcaggatctgctcgcgccgtacctcggtcgacagcggcagcagcgtgtcgatcgcgacatcgagcgtgccggcagcgagttcccgctccagattgttgcgctcgctgcgcacggtggcgatctcgaccaatggcgcgaccgcgctgatccggttgaccagcgcgctcagcatcggcgcctcgagattgttgcgcagcccgatcacgaagcgcttcggcgtcttcgccggatcgaagcggttggtgtgggtcagcgtcgtctcgaggccgttgagcgcttggcgcaccgtggtgatgatctggcgtgccagcggcgtcggcgtcatcacgtggtggcggcgcacgaacagcggatcgttgaacatggcgcgcagccggctcagcgcgtggctcaccgcgggctgcgtcaggttgaggcggaagcaggcgcggctgacgccgccctcggtgtaaaccgcgtcgaacacgacgaacaggttcagatcgatatcgcgcacatgcatggaaataatcaatccgtatccgtcgaatgcatttgacgaatatgagttggcactcttaaagtctcaagcaaaataatatctggaggaaacgatgagcgtgcaatcgccatcgcgcggcgttgctgtccctgtggcatcatctcgctcgggctcaatgttcgcaaagccgagccaggagcagatcgtgctcctgatcacgatcgcgcttctggtcgtattcggcctgaccctgaacggtttcgccaccgtctccaacctgctcaatctgttgcgcagtatttccatcctcggcgtgctcggcctcggcatggggctgatcgtgatcagccgcggcatcgacctctccgaggtcgcgatcatggcgggttcctgggcgatcgcgctgatctatatgcagaacgggatgccggttttcaccgcagtgctgctggcgctggcaatcgcggtgctgatcggcgtcgtcaacggcgtgatggtcgccttcgtcgaggctccggcgctgttcgtgacgctcgccgcaggtttcgtgatctacggcctcgcgttctggatcgcgccagcctgggtggtctacgcgccgaaggacgcgccgggcctgatgtatctcggcgccggacggctgttcggcatcccggttccaatcctggtgttcgcggcctgtgcgattgcgatgcatttgttcctgtcgcgcacctcggtcggccgcttcatctatgcgcagggcgacaatccggaagccgcgcggctgaccggcattccgctgcggccgctgatcgtgctcgagcacgtgctggttgcagtgctcgcctggattgcaggcctggtctgggtcggcacgacaggcagcatgcagatggcgatcacgcaggggaccatgatcttcgacgtcgtgctggtcgtcgtgatcggcggcatcagcctgatcggcggccgcggcagcgtgttcagcgtcgtggtcggctgcgtcctgatcggcacgctgctcaacgccttcaccatcatggacgtcaacagcgaggtgcagaacatcatcaagggcgtggtgctgctggccgcgatcgtgctcgacaactggctgcatccccgcgacgaggagaccgcgcggcaaggggactgaaacaaggcgattgaaccaaggcgactagcgcttcgcgccaatcaaaacaaatccaaatcaatcaaaagcattttcttgtggaggagacgatgaagacgacgaagttctggacgatcctgctcgccggcgtggcggttgccgcgatgccgttcgcggcatcggcgcaggaggaaggcaccaaggccgggcgcgaattgcgcgccgcctacgacaagtcgctgcagggcaagaccgtcgcctatctgccgatcgcgctcggcgtgccgttgtcggatgaatggggccgcgtggtgcaggaagaggccgagtggcgcggcatgaaatatgtcgtgcgcgatcccaacaacaatccgtccgccatgcagcaggcgctgaccgcgctggtcgaccagaagcccgatgtcctgatcgtgcagaacccgagcgtgacgctgctgatgaaggatctcaagcgcgccgaggcccagggcacgcatgtgatccaggtcaacatggcctcgaactacaagtccggcgccttcgtcggcgtcgactggcgtgagatcggccgaatgctcgccaacgaagccgtcaaggcctgcggcaccggctccggcaagtcgggcaaggtgcagatcgtgcagggcgaattgaccgcggccgccagcgtcgaccaggtcggcgccatcatggacgtcctgaacaaggatcccaacatcaaggtggtgtcgaaccaggcggcgaactgggacgccaacaccgcgctcaacatcaccgcgaccgtgatccagcagcatcccgatctctgtgcctcgatcggcttctggggcatcatggaatcgggcgccgcgcaggcgatccgcaatgccggcaagatcgacgacgtcaaggtgttcgcctcgggcgagggctcgcagctcgattgcgaccaggtcacgtcaggcaatttcagcaagttcctgagctacaaggcgaccgagcagggccacgatctgatgttcgcggccgagacgctgctgatgtccggcgacaagcccggcaccaagaacctgtcctattacacgcggccgatctggatcgataagtcgaacgcctcgctcggcggcacctgtttcgcgctacccaagaaaaactaacaaggcgcgaggcagccggcgcggggggcattcccgcgccggctgtatcaaggatcagaatccggacacgtgaaaccggatcgagggagtgctttgacgatgtcgatggccgttgattcctttgccgcatcggtgcggcggttctcaccccggctcctgctgtcggagctgctgctgaaacagtggttcgagccggtcgttccgttcaccgtgatgatcgggctgtgggcctatttcgcgctcaccattcccgactacgcctcggtgcagaattcggtgtcgctgctgcggctgttcgccgaattcggcttcgtcgcgctggcgatgggattctgcctcgtcaccggcggcatcgatctgtcggtcggcgcgatcttcgcgctgtgcaatttcgccgcgctgtatttcctcctggtgcgcgaatggccggtcggccttgcggtgccggcgacgcttttggtcggcgcgctgctcggcagcatcaacggcttcctgatcggattcctcaagacccggccgttcctgaccacgctggtgacgctgatcatcctgcgcgcctcggtcaatttgctcaacaccagctatgcccaggtgttcgcgaccaactcggtcgagagcgacgcctgggacttcatcggcggcggcagcgtgctcggcattcccgtcaatgcggcgacgctgttcgtggtgctgctgatctgccacatcttcctgtcgcgctcgcgctatggctggcatctcaccgcgatcggcgccagtcgcaaggcggcacgtcatgccggcatccgggttcgcttgatgctgttcatgacctatgtgctgtcgggcacgctgtgcgcggcaagcggcatcttctatgcggcacggcaggcctcgacggattccaccaccggtgtggggtgggaattccaggcgctcaccgccgtggtgctcggcggcgtgtcgctggccggcggcaagggcacggtatggcgggcgatgatcggcgcgctgatcatcttcctcctgatcaacggcctcgtgcgcatgggcatcccgggctacgtcacctcggcggtgaccggcatgatcctgctcgccgccgtcggcatcgacgtcaaatggtcgaagaaccgcggcaaggcgatccagaagatctatgtcaatccggccttcgtgccgctggcctcggcgccggctgtgcagccgggcgcagcatcgccctatgcgcagaacgaccggctgatcaacgcgcaggcgatcggcgtcgatcaggtcgagggccccgaggacgtcatcctcgaccgccagggccggctctacggctcgacccgcgacggcaatgtgatccgcttctccgggcccgacttcaagacccgcgaggtgtttgcccatatcggcggccggccgctcggcatgcagttcgatcgcgacgagaacctgatcgtcgcggtggcgggcatgggcgtgtacggcgtcgcgcccgacggccgcatcttcaaggtcaccgacgagaccaaccgcacctggtacaagctgaacgacgactcgcgcctgcgcatggccgatgacctcgacatcgcgcccgacggcaagatctatttcagcgactgcaccacgcgctacgagatgaccaccaacaccctcgacatcctcgagggccggccgaacggccgcgtggtctgctacgatccggcgaccaagaccacgcgcaccgtgatcaaccacttctatttcccgaacgggatctgcgtctcgcatgacggcaagtcgatcctgatcgcgtcgacctcgctgtgcaaggtgttccggcactggatcgacgggccgaacaagggcaagaccgaagtgctgatggacgagttgccgggcaatcccgacaacatcaaccgcgcctccgacggcacctactggctggcgctggtcggcatccgcaccccgaccttcgaccttgccgcgcgaaaacccggcttccgcctgcgcatggtcaagcaggtgccgaccgacgaatggctggcgcccgcgctgaaccatggctgcgtgctgaagttcaacgagaagggcgaggcgctggaatcgtggtgggatccgaccggcatctcgcattcgaccttgacctcgatgcgcgagcaccagggctatctctatctcggcggcctcgagaacaaccggatcggccgcatcaagctcgacggcgtcgacgacagctggaccggctacgacgcctattggggcgccaaaagcagggtgacgacataatgggattcttcgatcatctgctgcgcgatatccgcagcgtcatcgaccgcgacggcggccagaacgcgatcccgccgctcgacggcgcgctcagcccgaacgaccggctcgataccgccgtgccgatcggcgagccgctgccgggcgtcgacgacgtgatcgccgccggcgatggcgcgatctatgtctccgccggccgacaagtgctgaagctcagcggcagcgatttcgcgacgcgcgcgattgtcgccgaattcgaggatgatgccggcgggcttgcgctgcatccggacggccggcttctggtctgcgtcgcgggcaggggccttgccgcgatcgatcccgccaagcccgcgccgcgctggctggagtcggccggcggcagcgcgctcgtcgggctgttgtcggtcacggcggcgcccgatggtcgcatctatgccgtcgaaggcagtgccggccgtcgcccgagcgagtggcggcacgatctgatggagaagcgcgccaatggccgcctgatcagctgcggcgccgggctcgacaatccgcaggtgctgttgcgcgacctgccatatccctacggggtgatggtgtcggccgacggcaacagcctgtggctcaccgagagctgggcgcatggcctcagccgcttcgcgcttggcggcagcgggcttggtccgcgcgagaccgtcgccgccaacatgccgggctatccggcgcggctgcatccggacggccatggtgggttcctgctcggcatgttcgcgcgccgcacccatctgatcgagttcgtgctcaaggaagacgatttccgcgaggagatgatggcgacgatgccgcccgaatactgggtggcgccggcgctggtcggcggcagcgattgcctggagccgatgcagatcggcagcgtcaaggcgctcggcatccagaagccatgggcgccgccgcgctcctacggcctcttggtgcatctcgatgccgaaggcgaggccagcgacagcctgcacagtcgcgccggcggccgcttccacggcatcaccgccgcctgtgcggtgccgtccggcatcgtcatcgccgcgcgcggcgcgggacggctgctgcgctatacgggagagctgcgatgaatgacggcgtgatgcaggcggcgaccgcgaccccctccgcagcccgcgagccggtgctgcggatcagcaacggctccaagatctatggcggcgttcacgccatcgagggtgtcaatttcgatctctatcccggcgaggtgcatgcgctggtcggcgagaacggcgccggcaagtccacgctgtgcaaggcgatcgcgggcgcgatcaatctcacctccggcgattatctgctcgacggcaagccggccaatttcgagcagccgcgcgacgcgctcgatgccggcatctgcatggtctaccaggagaccagcctggtgccgaccatgaccgcggcgcagaacatcgagctcggcaacgagaagctgttgacgcgcttccgcacgctgaacatccaggcccagcagctgttgcagtcgctgaatttccacgtcgatccggcgaccccggtggcgctgctcggcaccgccaagaagcagatggtggagatcgcgcgcgcgatctacaacaaggcgcgcatcatcatcttcgacgagccgaccgcctcgctgacgccggaggagatcgtccacttcttccatttggtgcgcgacctgcgcgcccgcggcgtctccatcatctacatctcgcatgcgctggaggaatcgctgcagatcgccgaccgcatcaccgtgctgcgcgacggcaagctggtgatcacggcgcccgccaaagaactcacccgcgacgcgctggtgcagcacatggtcggccgcgaggtggcgcaggcggtctatggcggcaaggccaagacccatcagcgccgtgagaaggtgctgacggtcgagaacgtcaccatgggcatggcggtcaagaacatgtcgttctcggtctatgccggcgaggtggtcggcatcgccggcctgatcggctccggccgcaccgagatcgccaagatcgtctacggcgcgctgaagcgcaatctggtcaatggcggcaccataaggctgcgcggcaagccgatccgctaccgcgtgccgcggcaggcgatcaatgacggcatcgcctacatcaccgaggaccgcaaggccaacggcttcttcgagaccatggtggtcgacgacaacgtctatctcggcagcctcgccacaaggaagggctggagcttgctgctgtcgcgtgcgaagcgcagcaagctcgccagttactgggtcgaccggctcaagatcagcgcattgcagcgcaaggcgcggatcatcgagctgtccggcggcaaccagcagaaggtggtgctggccaagacgctggtgcaggagccgtcgatcatcttcttcgacgagccgacgcgcggcgtcgacgtcggcacgatcccgcacatccacggcgaaatccgccggctcgccgacgagggcaaggcggtggtggtgatctcgtcttacctgccggagatcctcgccgtctccgaccgcatcctggtcgcccgcaccggccgcatcgtcgccgagttcgacgccgcggacgcgacccaggacaagatcctgtacgccgcggtgcattgagggccgcgacgcgcggcctgttctctccccatcgtcattccccggtgcgcaattgcgcacctgagggctcgcgaagcgaggacccggaatctatttcgccgccattggtgcggcctgatggattccgggctcgacgctttgcgtcgccccggaatgacggagttgaccgggccgagccggcccttgacaaatattttaagtataaaataatatgccgtaccggctagcgggaagaacctgccccagccgccgaagccaacgggagaacgccatgcgcatcgtttgcattggaggcgggccggccgggctttatttcggcatcctgatgaagatgctggatccctcgcacgtgatctcggtggtcgagcgcaaccggccctacgacacgttcggcttcggcgtggtgttttccgatgcgaccatggacaacatgcgcaaatgggacccggtcacatcagacacgatcgagcaggccttcaaccactgggacgacatcgaggtcctgatcaagggccggcggatgcgcaccaccgggcacggcttcgtcggcatcggccgcaagcggctgctcaacatcctgcaggcgcgggccgaggagctcggcgtcgaactgatcttcgagcgcgaggtcaattccgatctcgaattccccgatgccgacctgatcgtggcgtgcgacggcgtgaactcgaagatccgcgccaaatacaccgaggcgttccagcccgacatgctgatgcggccgaaccgctatatctggctcggcaccaaccgcccgttcgacgccttcactttcgatttccgcaagaccgagcacggctggttccaggcgcacatctacaagttcgaggagggcgcggcgaccttcatcgtcgagaccaccgaggaagcgtatctcgcccacggcctcgacaagatggagcagggggagtcgatcgcgttctgcgagaacgtattcgccgaaatcctcgagggtcatcatctggtttccaacgcgcggcatctgcgcggttcggcctggctgtcgttcccgcggctgatctgcggcaagtggactgcgttcaacggcaacagccatgtcgtgctgatgggcgatgccgcccataccgcgcatttcgcgatcggctcgggcaccaagctcgcgttggaggacgcgatcgagctcaccaaccagttcaagatccacggcgcgaccaaggacagcatccccgcggtgctgaaggcatacgaggaactgcgccgcgtcgatgtggcgcggatccagaatgccgcgcgcaacgcgatggaatggttcgaggtggtcggctcgcgctatgccgatacgctggagccggagcagttcatgtactcgctgctgacccgctcgcagcggatcagccacgagaatttgcggctgcgcgacaagacctggctcgagggctatgagcgctggttcgccgagcgtagtggcgtgcctgccaccaacgaccgcgtcacgccgccgatgctgacgccgttccacatccgcggcctgtcgctgcacaaccgcatcatcgtttcgccgatggcgatgtattcagcggaagagggcgtgccgaacgatttccacctcgtgcatttcggctcccgcgcgctcggcggcgccggtctcctgttcaccgagatgacctgcgtctcgccggaagcgcggatcacgcccggctgctgcgggctgtggaacgatgagcaggcggcggcatacaagcggatcgtcgacttcgtgcatcgcaattcggaagcgaagatcggcattcagctcggccatgctggccgcaagggctcgacccgcgtcgcctgggagggcatggacgaaccgctgccggaccacaactggctactggtgtcggcctcgccggtgccttatctgcccgacggccagatcccggagccgatgagccgcgccgagatggatgaggtgcgcgaccagttcgttgccgccgcccggcgcgccgcaagcgcgggcttcgatattctggagctgcactgcgcccacggctatctgctgtcgagcttcctctcgccgctgaccaaccgccgcaccgacgagtatggcggatcgatcgagaactgcgcgcgttatccgctggaggtgttccgtgccatccgtgcggtgtggccggaggacaagccgatgtcggtccgcctgtcctgtcacgactgggccgagggcggcaacacgccggaggatgcgctggcctttgcaaagctgttcaaggcggcgggcgccgacctgatcgattgctcgtccggccaggtctgggccgacgaccatccgatctatggccggctctaccagacgccgttcgccgacaagatccgcaacgaggtcggcatcgccaccatcgcggtcggcgcgatctcggaggccgaccacgccaactcgatcatcgccgccggccgcgccgatctctgcgccatcgcgcggccgcacctcgccgatccggcctggacgctgcacgaggccgccaagatcggcatcaagcagatcgcctggccgaaacagtatctgtcgggcaagtcgcaatacgaggccaatctcgaacgcgcggccgccggagggaaggcatgatgagcttctggcccaacgcacatgcgctggtcacgggcgccgggtccggcatcggtgctgccacggcgattgcactggcgaacgccggggtacgtgtcagcattgcggggcgtcggatcgatgcgctgaaggcgaccgcggcggcgctcggcaagcacgccggcgccgtcgtgtcgatcgacgtgaccggtgaggctgcggtgaccaaaggtatcgcgcagatcgcggccgaggcgggtccgatcgatatcctcgtcaacaatgccggcaaggccggcagcgcgccgttcgacaagacgggtgcggcgctatgggcggatatgctggcgagcaacctttccagcgtgttcctggtgacgcaggccgtgctgcccgacatggcgcagcgcggccgcggccgcgtgatcaacgtggcttcgaccgcgggcctcaccggctacgcttacgtctcggcctatgtcgcggccaagcacggcgtcgttggcctgacccgttcgctggcgctggaatatgcccggcgcggcgtcaccgtgaacgcggtctgccccggctataccgatacgccactggtggcggatgccacggccaacatcgtcgccaagaccggccgcagcgagcaggaggcgcgggccgcgctcgcaaaagtcaatccgatgcagcggcttgtgacgccggaggaagtcgccgacgccatcctctggctcgcctccgagggcgcatcgtcaatcaacggacaagccgtggcggttgccggcggcgaggtctttaccgggtgaaggaagaaatcatgtccgagatgaaagcaaagctccgtccgttcaaggattatcccgcgaagcacttccgctggtcgaccgatgccagcggccgggtcgcgaccatcacgttgaaccggccggacaagaagaatccgctgacattcgaatcctacgaggagctgcgcgacctcttcaccaacctcaaatacgcttccgacgttcgcgccatcgtgctgaccggcgccgagggcaatttctgctccggcggcgacgtgttcgagatcatcgcgccgttgacgcggatggcgatgccggacctgctcgccttcacccggatgaccggcgaggtggtgcgtgcgatgcgcaaatgcccgcagatcatcgtcgccgcgatcgacggcatctgcgccggtgccggtgcgatgctggcgctggcgtccgacctcaggctggcgacaccgcaggccaagaccgcattcctgttcacccgcgtcggccttgccggcgccgacatgggtgcctgcgggctgctgccgcgggtgatcgggcagggtcatgccgccgatctgctctacaccggccgcgcgatgagcgccgacgaaggttttgcatggggcttccacaaccgcctggtgccagcggccgagctcgccgccgcggcgcatgagatggcgcgctcgctcgcggatggaccgtggttcgcgcacggcgtgacgaaaacgatgttcaaccaggaatgggcgatgggcgtcgacgagatgatcgagtccgaagcgcaggcgcaggcgatctgcatggtgaccggcgatttccgccgcgccttcgaggccttcgccgccaagcagaaacccgccttcgagggcaattgagatgatcgagatcctgcagccggatggatgggccaagccgatcggctacgccaacggcatggccgcgcgcggcaagcagctcttcatcgccggccagatcggctggaacgggcaatgcgtgttcgagaccgacgatctcgtggcacagatcggccagaccctgcgcaacatcacagccgtcgccgccgccggcggggcaaggcccgagcacatcgtgtcgatgacctggttcctgctcgaccggaaggaatattccgcgcggctgaaggagatcggcgcggtctatcgcgacgtcatcggccggcattttccggcgatgaccgcgatccaggttgccggcctgatcgaggatcgcgccaaggtagaaatccaggccatcgcggtggtgccggattaacggaggcgcaatcctgttggtcccgtcatcctgagctgcgagccttgcggcgcaattgcgccgctgggcgagcctcgaaggatgcacggcccggccggtggccgtcgacccttcgagacgccgctccgccgctcctccagcggcaaaggcgaagcctttgcgcgggggtgacggatttagaagagagtatgctgagccgctgttaatcctaaggcgagacggcaaggattcgacgaaagtggggacgacaaactggcttgcggccgcacaagcgggcgtgcgaccctagaccaaagcgtaaaacgtcctgtgtgagtggagtaaggacgatgaaggcgattatcgtcggaggcggaatcggtggtctcaccacagcgctgatgctgcgcgcgcgcggcatcgcttgcgagctgtacgagcagtcggagacgatccgggagctcggcgtcggcatcaacaccttgccgcatgcgatccgcgagctggcagggctcggcctgctcgacaggctcgacgacgtcgcgatccgtacctcagagctgttctatctgacgcggcatggccagcaggtctggcatgagaagcgcgggctcgatgccggccacgacgtgccgcaattttcgatccatcgcggccgcctgcaaagcgtgatccaccaggcggtgatcgaccgtctcggcgccgatgcgatccgcaccggttgccggctcggctccttcacgcaggatgaaggcggggtctcggcctatttcttcgatcgcagcggcgcccatgtgcacactgcgcgcggtgacatcctgatcggcgccgacggcatccactccaaggtgcgcgagacgctgttcccgggcgagggcgggccgtgctggaacgggctgatgctgtggcgcggcgctaccgactggccggccttcctgaccggacgctcgatgatcatcgccggcgggctgaacgccaaggccgtgatctacccgatcgcgccgggctcgagcccggcaagccggctcaccaactgggcggtgctggtgcggatcggcgacggctcctcgccgccgccgcgccgcgagggctggtccaatctcggccggcgcgaggagatgatgccctatgtcgcgagcttcacgattccgcaggtcgatttcaccggcctgatcaacgcgacgccggagttctgggagtatccgtgctgcgaccgcgatccgctgccgtattggtcgagcggacgggtcacgctgctcggcgacgccgcgcatccgatgtacccggtcggctcgaacggcgcgtcgcaggccattctcgatgcgcgatgcctcgccgacatgctggcgcgatccgagcatccgcgccaggcgctcgcggcctatgagcggcagcggctgccgatgaccgccgacatcgtcgcctccaaccgccgcggcgggccggagggtgtgatcgacgccgtcgagcagctcgcgccgcagggctttaccgacgtcgacaccatcctcaattacgaggcgcgcgaggcgatcgtgcgcggctacgcggccaaggccggcttcgccgcccgcgtggtggcgcggcagtaggagtaacgatcgcctcgcgcgccacaaattcggtgtcgtccctgcgaaagcaaggacccataaccaccaatgttcgtcatttcgcaacgctggaatgacgaatcccgttcacaacatccgccgcggcgtatgggtccctgctttcgcagggacgacatctttatgcggctaggctgcctgcaattagggaagtgtcctacgccggaggcggcggcaggaagtggatgttgtgctcggcggcgagccgcaccacgtcatccgggttctgctccttcatgttgtggatcgcccagaacagatcgtagagccggcgggtcggcgacacccagaacagcgtcttggcagtttgctgcgacttgttgaagatgccgtgcggcttgcccatcggcaggcgtaccaggtcgccgggcgtggcggattcgtcggcaccgtcgagcatgaagtcgagctttccctccaggatgtagagatactcgtcctggtcgggatggatgtgcggaggcacgaaggtgcccggcgggaaggtggcgtgccaggagaacgaatgctcggtgcggctcttcggcacgtaggtctggccgaggatgctccaggaaatgccctgcatgccttcattggcgcgggtgatgccggcgatctcgtctttcgtcatgtttccctctcttttgtttgaggcgctttcatcacgcgaaccggtgtccacttcgcttgaaaacgctttgtgtcttacttcgcggcgcagtccttggcgtagcggtcgccatagttcgagaacaccttttcgacaatctcggtctggaatttgccgtcgggccgcttcgcgaccttggtgagatagaaatcctggatcggatagccgttgttgttgaacttgaagttaccgcgcagcgaggtgaagtcggccttcttcagtgccgccgcgaccgcctccttgttggagaggtcgcccttcaccgccttgaccgcgctgtcgatcaacagcgccgcgtcataggcctgcatggcataggtaccgggcacgccgttgtatgcggcctcataggcggcgacgaatttcttgctctgcggattgtcgaggtcaggtgcccagttcgcgccgccgaacatgccgaccgcggcgtcctgctgcgcaggcagggtggattcgtcgacggtgaaggcggagagcaccggcacggtggcgccggcctgcttgtattgcttcacgaggttcacgcccatgccgccgggcatgaaggtgaacagcgcgtccggcttctgcgcggcgatcttggacaattcgggctggaaatccagtgtgttcagcggcgtgtaggattcctctgttatctcacccttgtagtcgagcttgaagccggcgacggagtcgcggccggcctgatagttcggcaccagcaaatagacgcgcttgtagccgcggtcctgcgccaccttgccgaggatctcgtgcacctggtcgttctggtacgacgtcacatagaagaacgggttgcactccttgccggcaaagctcgaggggccggcattcgggctgatcaggaaggtcttactgtcggtgaccgggcggtggatcgccagcaggatgttggagaagatcgggccgaccacgaaatcgaccttgtcgcgctcgagcaggccgcgcaccttgaccaccgcagcgtcgggcttgagctcgtcgtcggcgttgacgatctcgacatcccggccggccatcttgccgccaaggtccttgaccgcgagtgcaaagccgtcgcggacctgctggcccagcgccgcggcaggtcccgaggtcgtaaccagcacgccgatcttgatcttttcctgcgctgccgccgggctcgccgcgattcccagcagcgccgccaatcccgcgagtcttgtcagttgcttcatgtcactcccccaaagcattgtcttgatgcctttccagcttggccgcagcttagtctggcgcgtgcgaccgctgcaagcgatgtggcatcgcgtcaggttaccggttgcgcgggcgctgtcgcgcgccatgcaagcgccgcgccaattgcttgaagtttaaagaaattgcagaattgcctcggtgcatcgggccggattcgctattgtccttgcaggacaccgcgaattgcttgaagctcaaagcaatcggtccgaccgaaacccgccgcggaggcatgatcgcagcatgatcctcgattccgaaaccaaggccgtcgagctgcccgacgatcacggcaccgagctcaggctgtggctgaggctgttgacctgcaccacgctgatcgaaggcgaggtgcgcagccgcctgcgcgagaaattcgacgtcacgctgccgcgtttcgacctgatggcccagctcgacaaggtgccggacggcatgacgctgtcggacctgtcgaagcggatgatggtgtcgaacggcaacgtcaccgggctggtcgagcgcctggttgaatcgggccatctcgatcgccgcacctcggagaccgaccgccgcgtgcagttcatccggctgaccaagaccggccgggccgagttccgcaagatggcggccgaacacgagaaatggatcgccgatgtcttcggcgacctctcgccgaaggatatccgcgagctgatgcggctgctcgccaaggccaagggctcggcgcagcgctcggccaaggcgcggaccgcgtaacgccgtggccgggatcgattacgaagtcgaatacaacaaccgggcgcgggtgctggaaaacccggcgatcatggccggctgggcgcgggactccgcggcgtaccgcgagcagcatccgccgcggcgtctgagctatggtccgggcgagcgcaacttcatcgacctgttcgagggcgatcgtgatgggcctctcgtcgtgttcatccacggcggctactggcaggcgctcgacggctcgtcgtcgagccattgcgcgcgcggcctcaatggccacggcatcagcgtcgcggtgccgagctacgatctgtgccccaatgtctcggtcggcgacatcatcggcgagatgcgtgcggcgtgccgcgaactggcgaagctcggccggcagctggtcgtgtcgggacattctgccggcggacaccttgccgcatgcatgctggcgaccgattggcccgcctgtgatgcgtcgttgccgaagaacctggtcagggctgcttacgcgatatcaggcctgttcgagctcgagccgctggtcggcacctccatcaacaaggcgctcggcctcgatcgcgacgcagcaagggcggcgagcccgctgctctggaaagcacctgccggcacgacgcttgatgcggtggttggtggcgccgagagcgccgaatatcaccggcagagccggaccatcgccgatgtctggggcggcgcgggcgttgccacgcggttcggcatcgtgcccgacgccaatcatttcaccgcgatcgcgccgctcgccgacccggcgtcggacatggtcgcgcggttgaagcagctcacgcagatctgaggctctgagggatcgccggcgacagccgagtgatttccacgcgacatctacccttgcgccaaattattttaagtataaaatgattggcgattggaacgctgccgggcgtccccgatatcagtcgtctcgacgttggtctttggcctttctggatggaaagcgaggggcaatcgaatgtcaggtgaatttcccgggctcggcccatccgggcatgtcgacgatttcgcgcggcgcaacctgccgccgtttcagcaatggccgcagctgctgctcgaccggccggaattcaaatatcccgactatctcaacgccgcggtcgaactgaccgaccggatcgtcgagcagggcatgggcgatcgtatcgcgctgatcggcaacggccggcagcgcacctacaaggaattgaccgattggtcgaaccgcctggcgcatgcgctggtggagaattacggcgtcaagcccggcaatcgcgtgctgatccgctcgggcaacaatccggcgctggtcgcggcctggctcgcggcgaccaaggccggcgccgtcgtcgtcaacaccatgccgatgctgcgcgccggcgaactgtccaagatcgtcgacaaggccgagatcgcgctggcgctgaccgacagccgcatcgccgacgagctggtggcttgcgccaagaccagcaaattcctcaagcaagtcgtcaatttcgacggcacctccaatcatgacgctgagctcgaccggatcgcgctgaacaagccggtcaagttcgatgcggtgaagaccggccgcgacgatgtcgcgctgctcggcttcacgtcgggcaccaccggcgaacccaaggcgacgatgcacttccaccgcgatctcctgatcgtcgctgatggttatgccagggaagtgctcgaggtgacgcccgacgacgtgttcgtcggctcgccgccgcttgccttcaccttcggcctcggcgggctcgcgatcttcccgctgcgcttcggcgccaccgcgacgctgctggagaacgcggcgccgagcgagatgatccggatcatcgagacctacaaggcgacgatctgcttcaccgcgccgaccgcctatcgggcgatgatggcggcgatggacaagggcgccgacctgtcgtcgctgcggctcgcggtctccgccggcgagacgctgccggcgccggtgttcgagagctggaccaggaagaccggcaagccgatcctcgacggcatcggcagcacggaattgctgcacatcttcatcaccaaccgcgccggcagcgccgtcgccggcaccacgggtacgcccgtgaccggctaccaggcgaagatcgtcgatgaggacatgaacgagctgccggcggggcaggtcggcaagctggcggtgcgcggcccgaccggctgccgctatctcgccgacgccagacaaacgaagtatgtccgcgacggctggaacatcaccggcgatgccttcgtcagcgacgaaaacggccggctgtcgttcgtggcgcgcgccgacgacatgatcatctcggcgggctacaacatcgccggtcccgaggtcgaggcggcgctgctcggccatcccgatgtcgccgagtgtgccgtgatcggcgcgcccgacgaggagcggggacagatcgtctcggccttcatcgtactgaagcagggcgcgcgcagtgacgatgtcgaggtcaagctgctgcaggatcacgtcaaggcgacgatcgcgccgtacaaatatccccgcgcgatcgcttttgtcgaggcgttgccgaagacccagaccgggaagatccagcgcttcaagctgcgcgaggcgagctaaaaatcgggcgacggcttgaagccgtcgccccggacatcgtaatcaatgagatcaatgcgcgccggcgccgcccgccgcgctctttggcttgccggtcagaacgatcgcgatcgcagcgagcgccagcacgacgccgatcacggcgaaggcgtcactgaagccgagcaccagcgcctgacgcttcacgatgttgccgatcgccacgatcgcctggctgtgcgcggtggcggggtcggcgacgccgtggctgaggaagtagttggtgacctcggcgatccgggtccgcacctcgtcgcggccgagatgaacggactggccgatgatgttggagtggaactgctcgcgcttggtgacaatggtcgaaagcagcgcggtgccgatcgcgccgccgaggttgcgcatcatgttggagatgccggaggccgccggcgcatcctgcggcgcgacgctgccgaggctgatggcggacagtggcgccagcgtaatcgcctggccgaccgcgcgaacgatgttcggatagaagaactggtcgccagaatagtcgagcgacatctggatgttcatgaaggaggagaccgcgaacagcgccatgccggtgaacgcgatcagccgggcatcgaagcgctgcatcagcttcggcaccagcgggatcaggatcagctgcggcaggccggtccaggccagcacctggccgatctgctcggcattgtagcgctgcacctggccgagataggccggcagcagatagaccgagccgaacagcgcaaagccgacgaacaccgccgagatcgtgccgaagccgaagctgcgttgggtcagcagccgcagccggagcagcggcttctcgacgaccagctcgatccagatgaacagggtcaggctgaccgcggcgatcactgcgagcttgacgatgaagggcgagccgaaccagtcgtccttgttgccttcctccagcaccgcctgcagcgacgacaggccgaccgccatcgtgatgataccgagccagtcaccttcgcgcagcagatgcagctgcatcggctggcgctccagcgtgaaggagagggtggcgaccatgaccgcggttgggatcacgttgacgaagaagatggtctgccagccgtaattttcggtcaggtagccgccgatggtcgggccgatcgccggggcaaaggtcacagcgagcgcgaacatcgccagcccgatcggctgctgcaccttcggcagcttggtgaacaccagcgtgaaggccatcgggatcagcacgccgccgaagaagccctgcaggccgcgcatcgcgatcatcgatggcagatcgtgggtgaaggtacatgcgaccgagaaggccgcgaacagcgtggcgaaggtgatcatgatcttgcggaacgagaacacccggctgaggtagtcggtgagcgggatcaccacgatctcgccgatcagataggacgtcgagatccacgaaccgttgtcgacgccggttccgatgccgccctcgatgttgagcagcgaggcgttggtgatctggatgttgaggatcgccatgaaggcgccgatcatggccgccaggatcgagacccagacggtcacacttgcgcgattgggatctacggcggcgcggggcgcggcggcagaggaggagagcgcgaggtcggacatgacatcacctatttgaacgaggcgacagcgagcttcggcgtggctttggcttgcggagcctgctcggcaggatgtgaaagcgtcgcaatggaggggatcaccgacatgcccggccgcagatcgacattggttgcgtcgagcacgatcttcaccgggatgcgctgcaccaccttggtgaagttgccggtggcgttatccggcggcagcagtgcgaactcctggccactggccggtgccaggctgtcgacatggccgcgcacgacctggccggggaacatgtcgacctcgatctcgaccggctggcccttgcggacattggtgagctgcgtctccttgtagttcgcgatcacataggcgccggtggccggcaccagcgacatcaattgcgtgccggcctggacgaactggccggtgcgcagcgtgcggttgccgaccacgccgtcgatcggcgcagtgatggtggtgtagccaagattgagctcagcctggttttgcagggcggtggcccgtcccaacgccgcaaccgcctgggcgatctcggccttgagcagctccacctggcgctcggcggaagcgaggtttgcggtgtcgcgggcgatagcggcctgcgcgctggcgtagcgcgactgcgcctgctgcgcgttctgcacgctgccatagccggtgccggcgaggtcggtgtagcgcttgttctcctgctccgcgaaggtctgcgtcgcggtatccaccgcaagggtcgcgcgtgccgcttcgatcaccgagtgctgcacgtcgagctgggcacgcttgctggtgatcgcggcttcggcggcagcgacgtcggccttcgactgatcaagcgcgaccttgaaatcgcgctcgtcgatccgcgccaggatctgcccggcacgcacatgctcgttgtcgcccaccagcaccgcgctgagatagccggagaccttcggcgcgatcgtggtgttgtcggccttcacataggcgtcgtcggtcgagacctgaaagcggccgaccgtccagtaatcccagccgtaccagccgccgcccgcgagaacggcagcggccgcgccggcgaggaggaggcggcgaagcttgcccttggcggcagggggcttggccgtttccgggttggcgaccaattgcttggcggttgcggccggaaccgggctctcggccttgaaagacgtttcatgctggctcatggcagtggctcctggaagctctatatccctctgggaaaccttgcggatttcgctccaggtcgcctgggataattaggaaacttgatgttttccaaaatatcccccatatttggagtgtcaatagaatgacaggcatcatctaaaagcatggcttgccgatgaaccggaatgacaaagctcagactgagcagaacctggctgtgccggagcggcgcggccgcggccggccgcagctccgctccgacgacgagacgcgcgcgctgatctacgaggccgcgcggcgcgagttctccgagcgcggcttcgcggcggcaagcatcgccgacgtcgcctgccgcgccggcgtctccaccaagaccctctaccggctgatcccgaccaagctggcgctgttcgaaggcatggtgactgaccgggtcgaccggttcgtctccatcgtgaatctcggcgcctgcgacggccgcaacgtcgctgcagccctggagaccgccttgctgacctgcgccgagctcattctcgatgccgaggtcatcgccctgcaacggatcatcctggccgagagcgacaaattccccgacattgccgagacgttctacgagaaggcgatgcagcggaccatcgccgcactggcgagctggctcggcgtgcagcagcggcgcgggcggatcgtgctcgatgatgctgaggctgccgcaggcatgctgctcggcatgctcgtgttcaagccgcaacgcgacgtcatgttcgggcacaagcccgcgccactgcacagcgagatggaagcccgcgcgaaggcctgtgcggcactgttcctgtccggatgcgccgcgccggccgaccagatcaagaagagcggagaggcatgatgccggagccagccgcgctttggtcctgagcgggccgccttacttggctgctaccgctgctgcggggggctgcgtcagcacctggcggatcatccgggccagatcggccttgcgatacggcttcggcagcagcgtcacgtcggggtcgagacggccgtggtggatgatcgcgtcctcggtatagccggaggtgaacagcacgcgaaccgagggcagcttggcagtcacggcatcggcgacctgccggccgttcatgccgccggacatgatgacgtcggtgaacagcacgtcgcagacaaagcccttctcgacggcggccaaggcttcggggccgttggcggtgaccatggtgcggtagccgagctgctcgagctgggcgctgacgtagttgcgcaccagcggatcgtcctcgacgaccaggatggattcatggccgccgcgggtgtcgaccgccggcggcggttcgacatcaaccatgtcgcccatgctgcgcggcagatagagcttgatcgacgtgccatggccttcttcggaatagatcttgaggtggccgtctgactgcttgatgaagccgtacaccatgctcagcccgaggccggtgcccttgccggtgtccttggtggtgaagaacggctcgaacaccttgtcgcggatggccgcggggattccgccgccggtgtcgctgaccgcgaccatcacgtattcacccgcgcgcacatcggggttggccgcggcatagacctcgtcgaggatgacgttgctggtctccagcatcagcttgccgccgtcgggcatcgcatcgcgggcgttgacggcgagattgagcagtgcggtcgccatgtggttgggatcgatgaaggccggccaggcgtccggctcgagcgcggtatcgatctcgatctgctcgcccagcgacggacgcaggagccttgctgtgtcctgcaccagcgtattgagatcagcttcacgcggctgcagcggctgctgccgcgagaaggccagcagatgcttggtcacctcagcgccgcggaaggcggcgtcgctgatcattttcgtcaccgacgacagcgcggcgtcgtgctcgacggcttcggcgaggatgtcgatcaggccggtgatgacggtcaggatgttgttgaagtcatgggcaatgccgccggtgaggtggccgacggcctccatcttctgcacctggcgcagcttctgctcggcttcgagctgctcgcgggcgacctcgacctcgcgggcgcgcatgaagatctcggcttccatctgctcggtgcgctcgcgcagccggtcggtcagctcggcctgctcggcgccgcgctgcttcagctggatgaagctggtgacgtcttcgacccgatggatgatgtagatgaactgtccggtcggcccgaacaccggcgtgttgcgcgggctccagtacttttcctcgaatccgccgccctccgactcgggcttgcggatgtcatatttctgcaccgacatggtgtcgggacggcggaactggaccacgcgttcgagcgaggtgcgcaggttccgcacgccgtcggcggccggatcgtccggattgtcgggaaacatctcgaacaggttgcgcccgaggaccgctgcgcgctcggtcctggtggcacgcagataggcgtcgcttgctgccacgatacggaagtcgggctgggtcagcaccagatagaggccgggcgccgcctcgaataacgccttgaagtcaggcatcggcggggactgattttgcagttcatcctccctcgcagggatacggtccgccactgaccgcacccaagatgtggcacgcgtttgccggaacttcaatggttaacatacggtaccggctcgattttctcgatcgcgcatgcatcggggctagtgcgaattcggcaggtagcgccagccctccttgccgaggaagtccagcatcgcctgtgcgggcggcagcaggatcttgtcggtgcgccggatcgcatgccactgccggacgatcggcaggcccttcaccttgagcaccaccagccgaccgtcctccagctcgtggaacacggtgtgctgtgagatgaaggcgatgccgagcctggccatcaccgcctgcttgatggtctcgttgctgtccatcgccatgccgagcttcggctccagcccgacccgctcgaaatattgctgcatcagcatccgcgtgccggatccctgctcgcgggtgatgaaggtttcattggcgagctccggcggtgagacgtggcgccgccgcgccagccggtgatcgggcgccgcgatgatgaagtgcggatggcggccgagcggcttcatctcgacctcgacatcggccggcggccggcccatcacggcgatgtcgaggtcgtagccgcgcagcgcgtcgcggatttcctcgcggttgccgatccgcagcgttacctcgatcttgggaaagcgacgcgagaacgcggcgatcgcaaacggcacgaaatacttcgcggtcgagaccgcgcccagcgcgacgcggccgccgctgcggccggcgatcatgtcgagcgattgctcgcaatccttcagcgccgcctcgacccgctcgaccagcgtcagcacatgcgcgccggcatccgtcagcgccatgccgtcgccggtacgctggatcaacggcagccccgcgagcgtttgcaggttgcgaagctgcagcgtcaccgcgggttgcgtcaggttgaggcggttggccgccgacgtgatcgagcctgcctcgtgcacggtggacaatgcgcgcagctggcgaatggtgagatctcgcgtgaagttgccggccatgcccagctccataagaaatactttgctcggaccaaagataataaaatttccctaattgggcaattcgcacgttgatacggcgaaggcgactcccctgagatcgcctctcgaagcctcgggacagagggcgcgatcatagggagaggccggtggaaattcgtccagcattgcatgcccatctggagtggccgacgcagcataatccgttgcgcgccgcgaccgttgcggcgatcgaggcgctggccggtgccgcgctcgagctgtcgcgcatcattgccgccgggccgctcgccggcatcgtcggcgagagcggcggcgtcaatcccgacggcgatcgccagaagaccatcgacatcgtcgccgaccgcctgatgcgcgacgcgctgcgcaccgcgccggtcgccgcggtgctgtcggaggaggcggagctgccggagacactcgatccggatgcgccgctctgtgtcgcgatcgatccgctcgatggctcggccaatctcgaaaacaatatctcgatcggcacgatcttctcgatccggccgaagggcaacgacatcatctcgaccttcttcgagcccggcacggcgcagtgcgccgccggctgcttcatctatggtccgcagacggtgctcgtgctggcgctggaccggcgcgtcgaccgtttcacgctggatccgcggaccggcgagttcgtgctgacggcgcgcgatctgcgggtgccgcaggacacgccggaattcgccatcaatgtctcgaaccggcggcactggagcggccaggtgcgcaattacatcgacgagtgcctggccggcgtgaacggcgagcacgggcaggacttcaacatgcgctggatcggctcgctggtggcggaagcctaccgcatcctgatgcgcggcggcgtgttcctgtatccggcggatgcgcgccagggttaccgcgaaggccggttgcgcctgctgtatgaagcgcatccgatcgcgctgatcatggagtgggctggcggcgcggcgtcgagcggccgctcgcgcattctcgaactctcggcacgcacgccgcatcagcgcgtgccgctgatcatgggatcggcgcgcgccgtgcgcgccgtcgatgcgatccacctgaccgtcgagccgttgttcgagagcagcgatgccccgctgttcgcgcggcgcggcctgttccgctgaagggggagcccatgtctcgcaggcaccccatcatctcgatcaccggctcgtcgggcgccggcaccacctcggtgaagaagacgttcgagaacatcttccgccgcgagaacgtggtcgcggcctatatcgagggtgatgcgttccaccgctacgaccgcgtcgagatgcgcagcatgatggtggagaaggcggagcgcggcaacaagcacttcagccatttcagccccgacaccaatctgttcgaggagctggagaggctgttccgcgactatgccgagaccggcaccggaacgacgcggcactatgtgcatgacgaggaggaatcgcggctctacggcgccaagcccggcaccttcaccgcgtgggacgcgctgccggagaattcggacctcttgttctacgagggcctgcatggcgccgtggtcaccgacaaggtgaacgtcgcgcagcacgcggacctcaagatcggcgtcgtgccggtcatcaatctcgaatggatccagaagctgcaccgcgaccgcagccaccgcggctattcgaccgaggcggtgaccgacaccatcctgcgccggatgccggactacgtgaactacatctgcccgcaattcaccgagaccgacatcaacttccagcgcgtgccgacggtcgacacctcgaacccgttcatcgcgcgctggatcccgacccctgatgaatcgatggtcgtgatccggctgaagaacccgcgcggcatcgattttccctatctgctctcgatgatccccggaagcttcatgtcgcgcgccaactcgatcgtggtgcacggcgccaagctcgacctcgcgatgcagctgatcctgacccccctgatcctgcaactgatcgaacgaaagaggcgcacgatatgacgaccgcacttgcgtccgttgcgagccgcccggaaatcagccacgacgagatggccaacgccatccgcttcctcgccatcgacgcggtggagcaggcgaagtccggccatcccggcatgccgatgggcatggccgatgtcgcgaccgtgctgttcaccgacttcctgaagttcgatcccgccgatccggcctggcccgatcgcgaccgcttcgtgctgtcggccggtcacggctcgatgctgctctacgcgctgctttacctcaccggctacgagagcatgacgctcgatcagctcaaggcgttccggcagtggggatcgcagaccccggggcatccggagtatggccatacgcctggtgtcgagaccacgaccgggccgctcgggcagggtatcgcgaccgcggtcggcatggcgctcgccgagcgcctgatgaacgcccgcttcggcgacgatctggtcgaccactatacctatgtgattgccggcgatggttgcctgatggagggcctcagccatgaggcgatctcgctcgccggccatttgcggctcaatcgcctgatcgtgctgttcgatgacaaccggatctcgatcgatggtgcgacctcgctgtcgtgctcggacgaccaggcggcgcggtttgcggccagcggctggaacgtctgccgcctcgacggccacgatccgcaggcgatcacggcggcgatcaggcaggcccgggcgagcgatcgtccctcgctgatcgcgtgccggaccgtgatcgggttcggtgcgccgaaccggcagggcagcgagaaggtgcatggcgcgccgctcggcaccgacgaggcggcgaagacccgcagcgcgctgcgctggccgtatctggccttcgaggttcccgatgccgtgctggccgagtggcgcgagctcggcggccgtggccgcgacgcgcggcgcgcctggatcgaacgttcgcgtgccgcctgcaagggtgaacggtcgccgttccacgacgcgctgaaccggaaactgccctgcgcctataccaaggcgatggccgcgctcgtcgagcgctttgcgaccgagcggccgaaactcgcgacgcggcaggcctcgcagcaggtcatcgatgtgatcgcgcaagccttgccgaacctgctcggcggctcggctgacctcacacactccaacctgacgcaggcgaagtcgcaggttccggtgcggcaggatatgctcgacggcagctacatccactatggcatccgcgagcacggcatggcggcggcgatgaacggcatcgcgctgcatggtggcttcattccctatggcggcaccttcctgtgcttcgccgattacagccggccggcgatccgcctcgcggcgctgatggggatccgcgtcatccatgtgatgacccatgactcgatcgggctcggcgaggacgggccgacgcatcagccggtcgagcatctcgccgcgctgcgcgcgatcccgaatgtgctggtgtttcgtccggccgacgcggttgagaccgcggaagcctgggactgcgcgctgaaggcggagacctcgccgtcgatcctctgcctgtcgcggcaggcgctgccgacgatccgcgacggcagtagggacaaccaggtcgcgctcggcgcctacgttctggtcgagccgtccttcgcgcgtgacgtcaccctgattgcaacgggttcggaggtggcgatcgcgctcgaagccgcaaggctgctggcggaagggggaatgcaggccgcggtcgtctcggctccgtgcttcgacctgttccgccagcagccgagcgactatcgcgcaagagtcctgggcagcgcgccgcgcgtcggcgtcgaagccgccgtcgaaggcgactgggcgcgctggctcggcgacgacggtgcgttcgtgggcatgaccggcttcggcgcgtccgcgccggccgacgtgctctaccgcgagttcggcatcacgcctacggcagtcgccgcaaccgcaaaacagctcatccaacgggcgaattgaaaggaggacgccacgatggcgcggatcaccctgaggcaattgctggaccacgccgcggagcgcggctacggcgtgccggccttcaacatcaacaacatggagcagggcctcgcgatcatggaggcggcggccgcctgcgatgcgccggtcatcatccaggcgtcgcgcggcgcgcggtcctatgccaacgacatcatgctggcgaagatgatcgatgcgctggaggagatgtatccgcagatcccgctctgcctgcatctcgatcacggcaatgaagaggcgacctgcgccaccgcgatccgctacggcttcacctcggtgatgatggacggctcgctcaaggccgacgccaagaccgcagccgactatgactataatgtcgacatcacccgccgcgtggtcgatatggcgcactgggtcggcgcgtcggtcgaaggcgagctcggcgtgctcggctcgctcgagcatggcggcggcgagcaggaggacggtcacggcgtcgaaggcaagatcagccacgaccagttgctcaccgaccccgaccaggtggtcgatttcgtccgcgccaccaaggtcgatgcgctcgcgatcgcgatgggcacctcgcacggcgcctacaaattcacgcgcaagccggacggcgagattttggcgatgcgcgtggtcgaggagatccacacccggctgcccaatacgcatctggtgatgcacggctcgtcctcggtgccgcaggcgctgcaggacgtgttcaaccggttcggcggcgagatgccgcagacctggggcgtgccggtcgaggagatcgtgcgcggcatcaagcacggcgtgcgcaaggtcaacatcgacaccgattgccggctggcgatggccgcggccttccgcaaggtcgccgtgcagtcgaagagcgagttcgatccgcgcaagttcctgaagcccgcgatggatgcgctgcgcgaactctgccgcgaccgcttcgagcaattcggcaccgcgggcaatgccgcggggatcaaggtgattggcctgccggagatggcccgacgctaccgcgccggcgcgctcgatccgcagattggaaacatgacccaggccgcctgagcaattggccggcgaaagacaggagaatgagatgaacatgcagcagtcgatcaccgtgcgcggcaaggatcgctacaagtccggcgtgatggaatacaagcggatgggctactgggagccgaactacgagcccaaggacaccgacgtcatcgcgctgttccgcgtcacaccgcaggatggcgtcgatccgaccgaagcttgtgctgcggtggccggcgaatcttcgaccgcgacctggaccgtggtgtggaccgaccggctgaccgctgcggagaagtaccgggcgaagtgctatcgcgtcgatccggtaccgaattccccgggcagctacttcgcctatatcgcctacgacctcgatctgttcgagccgggctcgatctcgaacctgaccgcatcgatcatcggcaatgtgttcggcttcaagccgctcaaggcattgcggctcgaggacatgcggctgccgaccgcctatgtgaagaccttccagggacctgcgactggcatcgtggtggagcgcgagcggctcgacaagttcggccgtcccttgctcggcgccaccgtgaagccgaagctcggtctgtccggccgcaattacggccgcgtcgtctacgaggcgttgaagggcgggctcgacttcaccaaggacgacgagaacatcaactcgcagcccttcatgcattggcgcgagcgcttcctgtactgcatggaggcggtcaaccgcgcgcaggccgcgaccggcgagatcaagggtacctacctcaacgtcaccgcggcgaccatggaggacatgtatgagcgcgccgagttcgcccatgagctcggctccaacatcgtcatgatcgacctcgtgatcggctacaccgcgatccagtcgatggcgaagtgggcgcgcaggaacaacatgatcctgcatctgcatcgcgccggccactcgacctacacgcggcagcgcagccacggcgtctcgttccgggtgatcgcgaaatggatgcggctcgccggggtcgaccacatccatgccggcaccgtggtcggcaagctcgagggcgacccgaacaccacgcgcggctactacgacatctgccgcgaggacttcaatccgatgcagctcgagcacggcgtgttcttcgatcagaactgggcgagcctcaacaagctgatgccggtcgcctccggcggcattcatgccggccagatgcaccagctgctcgacttgctcggcgaggacgtcgtgctgcaattcggcggcggcaccatcggccatccgcgcggcatccaggccggcgccaccgccaaccgcgtcgcgctggaggcgatgatcctcgcccgcaacgaggggcgcgactacgtccatgaagggccggagatcctggccaaggcggcgcagacctgcacgccgctgcgcgaggcgctcgacgtctggaaggacgtcaccttcaactacgagtcgacggacgcccccgatttcgttcccacgccgagcatggcggtctgacaggagtttttcatgcgcgtgacccaaggctgtttctcgttcctgccggatctcaccgacgagcagatcgtagcgcaggtgcaatactgcctcgacaagggctgggcggtgaacatcgagttcaccgacgacccgcatccccgcaacacctattgggacatgtggggcctgccgatgttcgacctgcgcgatgcggccggcgtcatgaaggagctcgccgattgccggcgggtctatgacaaccgctacatccggatctccggcttcgattccagccatggctgggagtcggtgcggctgtccttcatcgtcaaccgcccgcgcgaggagcccggcttccggctcgaccgccaggaggccgccggccgtaacctgcaatacgcgacccattcctatgcggcggtccgcccggagggcgaacgctacgccgatcagtgaccgcgtccggttggcaagccaggcgggttgctccctcgaccgtctggcccggatgcacttctccgtcgtcgtccgctgcgacgacggagcttttcttgaagcgagaggatgatgacccaggtgcaggaacaaatccgcgagacgccgcccgagagcatcgacctgcgacatgaattcgccgacctcggcataggcgacgtgctcgaccagctcgattccgaattgatcggcttgaagccggtgaagacccgcatccgggagatcgcatcgctgctgctggtcgaacgcatcaggcggaagatggcgctggcgacgaccttcccgaccctgcacatgtcgttcaccggcaatcccggcaccggcaagaccacggtcgcactgcggatggccggcatcctgcacaagctcggcttcgtgcgccgcggccacgtcatcagcgtcacgcgcgatgacctcgtcgggcaatatatcggccataccgcgccgaagacgaaggagatcttgaagaaggcgatgggcggcgtgctgttcatcgacgaggcgtattacctctatcgtcccgagaacgagcgcgactacgggcaagaggcgatcgagatcctgctgcaggtcatggaagcgcagcgcgaggatctggtggtgattctggccggctatggcgaccgcatggagaagttcttccagagcaatccggggttccggtcgcgcatcgcacatcacatcgacttcccggattattcggatggcgaactgctgtggatcgccgagctgatgttgcagcagcagaactatcgtttctcgccggaagcccgcgaggcctttacccggtacatcggcatccgcaaggagcagccgctgttctccaatgcgcgctcgatccgcaacgcgctcgaccgcatcaggctgcgtcaggccaaccggatcgtggccaagctcgaccgcacgctcacggccgacgacgtgatgtcgatcgaggccggcgacgtgctggcgagccgcgtgttcgcaaagggcgccgtggaggcgggcgaggggcgatgaacccggccctcgcagcgatccggactgccggaatgagcgacatcatcgcgggcgcgcgccttgatcttcgatgtcgacggcacgctcgccgagaccgaggaggtgcatcgccgcgccttcaacgatgcgttcgccgcggccggcctcgacgtgttctgggaccaggtcacctatggaaggctgcttcgcgtcgccgacggcaaggagcgcatccgcgccttcgacgactgatgaccactgccgccgtcgggccgcagttccgaataatttattcgtgcgattaaataaattgaccttgcatctatagaatagtgggggcaccttcagccagaagccgtgccgaaccatcagaaattgtggtggtcggtatcggacgacagcagttctgggggaacgcgcctcatgatcctcggcgtctgggtaaatttattcagctgatgaataaattgtgcttgcttccgcgagacaggtcggggcaccatccaccaaaggttgccaggagcagtgccaagccaccagaggaggttctgggggcgtcggtgcgtgccagcaatttcgggggaccgcgcctcatgatccttcacgtcattcggaccgctcgttcgtctcaccgcatgacttgcggctgatcccggcattgtaggatcgatatggttgatcgtgcggagtgagcatggcgctgttgacgggcttgagcgacattccgcgatttcggttcgtgacggcactggcgccgatccgacatcgccgtagatctgtgaccaaccaatgatagccgtcgattgacactgtccaaaacaacggtacccaactcaaaaaagccaagggagtgacgcatgttcagattgaaggtctcgttgatcgcattggcgctggcaggtctcgccgcggcggcaccggacgcgctcgcccagagcaagccgaccatcggcatcgcgatgccgaccaagtcctcggcgcgctggatcgacgacggcaacaacatggtcaaggtgctgaaggagcgcggttacggcaccgatctgcaatatgccgacgacgacatcccgaaccagctttcccaggtcgagaacatggtgaccaagggctccaaggtgctggtcatcgcggcgatcgacggcaccacgctgtctgacgcgctgaagcaggccaaggcgcagggcatcactgtcatcgcctatgaccgcttgatccgggatacaccgaacgtcgactactacgcgaccttcgacaatttccaggtcggtgtgctgcaggcgagctcgatcgtgaatgcgctcggcctgaaggacggcaaggggcccttcaacatcgagctgttcggcggctcgcccgacgacaacaacgcctatttcttctacgacggcgcgatgtccgtgctgaagccgtacatcgacagcggcaagctggtggtggccagcggccagatgggcatggacaaggtcgcgaccctgcgctgggacggcgccaccgcgcaggcgcggatggacaatctgctcagcgccttctacggcaagaagcgggtcgatgcggtgctgtcgccctatgacggcctttcgatcggcatcatctcctcgctgaagggggtcggctacggcagcaaggaccagccgatgccgtatatcagcggccaggatgccgaggtgccgtcgatcaaggcgatgctgcgcggcgagcaatactcgaccatcttcaaggacacccgcgatctcgcaaaggtcaccgccgacatggtcgatgccgtcttgagcaagaaggaggtcaccgtcaacgacaccaagacctacaacaacggggtcaaggtggttccgtcctatctgctcaggccggtcgtggtggacaagaccaattgggagaaagtcctgattgacagcggctactataagcgttcgcaattcgactgaggcgggtgagccggacgcaccccgccgaggccgatcgacgctgcgagacatgatccgatgacggcgatgcttgagatgcgtgacgtcagcaagagctttgccggcgtgcaggcgttgcgcgacgtcagctttacggtggaagccggccagatccacgctctggtcggcgagaacggcgccggcaagtcgaccctgatgaaggtgctgagcggggtctatcccgccggcagctatgagggatcgatcctgttcgacggcaaggagcgccggttccgcgacatcaacgattccgaggaactggggatcatcatcatccaccaggagctggcgctgatcccgctgatgtcgatcgccgagaatgtctttctgtcgcgcgcgccgtcgcggtacggggtgattgaccgcgatgcggtgtaccggcggaccgcagagctgctggcgcaagttggcctgcgggaatcgccggacaccctggtcaccgatctcggcgtcggcaagcagcaactggtcgagatcgcgaaggcgctgtcgaagaaggtgcgcctcctgatcctcgacgagccgaccgcgagcctcaacgaggccgacagcgccgcgctgctcgaccggttgctggcgttccgcgcgcagggcatcgcctcgatcctgatctcgcacaagctgaacgaagtcgcacgcgttgccgaccgcatcacggtgctgcgcgacggccgtaccgtggacagcatcgattgccggaccgaagcggtcgacgaggaccggatcatccgcagcatggtcaaccgcgatctcgcgcatcgttttccggagcggcaggttgcgatcggcgatcccgtgatgacggtcgagaactggtcggtgtatcatccgctgcacaccgcccggcaggtgatcaagaacgtcgacttcacggtgcgccgtggcgaggtggtcggcatcgccggcctgatgggcgccggccgcaccgagttcgcgatgagcctgttcggcaaggcctggggctacaacatcaccggcaggatcagccttgacggtcgcgaggcgagccttgcaagcgtgcccgccgcgatcgatgccggccttgcctatgtcaccgaggaccgcaagcagctcgggttgatcctcgccgacgacgtccgcaagaacgtgacgctggcgagcctacgccaggtcgccgatcgcggcgtgatcgacgatgtcgtcgagctgaaggccgcgagcgattaccgcaaccggatgcggatccgctgttccgacgtctatcaggaggccgggcagctctcgggcggcaaccagcagaaggtggtgctatcgaaatggctgatgaccgattcgcaggtgctgctgctcgacgagccgacccgcggcatcgacgtcggggcgaagtacgagatctactgtatcatcaacgagctcgccgaggccggcaagggcgtcgtggtgatctcgtcggagatgccggaactgctcggcatctgcgaccggatctgcgtgatgaatgacggcgccttcgtcggcgagtttgccaaggacgacgcgacgcaggagaagatcatgcgcgccatcatgcgcaatgtcaggatgtccgggagcggcgtgcatgacgatgccgtgcgggtggcgggaggagcgcgatgaccgacaagacggtgtcacttcccgagacccccaagcactccggcttcatcaagaacaatctgcgcaattacggcatgctgctgtcgctgctcgcgatcatgctgttcttccagatcgtgaccgacggcacgctgttgcagccggtcaatcttaccaatctcgtgctgcagaacagctacatcgtgatcatggcgctcggcatgctgctggtgatcgtgaccgggcatatcgacctgtcggtcggctcggtcgcgggattcgtcggcgcggtcgcggcggtgctgatggtgacctaccatgtcgactacccgatcgcattcatcgcctgtctcttgatcggtgccgcgatcggcgccgcgcagggctattgggtcgcctatttcaagattccgtccttcatcgtgaccctggcgggcatgctggtgttcaagggccttgcgctcgcggtgctgcaggggcggtcagtcggaccgtttccgccgaccttccagaagctgtcgtcgggcttcattcccgagctgtttccgagcgccggcacgctctatccgacctcgctgctgatcggtgttgtgctggcattcgcgctggtgctggcgagcgcaagggggcgggcgcgcgagcagtcgcacggcatcgaggtcgagccctacgcgttcttcgtcgccaagagcatcgcgctggcgggagcggtgctctatttcacctatctgatcgcctcgcatcgcggcctgccgaacgtgctggtcatcatgacagtgctgatcgcggcctacggcttcgtcacgcggcggacggtgatcggccggcagatctatgcggtgggcggcaatgccaaggccgcgaagctctcgggcgtcaagaccgagcggctgaccttcttcaccttcgtcaatatgggcgtgctggcggcgctcgccgggctggtgttcgcggcgcggctcaatactgcgacgccgaaggccggcctcggcttcgagctcgacgtgatcgccgcctgcttcatcggcggcgcctcggcctatggcggtgtcggccgggtcggcggcgccgtggtcggcgccatgatcatgggcgtgatgaacaacggcatgtcgatcctcggcatcggcatcgactaccagcaggtgatcaaggggctcgtcctgctcggcgccgtctgcatcgatgtctacaaccagcgccggtgattgccgcacggtcatgatttcgcgatatgatgcctgcgcaacgcaggagaatgccgcgtgaaactgtcccatgccgatgcgctgaccatcggaaacatccttgctgaagtcggccgtgccgagatcatgccgcggtttcgtcgcgtccgtgacatcgaggttcgcaccaagacgtcggcgttcgacgtcgtcactgaagccgacgaactcgccgagcaggcgatctcggcagcgctgctgcgggcgtttccgaatgcggtcgtgatcggggaggagggcacggcgcgcgatccgtccgcgctcgatcaggtcggaaccgcggagctcgctttcatcatagatccgatcgacggtacgcggaatttcacctcgagcctgccgctgttcggcaccatggtggctgcgacgatgcgcggcgagatcgtgttcggcgcgatccatgatcctgtctgcaacgacaccgcgtacgcgctgcgcggtgagggcgcatggctcgagatgcctgatggcagccggcatggcctgaaggtggcgcccgcggtgccgatcaagcagatggaagcggtgatcggcgtcaacttcctgcctgaggcgctgcgtccgatcgtcgccggcaacctgtccaagcttggcgtcagcgcctggctcagatgcgccgcgcatgaataccgcatggcggcgtccgggcattgccatctgctgttctacaacaagctgatgccgtgggatcacgcggcgggctggctgttgcatcgcgaggccggcggctacagcgcgcatttcgacggctcaccctacaagccggtcaatctgaccggcggcctgctttgcgcgcccgacgaagaaagctggcatgcggcacagcaggcggtcctgacgatgacggcggaatgaatgcacaactcttcacgcgcgtcgtcctggcgaaagccaggacccatactccgcggcgattgtggtgaacgggactcttcgttccggtatcgtgaagcaatagcgatcggtggttatgggtccccgctttcgcagggacgacattgaatgtgttgcggggccggtgggtcacagtgccggcattcctgcaccgcgcgttcgcgtggccgaccggatgacgccaaaagaaattattcgctgccgacctcgccggtgatgacgttgccgaacagcgtccagctttcgccttcgaaccgcatcagctgcgactgctcgatcggacggaagtcggtcgcgctggtgttgatcctgatcccgggcaggatcatcttcggcgcaaagtccttcaggctggcggcctgcttcatcacgttctcgcgcgtcagatcgtcgccgcattgcttgagcacttgcgcaagcgtttgcgcggcggcgtagccgtagacgtgattgccgttggtcttgtcgccgtcgggcatgtacttgtccatgaaggaccgccactccttggtctcggcgtcattggcccagatcgtgtcggtcggatccttcagataagagactgagataatgccttgcgaatgctcgatgccggcggcgcgcatcaccgaggcgaccgaggttgcggtcgaggtcaggaagaaggtcggcttccagccgagctcggcgaccttcttgatggtctgcgccgcacccttcggcgccgcccaggtgaacaggatgtcggcgccggaggcgcgcaatgccacgatctgcgaatcaagcgtcggatcggtgagctcataggatttgtcggcgacgatcatgctgccggccttgtcgccaaggccgtcacgcagccccttgagcgcatccttgccggcatcgtcgttctgccagagcaccgcgatcttgccgttcgggaatttgtccaggatgtatttggcgtagatccgcccctcgctttggtagttcggctgccagcccatggtccaggcaaagttcttcggatcgccgaaccgcgtcgcgcccgatgcgatgaagagatgagggaccttcttgccgttcaggtatttctggatcgcgacattcggcgcggtgccgagcggttggaacaccagcagcacctcgtcgccctcgatcagcttgcgcgcctgctcgaccgatttcggcggcgagaagccgtcgtcatagctgatgaagtcgaccttgcgtccgttgatgccgccctggtcgttgatcatcttgaaataggccgcctcggtgcggccgatcgcgccgtaggcggacgcaggtccgctatagggcatgatgttgccgatcttgatctcggtgtccgagacccccgggccgtaattcttctgcgcgagcgccggcgacagcgcgccgatcgttgccgcgaccgccacgcacgcgcgaagacaaattctctccagcatccctcattcactccctgattgttcgctgatcgccttgttgcgtccgtgggccggatggccggcgcgttgacgcccggcgacaattatcgtatgcgcttcccgtctggaaacgttctcagacatagcgcgtgttcccaccgatggcaatattcctgcggccggagagatgtgacaaatgagcagactggagcagatgagcccggaccatggcgcgaggccgccgttggtcgccgaatgcgatgcggtcgtggtcggggccggtttcggcgggctgtatgcgatctaccggttgcgcgagctcgggctgaaggtgatcggcatcgaggcggcgtccgacgtcggcggcacctggtactggaatcgctatcccggtgcgcgctgcgacattccgagcctgttctattcctacacctggtcggaagagctgtggcaggaatggcgctggagcgagaaatacgccacccagcccgagatcctgcgctacgcgcagcgcgtcgccgaccgtttcgagctgcgctccctgatccgcttcgatacgcgtgtgaccagcgcggattgggacgaggccggcgagagctggaccgtccgcaccgatcgcggcgattgcatcgtcgcgtcgacctgcgtgatggcgaccggcaatctctcggtgcccaacaagccgaggctgcccgggctcgagcgcttcggcgggccggtctatcacaccgggcagtggccgcatgaggaggtcgacttttccggcttgcgtgtcgccgtgatcggcaccggctcatccggcgtgcagacgatcccgatggtcgccaaggcggccagccgcctgaccgtattccaacgcacgccgaactactcggtgccggcgcggaacgcgccgctttccgacgccgatatcgccgccgccgaacccttgatcgcgaaatatcgcgaaagcctcgagacgccggagttcgggcgcgtgcctgcaaatgcattcgaggcgccggtgccggagcgcgacgtgcaatgggcgcgctacgaacagctttgggagcagggcggcggcggcattctgaccgcgttcccgaacatcctgacagatgaggccgtcaacgatgtcgcctgcgacttcgtgcgcgacaagatccgcggcatcgtcaacgatgcgacgacggcggcagcgctgtcgccgaaggactatccgctcggcgtcaagcggatctgcatcgataccgggtacttcgcgacctacaatctgccgcatgtcgagctggtcgatctgcgcgcggagccgctgacgacggtcaccgagaccggcgtcgagaccgcgacgcgatcctttgcgctcgatgcgctggtgctggcgaccggctatgacgcgatgaccggggcactcgccgcgatgcagatccgcggccgcgacggcgcgagcttgaaggaggcctgggccgatggtcccagcgcctatctcggcctgatggtgtcgggctttccgaacctcttcatcgtgaccggcccgggtagcccatcagttattggtaatgtgatccacgcctgcgagaaccatgtcgagtggatcgcggcatgcctcggcggcatgcgggccaacggacagacgcggatcgagccggaacgcgaggccgagcgggcctggatggcgcatgtcgcggatgccgccagccgcacgctctatccgaaggccaattcctggtaccagggcgccaacatagccggcaagccgcgggtgttcatgccgtatgtcggccagggctatcgccatcgcatcgcgcaggtcgcgcagcgcggctacgagggatttgtgttgcgctgaggccggcgctttgctctccgtcattgcgaggagcgaagcgacgaagcaatccatcgctccgcgtgggcggagggatggattggttcggggagcctgtcatcggacgcgcgttcgcgcgaccgttggctcgcaatgacaggtagaactggaaccgtttccagatcgggaagagttggaggactgaagatggacatcaagcgcgcaggaacggtcgcgagccgacgcggcaacgccgagtggttcagcggcactgtgtgggctgactcgatcgtcaacgcaccggcgccggcgcgggtgcaggcggcgcgcgtcacgttcgaacccggcgcgcgcacggcgtggcacacccatccgctcggccagacgctctacgtcacggccggcgtcggatatgtacagagctgggacggcccgacccgggtgatccgtccgggcgacgtggtgtggattccgccgggcgagaagcattggcacggcgcggcgccgaccaccggcatgagccacatcgcgatccacgaagcgctcgacggcgactacgcgacctggatggagcacgtctccgacgcacaatacgcggcggcgccgcaggcggactgatcgcgcgacactattttcggccccgcgctggcgctgccggcgcggcgcaggaatggcgcaggatgagacgcgtcggcaggaataccggctcgctgctgcccggctcgtcggcgttgcggatccgctccagcaacagccgcgcggcggtgcggccgacctcgttcatgtcccagctcaatgcggtgatcgccggcgtcgcatggcgggcgaggtcggtgtcgccgctgcacaccagcgagacgtcctgcggatagcgcaggccgttgctggtgatcgcctccagcacctcggccagcatgctggtgccgagcgagatgattgcggtcggcggttttgtcatttgcagcaactggcagaccgagctgaaggcggtgttggcgccctgcatgtgcggtcggatcagggccgggtcgacctcgatcttggcttcctgatgcgcttgccggtagcccgcgagccgctcggtgctcggcagcaccgcggcgctgccggtgagcaatgcgatccggcgatggccgaggccgatcagatagcgcgtcgcctccagcgcgccgccgcggtgatcgacgcgaaccgggatgctatcaggcacctcgcggtcgacggtcacgcagggcagatcgagcgtcgccaatcccttcatgaaatccttgtgggaattgtcgccggcgaacagcagcaggccatccatctggcgccgccgcaccgccgacaggaatgcggcctcgcgcgcttcctcgtgcttggtcgcggccagcatcagcaggaatccggcgcgctggaattcctcctccgccgcactgaccatgccggtatagtgcgggttggagaagtcggccaccatgcagccgatcgtgttggaggcccgcgagcgcagcacctgcgccgcttggtcgggctcgaagccgagccgcttcaccgcgcgcatgatgcgggcatgcagttccgcgctggtgtagatgccgccattgagcgtgcggctgacacttgagacggacacgccggcctcggccgcgacgtcacgaatcgtcggtcgtgtccgtcgcgccttgctcatcgatggttgggccctgtcggttcggcattgcggccgtcaggcctgtggcggacggcatcgccgaacctaatcaggctccgtggcgaatctcaattgattcttgccgcgatcgttgtcgtgtcacgccgacgccggccgatcgaaataggcgaaggcggcactggtcaggctgccgagcagggtccagaacaccaggctggtcagcgtgacggcgaccacgaactgatgcgacagggacgacggaacgttggtctcgatatgctcgagctcgggcgcgccgatcagatgcggcagcatgatcaggaccacgccggcgattgcggccggcatcgagcggcggaacacgatcagtccaaggccggcagcggtcgccagcaccgcgatcgtccaccagatctgacgcgagagcagcggagcggcggggactccgggcaattcaggcggcagcccaaggccgggagcgatggtgaagacggcaaagcccgcgaggccccacatcaagccctcatgccacgagatcggctcgccggtcgcgccgctgcggaccgcgaggaagccaccgagcagaagcgcaaagccgaccgcggtcaggatgttcgcgcccgccgtgtagagattgcgctccagcccgtccttcggctcccacccctccgcgccatgatcatgatcagcatgatcatgcacgaggatggcttgcggtgtcgccgaggcttcgtgcttgtgctcggccgccttctcatagacctcggccctgaggatcaggggaacggtgccgaactgctgagccgcggtaacgatcaggccgacgatgaatcccgcgatgaccgacgagaagacgatcgagcgaaacgtactcataccgacggggtcagtggcaggggaatgcgttggagtggcgcacgtcgtgcgcggcattgtggatcacgtcgatgtgcgagaagccgaccacgccgacgatgaacaggccgagcgtcatcgccatcagggactgggcaagccggccgacctgtcgggtggcaaccggcagatgctgggcttgcgcggtctgggactggctcatcatcgttctccacgttcgatttggtcggcttctagcagctttcgggcgatgtcgcgactggtaagatgcagatttgttccaggaggtatgcgcttgcccaggatcttggcgctggcagctgacctgaatgcgtctctgtggcgctcgaaatagccgaggcagacctccggcaccggctctgcgccaagcagagtccgaaatgcacctcgatgcactgcgcagatcgcgccgtgctccgggacaggaaagaccagggaggcaatgtccgcgcgccagtgggcgccgctgccggtcggagattcgtcagcgccggatggtgcattcaccgggacctcgccgcgattcccacttggcttgttcgagctccgggcggtcgcattctgcctgcgggtagccgatgcagaggtagccgatgaacttccagccgtccggtatctccagaatctcacgtacgcggcccggattgaggatcgatacccagccgaggccaatcccttccgcgcgcgcggcgagccacatcgaacagatcgcggccactacggaatattccgacgtctccggcatggtcgcgcggccgagaccggagccgatgtggtcggtcttctcggcgaacacggcgagatggccgggcgcctcttcgaggcccgatagtttcaatgcggcatattttgctgcacgctcgccggaataggaccgcaacgcgtcagcgttgcaggccttgaagtcttcgatgaccgcgcggcgccgtgtcgcatcgtcgacaatgacgaaccgccagggctggctcaacccgaccgaaggcgacaggcaggcgatctcgatcagccgctcgatcgacccatccggcagcggatcggtccggaaacgccgcacgtcgcgccgccacacgaacaactcgtgcagttgccggcgaaacgcgtcgtcgaatgagaccatcgcggggcctttggcaggatcgctctcggagttcatttgagtttcatcggcaggccggcaacgacgaactcgacctcgtctgccgcagcggcaatggtctggttcatcagacctgcggcgtcgcggaaggtccgcgccagcgcgttgtcgggcacgatgccgaggccgacctcgttggtgaccaggatgaccgggctgcgttggcgcgacaacgcctcggcaaggcgcgtcacttcttgcgaccagtcgcgctccgcatgcagcaggttggacagccagagcgtcaggcaatcgaccagcctgacgccgccgccgtcggtctcggtcaatgtcgcgacgagatcgagcggcacctcgcgctcgatccagtcgttgccgcgccgcgcgcgatgcctggcgatccgctcgtccatttccgcgtcgagagcctcggcggtggcaatatacaccagctggcccggaaaggagcgcgcgcgaagttcggcgcgccggctcttgccggaccgggctccgcccgtgatcagaatgaccgccatctcatctcccgtgcggccggtatccacgccgctcgaaacgctctaaccaccaatcgcgatgaaagacaaagccgaaatccgcccgcggagggcttgcgctcgctcaatgtcttgcgcatcagggggatcgcggcgaggagagggttaagtgggatttgcgggagcgatggcggtggcgatggctgtggacgccctgatcggctggccggcgtggctgtttgcccgcatcggccatcccgtgacctggctcggccggttgatccatctcctcgataccagttggaacagggcctccgatccgccggcgttccgccgtgctgccggtgttgcggcggccgtgctggtgatcgcgctggcgacggcgctggggtgggccgttcagtccgcgcttggatccggatgggagcatgtcgttgtcgtgggcgtgctggcatggccgctggtggcgctgcgctcactgcatgaccatgtcgccgcggtggcaaatccgcttgcatcaggcgacattgcggctgcgcggtcggcggtcgcgcagatcgtcgggcgcgatccggccacgctcgatgacgccggcatcgcgcgcgcaaccatcgagagccttgccgagaacgcgtccgacggcatcgtggcgccgctgttctggggggcgctgttcggactgccgggaatcctcggctacaaggcgatcaacacgctggactccatgatcggccatcgctccgagcggcacgaagccttcggttgggccgcggcgcggatcgacgatctcgccaatctcattccggcgcggctgaccggtctcttgttcgtgttgcttgcgccaaaccgcgcgcaggcatggtcatgcatgctgcgtgacgcgcaccggcatcgctcgcccaatgccggctggccggaagcggcgatggccggcgcgctcggtgtgcggctcagcggaccgcgcatctatcacggcagcatcgcgaacgagccctggctgaacgagggcgcgcgcgatccggctgccgccgatgtcatcaccgggctgcgactctatcgttacgccatgatactgctggccggagctttcgtggccctggcgctggcgtgaaggagcggcggatgcgtgagcacggcggaaatctcgatgtcgcccagcgacgcttcggcgggcctgtggaagactggatcgatctgtcgaccgggatcaatcgggtgccttatcctgacgtcggcgtggagccacggcaatggaacgcgttgccgtcgcgatccgacatcgaatccctgcaccacgcggcgcggcaggcctacggcaccggtgcgccgatcgtggcgatcggcggtgcgcaggccgccattcagttgctgccgaatctcgtgtcgcgcgggcgggcgcgcatccttgcgcccacgtataatgagtatgccggtgtgttgtcggctgcgggctgggacgttgacgaagtgtccgagctcgctgcgctcgcaggcgcagacattgccgtcgtcgtcaatccgaacaaccccgacggacaacgtcatgatcggggggaactgcttgcgttgctgccgcgcgttggccggctcgtcattgacgagagttttgcggatgccgtacccggcatctcgcttgcagcggaagcagggcgcgcggggctcctgatcctgcgctcattcggcaagttctacgggcttgccggcttgcggctcggcttcgctgtcggcagcgagcccgatatcgccgcgcttgccgcgatggcaggcccatggccagtttcgggggccgcgatcgcgatcggacggcgggccttgctcgatcgcgactgggcgagggcgacgatcgcgcgcctagcggacgactgcgccaggctcgacgcggcggcgcaatcgcggggttggacgctggtcggcggcacgccgctgttccggctctacgagaccggcgatgcgcttgccgcacaggaggtgcttgcccgcggacggatctggtcgcgcgtcttccagcagaagccgggatggctgcgcctgggcctgccgggctatgaggccgaatggtcccgtgtctcggccgctttgtcgcgatgattttcacgacacgttctcttcacgcgaaccggtgtccactacgctcgaaaacgctttagcgcgccagcgcgagcaggccgtcgacatcgagatgggcttcgatgtgcgcggcaagcgcgtcgagcgcgctttcgaccctggcgccatagagctgatccgccacagcgatatcgagctgcgcaaggaacgccttgcggaattcgtccgacgtgaacaggccgtgcagatagctgccgtgaacgcgcccgtcgctggaaacggcaccttcagccacgccatcaagccgtgcaaacggccgggcgcggtccggaccgtcggtgcgcccgatgtggatctcgtaggcgttgatcggctgaccggtcgcagcatgcaccgcgctgacgcgggtcagcgtcttctgctcggtcatggtggtggtgacatcgagcaggccgaggccgcgcgtctcgccggcggggccctcgatcccatcgggatcggcgacgctctcgccgagcatctggtagccgccgcacaggccgaggacatggccgccgcggcgatggtgcgccagcagatcgatgtcccagccttgcgcgcgcaggaaggcgaggtcgccgcgggtcgatttcgagccgggcaggatgacgagcctggcatcgccggggacggcttcgcccgggcgcaccatcacgaggtcgacgccgggctcgagcttcagcggatcgaggtcgtcgaaattggcgatccgcgacagcgccagaaacgcgatcttgcattgtccgggcttgcgcgcctcgccgagcccgagcgcatcttcggcaggcagctcggcggcgcgagcgaaccagggcagcacgccgaagccgcgccatccggtgcgggtttcgatcaggcggtagccgtcatcgaacagcgagggatcaccgcggaatttgttgatgacgaagccctggatcatcgcggcatcgtcgggatcgatcaccgtcttgatgccgacgagctgcgcgatcacgccgccgcggtcgatgtcgccgaccaacaccacgggcacgtcggccttgcgcgcaaagcccatattggcgatgtcggccttgcgcaaattgacctcggcgggactgccggcgccttcgaccagcaccagatcggcgcacgccttcaggcgctcgaagctttccagcaccgcgcccatcagcgacggtttcatcgcggcatattcgcgcgcgcgggcggtcgcgatccgcttgccgtgcacgatgacctgggcgccgacatcggtctccggcttcagcagcaccgggttcatgtcggtgtgcggctcgacgccggcggcgagcgcctgcaacgcctgcgcgcgtccgatctcgccgccgtcgacggtcacggccgcattgttcgacatgttctgcggcttgaacggcagcacgcgcaggccgcgccgcgtggcggcgcgcgcgaggccggcgacgatgagcgacttgcccacgtccgagccggcgccctggatcatcaatgcgcgcgccatggcgttgggctcttagaactcgacgcccggctgggccttgatgccggaccggaacggatgcttcaccagcgtcatctcggtgacgaggtcggcgatctcgatcaactcctccttggcgttgcgaccggtgagcacgacatgggtcatcggtggcttcgacgtcttcaggaaatcgaccacgtcggcgatcgccagatagtcgtagcgcagcgcaatgttgatctcgtcgagcacgaccatgcgcaggctttcgtcggcgatcagctgcttggccttttcccagccggcttgcgccgccgcgatgtcgcgggcgcgatcctgcgtctcccaggtgaagccttcacccatcgcgtggaattgacagagatcgccgaaatgcccggcgagcaggcggcgctcgccggtatcccaggcacccttgatgaactgcaccacggcgcagggaaagccgtgcgccacgcagcggacgatcatgccgaaggcggaggaggattttcccttgccggcgccggtgtgaacgatgatcaggcccttttcgccgctcttggtcgccatgatcttgtcgcgggcgaccttctttttcgccatcttggtcgcgtggcgcgtatccagcgaagcctcgccgctgacgacctcgtcttcggtcccgtttccttcagacgtcatgacgttccttcggcttgacaagttcgagccgcggacgaatggtgggtccgcgttggttcctgtcctatgacaggcgaagagggaatgcgatagggctcaagtcgggcctgaaaagcagccgcccccgcgaccgtgaccggagagatgcccaaagccactgattccccaaggggatcgggaaggcggggatcgaagggagaaatcctgctccgcaagccgggagacctgccaacgcagcatgttgtgagaccggcggacggggtgttccgcgacggggaacgaaccggtgcaagatcggttcgtgtgcctcatcgcttcccgctgtcaatccaggaaggccgatgagcgttacccttcatgtctgtattacctgccgcgccggccaaacgctggcggaaggtgaagtcgcgcccggtgcgcgcctgcacgccgcgcttgtcgaggccggtgtgcccgatggcgtcaatctggttcccgtcgaatgtctctcggcttgcagccagggctgctcggtcgcgctcagcgcgcccggccggtggtcctatgtctatgggcgcctgtccgaagccaatgccggggatgtgatcgccggcgccagcgcctatgccgcggcgcccgacggcatcgtgccgtggcgcagccgcccggaagttttccgcaagcaatcgcttgcccgcattccaccacttcccgtcgtgccggaggccgcagaatgacgacactcgccaaggttccggtcaccgtcgtgaccggctttctcggatccggcaagacgacgctgatccagcatctgatccgcaacgccaacggcaagaagctcgccgtgctggtgaacgaattcggcagcgagggcgtcgacggcgacatcctgaagtcgtgcgccgacgccgattgcccgaccgagaacatcgtcgagctcgccaatggctgcatctgctgcaccgtcgccgacgatttcatcccggcgatggagcagttgctcgcgcgcccggtgaagcccgatcacatcgtgatcgagacctccggcctcgcgctgccgaagccgctgctcaaggcgttcgactggccggagattcgttcgcggatcacggtcgacggcgtgatcgcgctggccgatgcggaagccgttgcggccggccggtttgcgcccgacgttgccgcagtggatgcgcagcgcgcggccgacgccaatctcgaccacgagacgccgctgtccgaagtgttcgaggatcagatcgcctgcgccgacatcgtgctgctgaccaaggccgatctcgccggggcagaggggatcagggtggccaaggaggtgatcgcggccgagatgccgcgcgaggtgccgatgttgcccgttgtcgacggcaccatcgacgcgcgcgtgatccttgggctcggcgccgcggcggaaaacgatctcgcggcgcgcccgtcgcatcatgacggcgaagaggagcacgagcacgacgatttcaattcggtggtgatcgatctgcccgagattgtcgatgtcgaggcgctggtcgcttcgatcaaggggctggcgcgcgagcagaacgtgctgcgcgccaagggctatatcgccgtcgagggcaagccgatgcggttactggtgcaatcggtcggcgagcgggtgcggcatcagttcgacatgccctggggcatgcggccgcggcagtcgaagctcgtcgtgatcggcgaacacggcgatattgatgaagccgccatcagggcacggcttggtgtctgatgcacgtcgtcttccgcgagagtcgcggccttgaggagaccgcgacaccaagggacctcggccaggatccggccgatctcgtggtgttgtcgttttccgacagcgatctcgcggcgttcgcggccggctggcgacgtggccgtgcggcattgccgtcgctgcggctcgccaatctcgcggagctgcgccatccgctgtcggtcgatacttatatcgagcggacgctgtcgcacgcgcgcggcattctggtgcggctgatcggcggcgaaccctattggtcctacgggctctcagcggtgcatcggctggccagggagcgcggcatcgccctggtagtgctgccggcggatggccgcgacgatctgcggctcgatgaattctcgaccttgccggtctcgaccctgcgccgtctgaaggtgctgtgcgacaagggcggcccggttgccgcgcaggccgtgatcgcgcaactggcgctggcgtccggcctctatgccgggccagtggtgggcgagatcgatctgccggagatcggcgtctacgatccccggcgcggtgccgtcgcggtgctgccggcgccggatggccggccgcgggcgctcgtgaccttctatcgctcctatctcgcggccggcgacaccgcgccggtcgacgcgttgatcgatgcgttgcgtgagaggggctttgatgcccacggtgtcttcgtcacctcgctgaaggcggcaggtgttgcggactggctgcgcgttcagctcgcgcaatgcccgcctgcggccatcgtcaacgccactgcgttctccgctgccgggaacgacggcacgacgccgttcgacgcggcttcgtgcccgatgttccaggtcgcgctgtccacggcgcggcgcgaggattgggccttgtcgctgcgcggcctgtcgcccggcgatctcgcaatgcatgtggtgttgccggaagtcgacggccgcctgttcgctggtgtagcgagcttcaagtcgcccggtgagcgcgatcccgatctgcaattcgcgcatcttgcgcatcgaccggacgccgagcgtgtcgcggcgattgtcgcgcgcgtcgcagcctggcaccggcttgccggcaagccggcgcaagacaagcagctcgcgctcgtgctgtcgaactatcccggccgtccgcatcagatcgcccacgccgtcggccttgatgcgcttgcttcagtccagacgttgctggccgatctcgcgggtgcagggtttgacgtcgaggcggtggagttgccgggcgatgcgcttttgcgccggaaactgacgtgggacgtgaacgaatatcgcgcggcgctctccggtattcccctgcagctccaggatgatctggcgcgtgcatggggcgccccggaggacgatcccgattgccgtgacggcgcatttcatttcgccgcgatccgatgcggcaagtcggtcatcgccgttcagccggagcgcggtgatgtcagtcatcgcgatgccgactatcacgatctgtcgcgcatgccccgccatgcctatgtcgcgttccatctctggctccgggggcaaggtatcgacgccgtcgtccacatcggcgcgcatggcacgctggaatggctgcccggcaaatcggttgcgctgtcgtccgcgtgctggccggaggcattgatcggcgatctgccggttgtctatcccttcatcgtcaacgatcccggcgaggcggcgcaggccaagcgccggatcggcgccgtgacgatcggtcatctgccgccgccgctgggacaagccgcggtgccggaaagcctgcgtgctctcgagcgcctgctcgatgaatattcgaccgccgatggtctcgacccggcgcggcggcagcgcctgatcgctgcgatccgcgaagaagcgcgcatagccgggctggaggacgatctcggtcttgccgcgtcagtctccgcggccgaggccatcccgcagatcgaccgcttcgtctgcgatctcaaggaaagccagttcggcgacggactgcacgtgttcgggcagggcgcttgcggcgaggcggagaaggcggcgttacttgatgcgctggccggccggcgcgtcgcgccggggccgtcgggctcgccctatcgcgggcgcagcgacgtgctgccgaccggacgcaatctgtttgccgtcgatccacgcgcggtgccgacgccgtcggcgcatgcgcagggtgtgaagctcgccgaggaactgctgcgccgtcatttgcaggatcacggcgactggccgaagggactcgtcgtcgatctctggggctcgtcgacgatgcgcactgccggtgaggattttgcgatggcgttgcaccttgccggcatcgcgccgcgctgggatcacgggtcgggccgggtgaccggctacgacatcatcgcgctggcggagctcggccgtccccgcatcgacgtcacgctgcgtgtgtcaggcctgttccgcgacgtgtttgcggggcttgcccaattgttcgaagccgcgacggaagctctgtcagaacgcagcgaggaggcggacgagaatccctatcggcagcgtatcgcccgcgtgttcggtccgcgccccggacattatggtgccggcatcgcgtcgatccccgatgtcttcacagcagaggcgcgcgaggcggccggcgaagcctggctctcggcgtcatcctgggccatcgcgtccgatggccagatccggccggatcgcgccgccatcgaggcgcggctcgctgccgccgacagctttgttcatacccaggacttgccggagaccgatctgctgctggcggcggactatgctgcgcacgaggcgggcattgcggcggcggcgcgccggttaggcacaagcatcccctcgctctatcacctcgatgcgacgcggccggatcagccgcatgcgcgatcgctgaccgaggagatcgcgcgggtggtgcgggcgcgcgcagccaatccggcatggatcgcggggatgatgcgtcacggcttccgcggcgctgccgaaatatccgcgacgctggagcacatggcggcatttgcgcatcttgccggtgcggtgccgccgcatctgttcgacctgtattacgacgcgacgatcggcaatgacgaggttcgcggcttcatggcgcgcgagaatccagccgcgctggctgcgatcgaaacctgcttcacccggctgcatgaagccttgctctggcaaacgcggcgcaactcgattgcggctgcgctgcaggaggcctcatgagcgcggtcgcgatcaagggctggtgtcccggcgcgctgcggccgatgcagtcgggcgatggcctcgtggtgcggatccgcccgcgcgtcggtcgactggacgccatccaggcggtggggatcgccgagcttgctgcgcgatatggcaacggcctgatcgacctgaccagccgcggcaatctccagatccgcggcgtcagcgatgcggggtatccggccttgatcgacgggcttgccgagctcgggttgctggatgcagattccgagactgaagcgcagcgcaacattctggtgacgccattctggaccgccggtgacgacacgcgcccgctcgcggccgagctcgagcgggcactcgccggtgcctctctcgatcttccgaccaagttcggtttcgccatcgacgacggcaacgagcggcttctggctggcgcatcggcggatgtcaggatcgagcgcgatcgcaatggaagcctgctggtgcgcgctgatggcgcgcggtccgggcgctcggtcaggcgggacgaggccgtgcgggtcgcgcttgcgctggccgagtggttcgttgcttccggcggagccaggggtgggaagcgacggatggcggcgcatctggccggcggcgcgagccttcccgtattgcttcgtggcgatgccaagcctgtggcccgatcggcggaccctgttcccggcctctatcctatcggtgcaatggtcggcgtggccttcgggcaaatgccgcaccacacactcggccatctcgccgcgtgcgcacaggtgcttcgcatgacgccgtggcggatgctgctggcggaaggaatgcatgagatgcctcgcggggcggacctcgtcaccgatgccgacgatccggcgctccgcgtgatcgcctgcagcggcgcgccgcgctgcggtgaggcgtatgccgatacgcgcgcattggcgtcgacgcttgcgcggcatatcccggctgacgcgcggctgcatgtgtcaggctgtgccaaaggctgcgcccattccggctccgcggacatcacccttgtggccacacgcgacggctttgacctgatccgtcacggcacggcgcgtgacgtgcccgtcatgcggggactaactggttcggacctcgttgcaaatccttcgctgctgtcgggagcccattgatgccgcacgtctacgagaccgacggtgcggcgatctatcgccagtcctttgccaccatccggtcggaggccgaactcggccgcttcacgcccgacgaggagccggtggtggtacgcatgatccatgcggcgggcatggtgggcctggaagcgcatattcgcttcacgcccggcatggccgcgcgggcacgggcagcattgcaggagggcgcgccgatcctctgcgatgcgcgcatggtctcggagggaattacgcgcgcgcggctgccggcccgcaacgaggtgatctgcacgctcggtgacgccaccgttcccgcgctcgcgcaatcgatgcgcaatacgcggtctgctgccgcgcttgagctgtggcggccgcatctggccggcgccatcgtcgcgatcggcaatgcgccgacggcgctgttccatctgctcaacatgctggagcatcccgactgcccgcggccggcggcgatcatcggctgtccggtcggcttcgtcggtgcggccgagtccaaggcggcattgatggccggggcgcccgtgccggcgctgacggttgagggacgtctcggcggctcggcgatcaccgttgccgccgtcaatgcgttggcgagctggagcgaatagcgatgggacgcatcatctgctgcgggctcggccccggcgatcccgacctgatgagcgtgcgcgccgaccgcatcgtgcgctcggcaagacatgtcgcctatttccgcaagaaggggcaatccgggcaggcgcgccggatcgtggacggattgcttgccgctgacgtcagcgaatatccgatggagtacccggtcaccacggagattgcgttcgacaaccccgaatacgcgcggctgctggccgatttctacgatgcatgggccgagcggctggcgcggctggcgcgcgagatagacgtggtcgtgctgtgcgagggcgatccctatttctacggttcgttcatgcatctctacgcgcgcctgcagggccgggtcgagatcgaggtgatcgccggcattcccggcatggtgggctgctggaatgcggtcggccagccgatcgcgttggccgacgatgtgaccaccgtcctgatgggcacgctgccggaggcggagctcatgcagcggatgcgcagttccgacgcgctggtcgtgatgaagaccggccgcaatcttccgaagatccgccgcgcgctcgcggccgccggtcgtctcgacgatgcgtggctggtcgaacgcggcaccatgccggaccagcgggtcgcgcggcttgctgacatcggcgaggccgattgtccgtattttgcgatcgtgctggtgcacgggcaggggcggcgcaggccatgagcggcacgctgaccatcgcaggattggggccgggcgatgaagcacagatcacgccggaagtctccgccgcgctcgcggcggcgaccgacatcatcggctatgccccctatgtttcgcgtgtgccgccgcgcgccggcctgacgctgcacccgtccgacaatcgtgtggaattgcaacgcgccggcgaggcgctgcggctcgcatccgaggggcggcaggtcgtcgtggtttcatcaggcgatcccggggtgttcgcgatggcatccgccgtgttcgaagcgctggaggacgcgccgcaatggcacgatctgccgattcgcgtgctgcccggcgtgacggcgatgctggcggcagccgcgcgtgtcggcgcgccactcggccatgatttctgcgcgatcaacctctccgacaatctcaagccatggtcgttgatcgaaaagcgcctgcggctcgcggccgaagccgattttgccatcgcgatgtacaatccacgctcggcgagccggccggaaggctttgcgcggacgctcgagatcttgaacgacgccggttgcggcgaacgcatcgtgattttcgcgcgcgccgtctctacaccagaccagcagatcgaaacggtcgagttgcgcgacgcgcggcccgagatggccgacatgcggacgctcgtgatcgtcggcaattcggcgacgcggcgcgtcggccgctgggtctatgcgccgaggcaggtccgatgaccgagccattgcatcacggcttcgacgctctctacccgcggtcgctcagggagccgcggccgcgtgatcatgatgacgggaaggtcgagcgcgcgtgcggcgtcgatcttggcgcgggcgccggttccgccggaattgcgggcgacgatccattcgatattgcgcgcgcgcatcatctcgagctcggcctcgagcgtgaagggtccgcgcgagacgatgacgtccgcatcgggcaatggcagcggttgctcgggcggatcgacaaatcgcaacgtataggcctgctgcggcagggcaccgaacggcgcgatatgctggcggccgattgcgagaaatacattggcacgacgctccggcaaggccgcgaccgcggctgcgacgtccgcgacctcgatccagcggtcgccgggggtcctctcccagggcgcgcgttcgagcgcgagcaacggtgtcgcggcctgcgcgcaggcggcgatcgcgttgcggctcatctcggccgcgaaggggtgcgtcgcgtcgatcacatgggtgatgcgttcacgacgcagataatcggcaaggccgctgatgccgccgaagccgccgatgcgggtcggcagcggctgctcggccggcgcgtgggtgcggccgccataggaatagatcgcgtcgatccccgcgcggctgaccgcagcggcaagcaaattggcgtcggccgttccgcccaggatcagggcgcgcatcatgggtaatccgtggttgaccatcatcggtatcggcgaagatggccttgccgggctgtccgacgcaagccgaaaggcgcttgatgaagccgaggcggttttcggcggcgaacggcaccttgcgctggccggcatcaccgatcgtggccgcacctggacggtgccgttcgatgcggacatcgtgctcggttgccgcggtcgtccgactgtcgtgctcgcctccggcgatccgttctggcatggcgccggtggaagccttgtcgagaagctgcaggccggcgagtgggtcgcacgttccgcgccgtcgacgttcgcgctggtggcggctcgtttgggctggcggctcgagaacacagtctgcctcggtcttcacgctgcgccattcgaacggctggtgccgcatctttcgcgcggtgcacggatcgtctgtctggtgcgcgatggcaaggcggccgccgatctcgcgcgctggctcacggagcgtggctggggggcgtcagcggtgtggacgctgtgcgcgctcggcggcccgcgcgaatccgttacgcagcatcgcgctgactcctatgctggcaattcaggcgacagcctggtcacgcttgccctggaggcgaggggagggcaaggactcgcgcgcagctcgggccttctcgacgcattgtttgtgcatgacgggcagctgacaaagcggccggtccgcgcgcttgcgctgtcggcgcttgcgccgcggcccggtgagcggctgtgggatatcggcgccggttcgggctcgatctcggtcgaatgggcgctctgcggcggaacagcgatcgcggtcgaggcgcgcggcgaacgcgccgccaacatccgcagcaatgccgcgagcttcggcctgacgcaccggatcaccgtcatcgagggcgaggcacccggcatcctgctggagcttgcggcacccgatgccgtattcatcggcggcggcctcgatgccgatatgttcgatgcgatctggtcgcgcatcgcgcagggcacgcggctggtcgcgcatgcggtgaccctggaaaccgaggcgctgctctccggcctgcagcagcgccatggcggcgaattgatgcgtttcgagatcgcgctggccgagccgctcggccgctatcgcgcctggaaggccgcgcggccgattgtgcagtggagcgtgatcagatgaaggtcgcgggtctgggattcaggcgcgaagccggtgtcgcgtccctgcgtgaagcgctcgacgcggccggtggtcccgagggccttgcggcgcttgcaacgctgagtgacaaggcggatgcggcggcgttgagagccctggcgcaggaactcgggctgtcgatccgaagcatccccgccgaggcgttgaccgagatcgaaaccgtgacgcaatccgagttgatccgcgccgagtttggcacaggctccgtcgcagaagccgcggcgatcgccgcagcaggacgcggtgcgcggctgatttcggtgagggctgtttcgcaggatcgaatggcgaccgcggcaatcgcggaaggagatggcgaatgacggtgcatttcatcggcgcaggaccgggcgcggccgatctcctgaccttgcgcgggcgcgatctcatcgcctcgtgcccggtctgcctctatgccggatcgcttgtgcctccaggcgtgctggcgcattgcccgaaggatgcccgcatcgtcaacaccgcgccgctgtcgctcgatgagatcattgccgagatagccacggcgcatgcggcgggcaaggacatcgcgcggctgcactcgggcgatctctcgatctggtccgcgatgggagaacagctgcgccggttgcgcgcgttgcggattccctattccgtcacgcctggcgtaccggctttctcggctgctgcggcggcgctggagtccgagctcacgctgccgggccttgcgcaatcggtggtgctgacgcgcacgccgggccgggcaagcgcgatgccggatggcgagacgctcgcagcgttcgccacgactggcgcggtgctggccatccatctgtcgatccatctgcttgacaaggtcgtcgccgagctcacgccgcactacggcgcggactgtccggtggcgatcgtctggcgtgcgagctggccggaccagcgcatcgtgcgcgccacgctcgcgacgctcgatgccgcgatcgggccggagctcgaacgtaccgcgctcatcctggtcggcaagacgctcggcgcagacgagttcgccgaaagccggctctatgccgccgattatgaccgccgctaccgcccggtcggcgaggtgccgcgctttccggaaccatcacgatgaccgtggggctcgtgatctccgcgccggcatccggtgtcggcaagacgacgctgacgctggcgctggcccgcgcctggcgcaatcgcgggctcagggtgcaatgcctcaagagcgggcccgattacatcgatccggcgttccatgcggtcgccacgggacggccatccgtcaatctcgatagctgggcgatggcgtcggatgcgatcgtccatctggcgagccgcggcgcggatgccgatctcgtgctggccgaaggctcgatggggttgttcgacggcgtcgccgcgcgcggcgtctccggcaccggggccaccgccgacatcgccgagatgacgggatggccggtgctgttggtgatcgatccctccggccaggcccagacggcggcggcgatcgccgccgggctgcgcgacttccgcaccggcgtgcggctggccggcgtcgttctcaaccgcgtcgcgagcgcaaggcacgaagcgctggtgcgcgatgccatggcaggtgctggcgttgcggttttcggtgcgctgccgcgccacgccgagatcgccttgccgaagcgtcatctcggtctggtgcaggccgaagagcaggccgagatcgatggtctgatcgacgaagctgcccgcttcgtcgccaatcatgtcgatctggacgccgtactgcaatcggccggcgcctgggcgccgcaaccttccgcgcgcgggctggatatcatgccgcccggccagcgcattgcgctggcgcgtgacgccgcattctcgttcgtttatccgcacatgctggaagcctggcgcgcggccggcgccgaggtcgtgacgttctcgccgcttgccgatgagagccccgatgcggacgccgatgtgtgctggctgcccggtggctatcccgagctgcatgccggccggctcgcggcaaacaggcgattcctcgatggggtgcgcgcatttgccgggacgaagccggtgcatggcgagtgcggcggctacatggtgctgggcgccgcgctcaccgatgcggacggtgcgcgccacgagatggtggggctactcggcctcgagacgagctatgccaagcgccgcatgcatctgggttatcggctcgccgagcttgcggcaccgatgccgggatatggctcgggcgcgcgcctgcgcggccatgagtttcactactcaacgatcatctcgcagcccgacaccccgctcgcggtggtgcgcgatgcgaccggcacggtcgtcgcagagaccggatcgcggcggggccatgcgacaggcacattcttccatctgatcgcggaggaccggtgagcggtttcgtctccttcgtctcggccggtcccggcgatcccgacctcctgaccatgaagggggccgcgcggctgcgcgaggccgacgtcgtgctctatgacgacctcgcctcgggtgcgatcctcgatctcgcgcgctccggcgccaatctcgtcgcggtcggcaagcgcgccggccggctgtcggcgcggcaacaccatgtcagccggttgctggtcgactatgccgcggccggtgtgcgggtggtgcggctgaaatccggcgacgccggcatcttcggccggctcgaggaggagatcgaggcgctgcgcgccgccggcatcggctacgagatcatcccgggcgtgacctccgcgtcggtcgccgcggcgcgggccggcatcccgctgacgcggcggttgacctcgcgccgggtgcagttcgtaaccggcgccgatgtcaccggcggattgcccacggatttgaactgggcggcgctggccgacccggaagcgaccacggtcgtctatatggggcggcgcacgtttccggcgctggccgcaaaattgatcgcgcagggtctcgcgcctgacacgcccgcattgttggcggagtcgctcggtcaggccgatgagcggcttgtccgcaccacgatcgcagcgctggccgaacgtctcaccgatgtgggcgctgccaccgcggctgccgtcattctgttcggtgcgctggcgccggagcaagggtgacgcggccatgttgacgttttcgctgattggtatcggttgtggcgatccccgacagctcacgctcgctgcaacagccgcgatcaatgccgccgatctgatcctgatcccgcgcaagggcacggcgaagtccgatctcgccggcttgcgcaggacgatttgcgcgcaggcactgagtaatacccgcacccggattgccgagttcgacctgccggtgcgggacgccggcgaggaagattatcgcaggggcgtcgacgattggcatgatgcgatcgctgcgacctggtcgctggagatcgcacgccatctcggcggcgaggggcgcgtcgccctgttgatctggggcgatccttcgctttacgactcgagcctgcggattgcgcgacggcttgatccgctgcctgacatcgcggtgatcccgggcatcacgtcgatccaggcgctgtgcgcggcgcatgcgctgccgctcaacgagatcggcgagccgttcgtggtcacgacggggcgccggcttcgtgagggtggttggccggctggcgttgacactgtggtcgtgatgctcgacggtggcacggctttcgagacgctggatcctgcgggcctgaagatctggtggggtgcctatctcggcatgcctgatcagatcatcatggcaggggagctcgcggagaccggtcctcgcatcgtcgccgcgcggcggaaggcgcgtgcgcagcacggctggatcatggactgttatgtcttgaagcgatcgtgatcgcggatcgcgccggcacgcgatgccgccgcgggtctcaggtcttcaatgggtctcaggtcttcaacccgcgaatggacggctggatggtgaggcgataggcaacgagcctgtcgccatcgaactgctcgagcgtcgtttcgcaaaccgggcagcgatactcacccctgtcgcccgatctggagaccagctcaaggcgccggaatccggccccgcagcgtggacacgtgacgtcgtccttcttcatcaagccaccccagaacaacaccggcggtattttgtaacccagaccgcgcggcggaactatggtcatggccggagggctgcggaccattcgtgcatgggaacaaacgatgcgcccgcaccgagccggagacgccgcagccgaccgcgccgaacgggtcgtccagttcgacgcattccggtgatccggcaatgggttatggctcgaccttgagaggggccgtctgcgatcggaattgcgcacccatcatggctgccgcgttgccgcatcggggagctgtgacgccgcggcggccgcagggtcaggacttgcgatgcctggcgttgactgcgatcgccgcggcggcggtgcggttctcgaccccgagcttggcgtagatttgctccaggtgcttgtcgacggtgcgtgggctaaggcccaggatctgcgcgatgtcgcggttggtcttgcccttggagagccaggacagcacctcgccctcgcgggtggtgaggccgagctcgctggagaattccgcgggcatgtcgccgctggtgtcttttgccaaccgcagcaggaattcgttgggcccgagcttgcccatgtattgcagccgaagctgctcgttgccggggaaggacgccacggtcgcggtcttctttccagccgtacctttttgcgcctgttcgatccattgcggcatcggatccggcaagacgaaatcatcggcggcatcggcgagcgtatccgacagcagtttctgggcctgcggcgtcgcccatagcagcgcgccggcgttgttgaccgcgagcagatagcgaccggagacatcgagcgcggcgcgggcgctttgcgtcatccgcgcgttggcgagatggacccgaatgcgcgccagcatctcctcgatcacgatcggcttggtgacgtagtcgacgccaccggcctccagtccgtgcacgatgtgctcggtctcggccaggcccgtcatgaagatgatcgggacgccgtcgagcccggcatcgcgcttcagccgccggcaggtctcgaagccgtccatgcccggcatcacggcatcgagcagtacgatatcgggcgtgatctggtcgacgatgcgcattgcggaggcgccgtcgagcgcgaccatcacggtcatgccggcgctgtcgagcgcgtcggtgagcaggcgcaatgtctccggcgagtcgtcgacgacgagcgcgacgtcgcgctttctctgttcagtggtcatagctgtgcaatatcttcaacgtcgccatatattgatcgagatcgaaccggtcgaccagcgtacgcatctgttcgacgaagtcagcgtgctcgggacactcgttgccgatctcgtcgagcttgagctggatcgccctgacatagccgagctggccgaggctgatcagctcttcgacatatttgaccggcgggcgcgaaccactctcgggcttccattgcggcggcggtgcctgctcggcctcgtactgccactcgatcttgagcagttggcggatggtctcgagcagccgcgggatgtcgatcggcttcatcagatagccgtcgtggaacggttgcgccagcggcgcgccatgggcttccaatgcgctcgccgagatcatcaggatgcgggcctggtgatggccttcggagcgcaaggtttcggcgaccgtccagccgtccatgcccgccatcgagatgtcgagcaggaacatgtccggccggcaatgctgggcgagggcaaggcagccgggcccgtccggcgcgctgagcaggatgaagccgagcggcgccaggatctcgcgcaggaggtcgcgctgggtcgggtcatcgtcggtgatcaggatggtcttgcgcgggccgtgatagccgtagacgggtgcatcgaccggcgcgtcgcggcgcgggttggtgacctcggacagcagcagcttgaccttgaaggtgctgccggtgccgaccgtgctcaagaccttgatgtcgccccccatcacgccggcgagcaggcggctgatggtcaggccgagcccggtgccggtctgcggctgggtgacgccgagcgcgccgcgctcgaacggcgcgaagatccgctcgaggtcgtcgggctggatgcccggcccggtgtcgatcacctcgaactcggcgaccgggctacggtagtgcaccacgaactgcacccgaccggattgggtgaacttgattgcattggatagcaggttgatcaggatctgccgcagccgcttctcgtcggcatagaccacgacgggcagcacggccggccgcttgaacacgaagtcgatgccttttgccgcagcttgcaggcggaacatgccgaccagctgttcgaggaaatcgttcagccgcacctcgtcgcgcgacagatagagccggccggcctcgatcttggagatgtcgaggatgccgtcgatcaatcccgacagatgatcagcgctgcggcggaccacgcgcacctgctcgcgcggccgcacctgcagactgtcgtcctgctccagcagctgcgcgtagccggagatcgcattcagcggcgagcgaagctcgtggctgaggcccacgacatagcggctcttggcgagattggccgattccgccacttccttggcgcgctgcagctcggcgtcggtacgcttgtgggcgtcgatttcctggatcagcagcgtggtctgtcgccgggtttcggcttccgcggcgcgccggctctgctgcgccagcacaaacagccaggcgacgacaccgatgatgatggtcagtgcaaagaacaccttccacagcacgtcggccagcaattcattggcatgcacggctgctgtcgtttgcaggtagatcaggccgagcaccagcgcgacgaggccggccgagaccgcgaacacgccgaggtaatgtccgagttgcgagttgaggcgggcgtagatcggctgcggcatcaccttgcccagcgcgtccgagacttgcgcaccgatccggccgtgcggcttgcagagatcgtggcagcgcgcgtcgagcgagcagcacagggaacagatcgggccggcataggccgggcaggcggccatgtcctcgggctcgaaggcatgctcgcagatacagcactggatcgattcaaggttctgccagctccgcttcggcttgcgcgcgatgtagtacttgccgtcggtcgcccaggcaatcagcggggccgtgatgaaggcgaccgcgagcgcgacgaaggcggacagcgccttcgcggttggaccgaacaggccgtagaacgcgctgatcgagatgacggttgcgatcgccatcgcgccgacaccgaccggattgatgtcgcagagatgggcgcgcttgaattcgatgtgctgtgggcgaaggccgagcggcttgttgatgacgaggtcggccaccagcgcgccgacccaggcgatcgcgacattggagtagagcgccagcgtctgctccagcgccttgtagacgccgatctccatcaacagcagcgcgaccacgacgttgaagaccagccacaccacgcgaccgggatgcgagtgggtgagacgggagaagaagttcgaccaggcgatcgagccggcataggcattggtgacgttgatcttgacctgcgacaggatcacgaacgtgcctgtcagcgccatcgcgagatccggctgcgacagcacgtaacggaaagcttcgagatacatgttcgccggctcggcggcatgctcggccgacacgccgtggctgagcgcgaagaaggccaggaacgagccggccagcagcttcagcgcgccgagcacgatccagccggggccggcgccgagcagcgcgatccaccaggccttgcgcgaggtgcggcggtcgcgcggcaggaagcgcaggaagtcgacctgctcgccgatctgcgccaccagcgcgaacacgacggaggccgcggtgccgaacagcagaaggtcgagattgcccgcgggatcgccgtgctcgccggcgaatttgcgccactcggtgaaggaatgcggattggcccaggcgatcgccgcgaacggcatgatgtggaggatgatccacagcggctgggtccagagctggaaccggctgatcagcgtgatgccgtagatgacaagcggaatgatcacgaccgcgctgatcaggtagccgatcggccgcggaatgccgaagcacatatcgagcgcgctggccaggatcaccgcctcgatcgcgaagaagatgaaggtgaaggaggcgtagatcagcgaggtgatggtcgagccgatatagccgaagccggccccgcgggtcaggaggtcgatgtcgatgccgctcttcgcggcatggtaggcgatcggcagcccgcacaggaagatgatgacgctgacgaccaggatcgcggcggaggcgttcatcgcgccatagttcagcgtgatggtgccgccgatcgcctccagcgccaggaaggagatcgcgccgagcgcggtgttggcgacgcgcgcggcggaccagcgccgcgcgctcttggccgtgaagcgcagcgcgtagtcttccagcgtctggttggcgacccattgattgtattggcgcctgacgcggtctatccgctgccgccctgccactcgctcaaactcctggtccacgatgcgctgatcgcgggcaaatcccgtaccaaaaacctacgtcgctattttgcggtgcagtatacgcgatctcacgtatcagtgcgccgcacaaaagtaagcaatcctcgcctcatcaataagcgttctcgaaccagatggggtgctcatgtcagacgaaacaaaaccaggactgcagtctccgctccgccgcaagctcttgatgggaatggcggcattgccggccatgtcgatgctgggccgtccggcctttgccgacgttcctgcaacttccgcggtcaacaccaccggtcttgcagtcactaatagcgaagtcacggtcggcatcctgcactccgtcaccggcaccatggcgatctccgagaccggctcggtcgaggccgagaagctcgcgatcgagcagatcaacgccgccggcggcgtgctcgggcgcaagatcaagttcatccaggaggacggcgcgagcgactggccgaccttcgcggaaaaggcgaaaaagctcctggtcaacgacaaatgcgccgccgtgatgggctgctggacctcggcctcgcgcaaggcggtgctgccggtgttcgagcagtacaacggcatgctgtactacccgaccttctacgaaggcctcgagcagtccaagaacgtgatctacaccggccaggaggcgacgcagcagatcatcgccggcctcgactgggtcaacaagaccaagggcgccaagagcttctacctgctcggctcggactacatctggccgcgcacctcgaacaagatcgcgcgcaagcacatcgaaaaccacctgcagggctgcaaggtggtcggcgaggaatacttcccgctcggctcgacccagttcaactcggtcatcaacaagatcaagctgaccaagccggacgtgatctacgccatcatcgtcggcggctccaacgtcgcgttctacaagcagctcaaggcggccggcatcgacctgtcgaagcagacgctgctgaccatctcggtcaccgaggacgagatcgacggcatcggcggcgagaacatcgcgggcgcctatgcctgcatgaagtatttccagtcgctcgacaatccgaacaacaaggccttcgtgccggcgttcaagaagatgtggggcgagaagaccgtgatcggcgacgtcacccaggctgcctatctcggcccgtggctgtggaaactgacggtggagaaggcgggctccttcgacatcgacaagatcgcggcggcttcccccggcgtcgagttcaagggtgcgccggaaggttatgtgcggattcacgagaaccatcacctctggtcgaagacccgcgtcggccgcgccaaggccgatggccagtatgagctgatctacgagaccgccgatctcgtcgagccggatccattccccaagggctaccagtgaggccgcgcgcctgagcgcaggtcacatcaacgcatcgcggcgtggacgtcaccgcccacgccgccgatcgggcgccgcgcgcgtcgcggcgcatgcccctggactggaggacgacagatgttcggcgactattcgatcagtgatctcggcgccatccttgcgatgcagggatttgccgggctcatcctgttctccgtctacgtgctgatggcactcgggcttgccatcatcttcggccagatgggcgtcatcaacatggcgcacggcgagttcatgatcctgggggcctacgtcacctggatgacctcgaacgcggtgcagcacgccgcgccctggctgttccccggctacttcttcatcgcgatgatcctggcgttcatcgcctccggcgcgctcggcatgctggtggagtgggcgctgatccgccatctctacaaacgtccgctcgatacgctgctggcgacctggggcctcagcctgatcctgcagcaggcctaccgctcgatcttcggcgcacgcgaagtcggcgtcgagctgccggaatggatgatgggctcctggcaggctaccgactccatccagatcccgatcaacggcatgttcgtgatggcgctgaccatcctgatcacgatcgcggtctcctacgtgctgttctggtcgaactggggcaagcaggtgcgcgccgtggtgcagaaccgcgtgatggcaggcgccgtcggcatcaataccgagaaggtcgatcgttacacctttggtcttggctgcggcatcgccgggatcgccggctcagccttcaccatgatcggctcgaccgggccaaccgccggccagctctacatcgtcgacaccttcctggtcgtcgtgttcggcggcgccgcctcgctgttcggcaccatcgcctccgccttctcgatctcgcagacccaatcgacgctggaattcttcctgtcgggttcgatggccaaggtgatcacgctgttgaccatcgtcgcgatcctgatggtgcgtccgcaggggctgttcgcgctcaaggtccgcaaataagaacaagcaggctggtcatgatcaactcgcgctttttcaatcgctccgaactgctcggcttcctggcgctcgcggtgctgctgtttctgatcctgccgctgtcgctggacatcttccgcctcaatctggtcgccaaatatttgacctacgccttcgtcggcatcggcctcgtgctgtgctggggctatggcggcatcctgagcctggggcagggcgtgttcttcggcctcggcggctactgcatggcgatgtacctcaagctcgaggcatcctcggtcgcgaacaccaagatccagtcgacgccgggcatcccggacttcatggactggaaccagctcacctcgctgcccttcttctggaagccgttccacagcttcccgataacgctgctggcgatcctgctggttcccgcgttcttcgcgctgatcatcggcgctgcgatgttcaagcgccgggtcggcggcgtctatttcgcgatcatcacgcaggcgatcgccgcgatcctcaccatcctgatcgtggggcagcagggctacaccggcggcatcaacggcatcaccgatttgcgcacgctgcacggctgggacatccgcaccgatcacgccaagttcattctgtatttcgtcgaggttgtgctgctgttcggatgcatcgtcgccgcgcaattcatccggctgacaaaactcgggcgcatcctggtggcgatgcgggagcaggaggaccgtgtgcgcttctccggttatagcgtcgccaacttcaagatcttcgcgttctgtgccgcggcggtgttcgctgcgatcggcggcgccatgttcacgctcgaggtcggcttcatgtcgccgtccttcgtcggcatcgtgccgtcgatcgagatggtgatctacaccgcggtcggtggccggatgtcgatcttcggcgcggtctggggtgcactcttggtcaatttcgccaagaccagtctctcggaatccttcccgcagctctggctgttcggcctcggcgcgctgttcatcgcggtcgtgctggcgttcccgaacgggctctccggcatctgggcggaccacatccagccccgcatcgatcgccttttgtcatcacgcaaatcgaaatcggcggccggcatgatcgccgacggcgcaccggccgagtgaggagggaccatcatgctcgtcggccatcagcccaaagacttcctgctcgcggtttccggtctcaccgtgtcctttgacggcttcaaggcggtgaacgatctctccttctatgtcgaggagaacgagatccgcgtcatcatcggcccgaacggtgccggcaagaccacggtgctcgacctgatctgcggcaagacccgtgccacgtcaggctcgatccagttccgcggccaggagctgaccaagctgcgcgagaacgagatcgtgcaggcgggggtgggtcgcaagttccagacgccgtcggtgttcgaggatctgacggttttcgagaacctcgagatttcctttccgcgcggccgcaccgtgttcggctcgctgaccttccagcgtgacgacaccgtcaagcagcgggtcgaggaggtcgccgagatgatcttcctcaaggatcgcctcgacacctatgccgaccagctcagccacggccagaagcagtggctggagatcggcatgctgctgatccaggatccggacctcctgatgctcgacgagccggtggcggggatgagcgtgtccgagcgcgccaagaccgcagaactgctcaaccgcatcatcaaggaccgctcggtgctggtgatcgagcacgacatgaagttcgtcgaggacatcgcgcacaaggtcacggtgctgcaccagggccagatcctgtccgaggggaccatggagcacgtcaagaacgatcccaaggtgatcgaagtgtatctggggcattgatcgatgatcgaaacgccacgagcggcagacgcgcactcggttcacctctccccgtcggggagaggtgaagacaacccggcaatagaggacgcacatgctggcaatcaatgatcttcacgtcgcctacggccagagcgaggtgctgcacggcctcaacgtcaaggtcgcggccaacgagatcgtcgcgatcatgggccgcaacggcatgggcaagaccacgctgatgaaatcgctgatgggcatcttgccggccaagagcggcaaggtgaccatggacggcaccgagctcggcgcgatgaagagctacgagcgggtggcgaaggggctcgcctacgtgccgcagggccggatgatcttctccaccatgacggtgaaggagaacatcgagaccggccttgtggtgtcaggcgactccgaggtgcccggcgacatctacgagctgttccccgtgctgctggagatgaagggccgccgcggcggcaatctctccggcggacaacagcagcagctcgcgatcgcccgcgcgctggcgaccaggccaaaagtgctgctgctcgacgagccgaccgaaggcattcagccgtcgatcatcaaggacatggcgcgcaccctgaaacggatccgcgacgagcgggggctgtcgatcgtggtctccgagcaggtgctgagcttcgcgctcgacatcgccgaccgcgtgctcgtcatcgagaacggcgagatcgtccgcgacgatccgcgcgctggcgtcgatgccgcgcagatctcaaaatatctgtctgtgtaaccaaccaccagtaagcgaaggggagcaatgcgatgccagatacactgatcaaggtcgatctcagcaagtcggcctatgaaaacgacaagatccacaaccgctggcatcccgaggttccgatcgtcgagtgggtcagccccggcgacgacttcatcatcgagaccgtcgactggaccggcggcttcatcaagaacaacgactcggccgacgacgtgcgcgacatcgatctgtcgatcgtgcacttcctgtccggcccgatcggcgtcaagggcgccgagccgggtgacctcctggtcgtcgatctgctcgacgtcggtccgttgaaggagagcctgtggggtttcaacggcttcttctccaagcagaacggcggcggcttcctcaccgaccatttcccgctggcgcagaagtcgatctgggacatcaagggcctctacacctcgtcgcgccatgttcccggcgtcaacttcgccggcctgatccatcccggcctgatcggctgtctgcccgatgccaagatgctggcggcgtggaatgcgcgcgaagccgagctgatcgcgaccaacccgacccgcgtgccgggcctcgccaatccgccgttcgcgccgaccgcgcatgccggccaggccaagggcgacgtcaaggccaagatcggcctcgagggtgcccgcaccgtgccgccgcgcgagcacggcggcaattgcgacatcaaggacctgtcgcgcggctcgaagatctatttcccggtctatgtgccgggcggcgggctctcgatgggcgatctgcatttcagccagggcgacggcgagatcaccttctgcggcgccatcgagatggccggctggctgcacatcaaggtcgacctgatcaaggacggcgtgtcgaaatacggcatcaagaatccggtattcaagccgtcgccgatcacgccaaactacaaggactacctgatcttcgagggcatctcggtcgacgaggccggcaagcagcattacctcgacgtccacatcgcctatcgccaggcctgcctgaacgcgatcgaatacctgaagaagttcggttactccggcgcccaggcctattcgatcctcggcaccgcgccgtgccagggccacatctccggcgtggtcgacgtgcccaatgcctgcgccacgctatggctgccgacggagatcttcgacttcgacatcatgccgtcgtcggcaggaccgatcaaacacatcaagggcgacatccagatgccgatctcgcaagacaagtaatccctgcgcgaagggtgcgggacggctgcgtataggccgccccgcatccatcgccggatgtcacacgactgcgcaaggatttacggaaatgccgatctacgaatatctctgcaatgactgcggcccgttcaccgatatgcggccgatggcagaatgcgacctgccgcaggactgtccgcaatgcgagacgacgtcgccgcgcgtgatcctgaccgcaccggcgttcttctgcatgccgtcggacaagcgcaaggcatacgccaccaacgagcagagccggcacgcgccgaagacgctcgaccagtacaaggccgcgcacggcccgggctgcggctgctgctcgtcgtcgtccggaaagaagaagccggcgcggctgatgaccaagaccaagagcggcgccaaggggtttccgaccgcgcggccctggatgatcagccactgatcatcaggcctgttcggcgaccttcagggcctcggtgcggatctcctcgaccagccgctccttcaaggcgacgaattcgggtgtggtcttgatcttgtaggagcggggatgcggcaggtcgaccgcgatctccgccttgatgcggccgggacgggcgctcatcacgatcacgcggctgccgaggaagatcgcttcctcgatgtcgtgggtgacgaacagcaccgtcttctgggcgcgctcccagatcccgagcagcatttcctgcatcaaggcgcgggtctggttgtcgagcgcgccgaacggctcgtcgagcagcaggatttttgggtcgttggcgagcgcgcgggcgatcgccgtgcgctgctgcatgccgccggacaactgcttgggccagtggttctcgaagcccgacagtccgacccggcggatgaaggcgtcggcgatctcatgccgctcggcttgcgatgcgccgcgctcgcgcagcccgaaggcgatgttctcccgcacggtcagccagggaaacagcgtgtaggactgaaacaccatgccgcgatcggcgccggggccggtgacctcgcggccgtcgagcgtgacgcggccgctggtcggccggtcaagcccggcgatgatccggagcagcgtggacttgccgcagccggacgggccgaggatggtgacgaagtcattgtcgacgacatcgagcgtggtcggctccagcgcccgagtcggcgcattgccgccgcgcgcggggaaggtgcgcgagacctgatcgatccgaagcagggtcatgcgagcttccacgggaacagccaggcgttgaacgccttgaacaggaaatcggagatcaggccgatcagcccgatcacgatgatgccgaagatgatctggccggtgttgagcagcgcctggctgtcggtgatcatgtgcccgatgccggacgacgagccgatcagctcggcgacgatgacgtaggtccaggcccagcccagcaccaggcgcaggatttcggcgatctccggtgcggctgatggcagcagcacgcggcggatgatgccgctgtcgcgcgcgccgagcgtgtaggcggcttcgaccagatcacgccgcgtggcgccgacggtgacggccaccatcaggatgatctggaacacggcgccgatgaagatcaccagcagcttttgcaattcgccgatgcccgcccacaggatcagcagcgggatgaaggccgacgcgggcagatagcgcgcaaaggacacgaacggttcgaggaacgcctcgaccggcttgtaggcacccatcagcacgccgagcggcaccgcgatcacggcggcaagcgcgaagccgccgatgacgcgccagatcgtcatgccgatgtcgaacaggaagccctgtttggcaagcagctcatagccttcctgcaccatggtcagcgggttggcgaggaaggtcttggacacatggccgccgaacgtcgcccaggaccacagggcgacgaacagcacgaagaacgcgaggccgtaggccacgcgctgcctcgatgtggtcggttcgagaggacgcatcacttgatgaagctggcgtcgtagatgtcttcgaccttcggcgcggccttgatgatgccgacctcgagcaggagctcggcggcgtccttgttgaaggagaggaagtcgccggcgaagaacttctggttggcggccttgtcctgccagcgcaggtacttggccgaattgccgaactgctcgccggtctgcttcacgtccgcgcccatgatctcgtaggccttggcctggtccttggcgatcatgtcgagcgcctcgaaatagctgttggccagcgcctgcgccgccttcggattgtcggtcaggaatttcggggtgcagccgaatgtgtccatcacgatcgggtagtcgagcgtcgtggcgatgatcttgcccttgtcgggcgcggcgcgcaccgtcgacagatagggctcgtaggtcatcgcagcgtcgttctggccggagacgaaggcctgcgccgcggcggcgggctcaaggttgaccacggtgacgtccttcaccgagagaccgttcctcttcagcatccaggccagcgcgaaatagggcgaggtgcccggcgccgatgccgcgaccgtcttgcccttgaggtccttgatcgccgcgacgtcgttgcgcacggccatgccgtcggcgccatagctcttgtcgagctggaagatctgcttggtcgcgacgccattggcgttccaggagatccaggtttcgaccgtcgtcgcggcgcactgaatgtcgcccgaagcgatcgcgagatgacggtccttctgcgggatcttcttcaaggtgacgtcgaggccgttcttcttgaagatgccggcctccttggcgagcgtcagcggcgcgaagccggtccatccggagatgccgacgccgaccttgatgtcatccgcgaacgctgccgtggacgcgagcaacgcgaccattgcgggcaatagcttgaaggaacgcatgagtgttgaccccttgaacgatggattgaaccctgttgattgctcttacgtcagtcgcggcggattgccgcatcaggaacgtcggtggttggtggcctatgatgcattgcatgaattatgccgcgcaagacgtcgtcagcctcccttgaaacgcgcgaccaggcggtgcgtctcgccgggataatgcagccgcaccgccgtcaccgtgcgtgcgctgcgccaggtgtagcggtcgatcacgaggcagggcgcgccgaccgcgatggcgagggcctttgccgtgcggtcgtcggcaaccactgcgctgatcgtatgttctgcctcggtccacggcacgtggtgcagcagccatgatcccggcggctcgcgcgcaaaatccgcgttggcagcttcgggaaccgtggagagatcgatcagcctgtcctcgacggcgaacggcacatcgtcggcgctgtgccggcaggcgatcgcgatcaccttgccggcggtgccgacgccgagccgggcgcgatcggccgatgtcgcggtgcgccgccggcaatcgatcagctgatagccgtaagcgcggccgagcgcggtgatctcggctctgatgtcggcgatcttgagcactgcggacatatgctgcggacggcgcacgaatgagccggcgcgccgccgccgctcgatcaggtcggcctgcgccagttccgacagcgccttgttcacggtcatgcgcgagcagcggtagcgcgccatcaactggtgctcgaacggaatgcggtgaccgggcggccactcgccggtcaggatccgtgtctcgatgtcgagccggattcgcttgtagagtgtcggcttgccggctgcattgggtttggcccgatcggaagcgaggctcatgcgacgagcctccggacgctggcgttgaaccgctcgcgcgcactgtcgcgcagccggtgccgtccgcccgcgaccagtttgtcgccgccggcccagacgcagtcgatcgcgtcgctgccggccgcaaacagccagccgtctagcactgcatcgcccgaccgtcccgccagcgacggatgcgtggtgtcgaggctgacgatgtcggcgcgggcgccgggtacaagtcctgacttggcctgtgcgagcgcctgcgcgccgcccgcgagcgcgtgatcgaacagcgcacggccggtggacgcgccgggacgccccgagagcacgttgcgctcgcggtgtttcagccgctggccgtattcgagctgccgcagttcgtcggcgaccccgaccagcacgttggaatcggtcccgacgccgaaccggccgcccgcggcgaggaactcacgcgccgagaagatgccgtcgccgaggcttgcttcggtgatggggcagaggccggcaacagcgccactgccggcgagcgccgtgacttcctgctccgtcatatgggttgcatgaatcaggcaccagcgctggtcgacgggcgcgtgttcgagcagccactcgaccggccgctgtcccgaccaagcgaggcaatcccccacctcgcgcacctgttcggcagcgtggatgtggatggggtccgctccggcaagcggaatgatcgccgcgagttcatccggcgccacggcacgcaggctgtgcggggcgatgccgatattggcgccgggcaattttcggatcgcatcgcgcgaagccgccatcagcgtcgtgaactgatcgaccgagcagatgaagcggcgttgcccggcatgcggtgctgcgccgccgaaagtgccatgggcatagaagctcggcagcagcgtgagcccgatgccggaggcgtcggacgcctccgcgatgcgcaccgccatctcggccggattggcgtaaggcgagccgtcccgatcatggtgaagatagtgaaactcgccgacgcgggtgaagccccgctcgagcatctcgacatagagtagcgtcgcaacggccgtgacgtcgtccggcgtcatcgtcagcgcgaagcgatacatcgtctcgcgccaggtccagaacgtatccgtcgtatcgccgcgcagttcggcaaggccggccatgccgcgctgaaaggcgtggctgtgcaggctcgccaatcccggaaccgccaattggtgacgttcgtcggcgtccgtggatgcgacgccggccgtcaccgaggcaatgatgccgtcggtgaactcgacccgcacgtcattggcccagcccgagggcagcagcgcgaatgcgaaatgcagtcgtgtcatttttccatgccggctggacagaaccgggacacgattatatgtctagacatataagtcaagcatcccagctcgaggggacgatcgcatggcagagcgcttcgaccgcatctggtacaacgcccggctcgccacgatgcgcggtgaccgcgccgatctcggcgagatcgagcgcggattgatcgcagcgcgcgacggccgcatcgtctacgcggatgcgcaatcgaattttcctgtggacgcggacgccgtcgagcggatcgattgcggcggccgctggatcacgcccgggctggtcgattgccacacccatctcgtttttggcggcaatcgcgcgcatgagttcgagcttcgcctgaagggcgcgagctatgaggagatcgcgcgcgccggcggcggcatcgtctcgacagtggcggcaacacgcaaggcgaccgaagctgagctcgttgccggcgcgctgccccggctcgacgcgttgatcggcgagggcgcaacgaccgtcgagatcaagtccggctatggtctcgatgccgagaccgagatgcaccagctggcggccgcgcgcaagctcggccagttgcgaaaggttgcgatacgtacctctttcctcggtgcgcatgcgttgccgccggaagccgatggtgacaaggaccgctacatcgatctggtctgcaacgcgatgctgccggccgtggccaaggccggccttgccgatgccgtcgacgcgttcatggagggcatcgcattttccggagagcagacggcccgcgtgttcgcggcagcgcgcacgctgggactgccggtgaagctgcatgcggatcagttgtcgaatctcggcggcgcggcgctcgccgcgaaattctcggcgctgtcggccgatcatctggagcataccgacgaggccggcgccgctgcgatggcgaaggcgggaacggtggccgtgttgctgcccggcgcgttctatttcattcgcgagacgcagaagccgccggtcgagctgttccgcaaacacggcgtgccgatggcgctggcaaccgactgcaatcccggcagctcgccgctgacctcgctgctgcttgcgatgaacatgggcgcgacactgttccggatgaccgtcgtcgaatgtctcgccgcggtaacgcgcgaaggggcacgcgcgctcggcatgcttagcgagaccggtacgctcgaggccggcaaatggtgcgatctggcgatctgggacatcgaacgccccgccgaactggtctaccggatcggcttcaatccgctgcaccgccgggtgtggagggggcaatgagcaatccccacgcgcctgaagtcgtgacgcccgggacggtcggccttgatgcgctcgcgcgcgtgctcgcgggggcgagcgtcgagctcgatgcatcgttctggccgcgggtcgaggccgcggctgaaatcgtagcgaaggcggcgcagaccgacgttcccgcctacggcatcaataccggattcgggaagctggcatcgacgcgcatcgcgcccgaccagaccgcgctgcttcaacgcaacctcatcctgtcccattgctgcggcgtcggcccggccacgcccgagccgatcgtgcgcctgatgatggccttgaaggtcatctcgctcggccgcggcgcctccggcgtacggcgcgaaatcatcgagcagttgcagggcatgctggcacgcggcgtcacgccgctggtccctcagcagggttcggtcggcgcctccggcgatctcgcgccgctcgcccacatgacggctgtcatgatcggggaggggcaggcgatccgcgacggcaagatcgtgccgggtcacgaagcgctggccgccgccgggctcgtgccattgacgctcagccccaaggaagggctcgcactgatcaacggcacgcagttttcgaccgcctacgcgatctccggcctgctgcgcgcgcatcgcctggcgtgcgccgcgctggtgaccggcgcgctgtcggtcgacgcggcgatggcttccacggtgccgtttcgtcctgaaattcaatcgttgcggggccatgccggccagatcgccgcggctgcgactctgaccgcgctactcgacggcagcgacatcaggcagtcgcatctcgacggcgacgagcgcgtgcaggatccatattgcctgcgctgccagccgcaggtcgcgggcgccgtgctcgatctgctcgcgcaggccgcgcgcgggctgaccatcgaagccaatgccgtcaccgacaatccgctggtgctggtcgagaccaatgagatcgtgtccggcggcaattttcacgccgaaccggtggcattcgctgccgaccagatcgcgctggggctctcggagatcggcgcgaccagcgagcggcggatcgcgaccctggtcgatcccgctctgaacttcggcctgccgccgttcctgacaccggagcccggcatcaactcaggcttcatgatcgccgaggtgacggcggcggcgctgtacgccgagaacaagcagcgcgcgatgccgtgctcgatcgattccacgccgacgagcgccaaccaggaggatcacgtgtcgatggcggcgcatgccgcgcgccgggtgtccgacatggccgacaacctcgcttccatccttggcatcgagctcttggtcgcggcgcagggcatcacgctgcgcgcgccgcactcaacgagtgcaccgctcgctgcggtgattgccgccttgcgtgcgcatgtaccggcgctcgccgccgaccgctacatggccgacgatctggcgcgcgcagcgcggctgatcgaggccgacgcgttgcctgccgccgcgatcgcggtccttccgacaaatccgtttccaaaacttgcttagccgacaagggcatccgtcatgaaccgccgactggacaacgaacgtatcatccgcgctccccgcggcagcgacatcagcgcgaagagctggctgaccgaagcgccgctgcgcatgctgatgaacaatctggatcccgatgtcgccgaacgtccgggcgagctcgtggtgtatggcggcatcggccgcgcggcacgcgactgggagagttttgaccggatcgctgcttccctgcgcaagctcgaaggcgatcagacgctgttggtgcagtccggcaagccggtcggcgttttccgtacccatgccgatgcgccgcgcgtcctgatcgcgaattcgaacctggtgccgcattgggcgacgctcgatcatttcaacgagctcgaccggcagggcctgatgatgttcggccagatgacggcaggctcctggatctatatcggcagccagggcatcgtgcaggggacctacgagaccttcgtcgaggtcggccgccgccattacggcggcagcctcgccggcaaatggatcctgaccgctggcctcggcggcatggggggcgcgcagccgctggccgcgaccatggcgggcgcctcgatgctcgccgtcgagtgccagccgagccgcatcgagatgcggttgcgcacgggctatctcgaccgtcaggccacgactctcgacgaggcgttggcgatcattgccgatgcgaccaagagcgggaagcctgtctcggtcggtttgctcggcaacgcggccgaggtcttcccggaactggtgcgccgtggtgtgaggccggacgtcgtcaccgatcagaccagcgcgcatgatccgatcaacggctatttgccgaagggatggacgctcgccgattgggaagcgcggcgcgccgccgatccgaaggcggtcgagacggcggccaagacctcgatggtcgagcacgtccaggccatgctggatttccacgcgcagggaatcccgacgctcgattacggcaataacatccgccagatggccaaggacatgggcctgaagcaggcgttcgatttccccggtttcgtgccggcctatatccgtccgctgttctgccgcggcgtcggtccgttccgctgggcggcgctgtcgggcgatcccgaggacatcttcaagaccgatgccaaggtcaaggagctgatgcccaacgatggccatctgcacaactggctcgacatggcgaaggcgcgcatcaagtttcagggactgccggcgcggatctgctgggttggtctcggcgaccgtcatcgcctcggccttgccttcaacgagatggtggcgcgcggcgagctcaaggcgccgatcgtgatcggccgcgatcatctcgacagcggctcggtggcgagcccgaaccgcgagaccgaggcgatgcgcgatggctcggacgcggtgtcggactggccgctgctcaatgcgctgctcaactgtgcgagcggcgccacctgggtgtcgttgcatcacggcggcggcgtcggcatcggctattcgcagcatgccggcatggtgatcgtcgccgacggcacgccggaggcggcgcgccggctcgaacgcgtgctgtggaacgacccggcgacgggcgtcatgcgccacgccgacgccggctatgagacggcgatcgaatgcgcccgcgccaatgggctcgatctgccgagcctgcgctgacgggacttgatggatcgggagtcgctcggtgttcggccgcatctcctgattggggttcgcaggttagcgagatatctccttgcagccctcaaccttccggttgatggacgcgaggtgaccggctggacatgccttgacacgcgagatcggcggtgcagctaccggagatagttggtccacggactgctgcatctgtgatcggccgctgattttcgatttgcctgctttcgcgtcagcgtcgctgacaggatgagctgcgagggtccttgtctcgcggcagatgacatgcaatcttccgctcccggcaatgctgttcgagagcaacaagaacaataatccctctcgtccctccaattctgtcgagggcctgatcatgtcgaaccctacccaagcgacctccgctccgtggcggataggagtcctgttttcacgaaccggcttcatgtcggtcatcgaggaaacccaatatcagggcacgcagcttgcgatcgaggaggtcaatgaagcgggcggggtctgcggccgcgaactggttcccgtcgcctacgaccccggctcggattcggccgcctatggccactacgccaaacggttgatggtcgaggaccaggtcagcaccatcttcggctgctacacctcgtcgagccgcaaggcggtgttgccggtcgtcgaacggctgaacggcctgctttggtacccgacactatacgaagggttcgaggcgtcgccgaacgtcatctacaccggcgcctcgccgaatcagaacagcctcgcgctgtgccgctatctgatggatacgttcggaacacggttctatttcgtgggctcggactacatctatccgcgcgagtccaaccgggtgatgcgggaattgctcaagagcaatggcggctcggtggttggcgagcgctacgtcaatgtctacgcgcgctggcaggacttcgtccccatcatccaggacatcaagcgggtcaagcccgacgtgatcttctcgaccgtggtcggcgagggcaccgtgttcctctatcaggcctatgccaatgtcggcctcgatcccaggcaggttccgatcgccagcctgaccacgacggaggccgaaatcgccgccatgggcttcgacgtcggtgaagggcacgtcacggcggcgtcctatttccagggcgtcgagggcagcgccaatagtgcgttcgtgcagcgcttcaagaagcggttcggtgccgatatctcgaccaacatgtgcgccgaggcgtcctatttccagctgcatctgttcgcgaaagcgctcgagcaggtcaattcgctcgacaccgaggtgctgcgttccatggtgctcggcaccagttttgatgcaccgcaaggtgcagtcaccgtcaacccgatgtcgggtcataccgacctgtggacccggatcgggcgagccaatcgccagggacagttcgacgtcgtcagccagtcgaaggaagcggtgcatgcggatccgttcctgatcggatatggtcgtgcaacgcaaacaggaagcgcccaatgaacgaaatgtcgcgtaagccgtcaccgagccgagacgtcggcgggcgcaagaccatggttcaagagcttgccgatctgtcggcggtcgtggtcgcgccggtcgacgatcagatcggcatgctgctgcgcgaattgcagcgattccggatgcgggtgcgtcaggtttggccgatgccggaaagcgtgccggccgacgccgatgtggtgtactgcgaatattcgcccgaccttgcgcggcgcctgccgtggattcccggcgatgcgcgctcggcgctggtcgtgatcctgccggcgacggaggcggttcacgccgatgcgctgtgtcatgcgacgccgaacgccgtgctaccgcggccgttcacgccgaatgcggtgctgtccagcctcgtgctggcgcgcagtcagttcggttacgagcggcggctgcgcagcaagatcgagaagctcgacgacaatctgcgctcgatgcgcacggtggagcgcgccaaggcgatcctgatggccacgcggcagatgccggaaaccgaagcctacggcttcatcaggcgacaggcgatggatcgtcgcgtgtcggcaagcgcagtcgccgcggcgattgttgactcgttcgaactgcttggctacgatcatcaacagtaagccccaatagcggggccggcggcgacagcgccgccttcgacacaaccggcaacaaagccctcccaatgctcgcgtcagcgcgcatcgggagggctttttgttttttcaatcctgaagggagctagggatgagcatttcacggcggactttgctgaggaataccgcggcgtttggcgcatttgccggcgccggactgccgcatatctggatcaagaacgccgacctcgcttacgccgcgggcggcgagatcaaggtcggcgtgctgttctcgctgacgggaacgactgcgatcatcgaggaatcactcaacaaggcgacgctgctcgcgatcgaggagatcaacgccgccggcggcatcaagggcagcaagatcgtgccgatcgtcgaggatccggcctccgatccggcgacgttctcggagaaggcgcgcaagctcgtcgtcggcgacaaatgcgtcagcgtgttcggctcctacacctcggcgagccgcaaggcggtgctgccggtgttcgagcggcagaacaatctctattggtatccgacgctctatgaaggccgcgagtgctcgaagaacgtcatctacaccggcgcggtgccgaaccagcagcaggacgagttcgtgccctggctggtcaagaaattcggcaagaagttctatctgatcgggtccaactacatctatccgaaggaagagaacaactactgcaagaagctgctcgagaagctcggcggcgaggtcgtggcggaagaatatgtgccgctcggccattccgaattctcttccgtcatcaacaagatccgctcgacccagccgaacgtgatcttctccaccgtggtcggtgattccgtggtcgcgctgcatcggcagtacaaggctgccggcctcgatcccgagaagatgccgatggcgagcctgacgacctccgagaacgaggtcgcggcgatgggcggtgaggcggcggccggtcacttcacctcggcgccgtatttcatggtgcacaagtcgccggagaacgagaagttcgtcgaggcctacaagaagcgctggggcgccgacaaggtgacgcatttcgtctctgaggcctgctacttccagacctatctgttcaagcaggcggtcgagaagctcgccaccagcgacctcacgccgccgaacatccgcgacgcggtcaagggacagagcatgattgcgccgcagggcaaggtccagatcgagccggacaacctgcacacctggctgtggccgaagatcgcgcaggcgaagtcgaacggccagttcgagatcctggtcgaagccaaggactggctgaagccggtgccttacgcggcctatcccgggcagtcctgcaccgagaagggcctggtcgagaagagctgacgacgggagctgacgaaggccgtcggcgtgcggcgccggcggccagccacctgcaaccatggcttccctttgcgcgaatcgttgcgaggggcagggcgcacgagatcaccttgaagagcggattcgacgtggaccaattcatcgaacaaatcgtcaccggactcagcatcgggtcgatcctgctgctggtcgcgctcgggctatcgatcatctacgggtcgatgggcatcatcaatctcgcccatggcgagttcgtgatgctcggcgcttacgccgcctgggtgttccacacctatctcgggctcggcctgctggcgagcctggttccgatcttcctcgtggttgccgcgttcggctggatcatcgaacgctttgtcctgagcctgctcaacaaccggccgctggatacgatcctcgcgacctggggcgtcggcatcatgctgcagcaggcggtgcggctatcggtcggtagcgagctgcgttacgtgcagctgccgccggcgctgtccgacagcatgaacgtgttcggcatcccgatatcgtcgtatcgggtgttcctgttcgtggtgtcgatcgcgctgttcggagccacctggttgctgatgaaccgcaccacggtcgggatgaagctgcgcgccatcatccaggaccgctcggtcgccgcctcgttcggcatcaacgccaagcgggtttacgcgctgacatttgcttacggtgcaggccttgcggggctggccggtgcgctggtgtcgccgctcaagagcgtctcgcccgacatgggcaccggctatgtggtcgatgccttcatggtggtcgtgctcggcggcgtgcagagcctcgccggcaccgtggcgagcgccttcatcctcggcgagctctccggcggcatcgccttcctgcagaacgacacggtggccaaggcgatcgtgctgctcgccatcgtcgtcctcatccgtttccgccccgaagggcttttcaccgcacgcgtgcgggcctgagacagatcgctgattcatgccgtcgaatgctattacttccagcggattgcagcgcctgatcgcgcagcttgcaccgatacttgtcgtctgtgcgatcgtgttcgcgctgccggtgttgctcaacaacgacttcctgctcaacaaggtcgcgcgctatctggtgctcggcatcctcacgatatcgctcgggctgtcctggggcttcggcgggatcctcaatctcggccaggcgatgagcttcgggctcggctcctacgcgatggcgatggcgctgaagctcaagaccatccctgtgcacaccggagccagtggcctgccggacttcatggtctggaacaacgttgcgcatctgccgtggttctgggagccgttccgctcgctgacttttgcgattgccgcgggcctgatcgtgccggcgctggtcgcggcggcgctcggctggttcatgttccgcggacgtgtcaccggcgtctatgtctcgatcatcacgctcgccaccatggtggtgatcaatctcgtgatcatcgaccagcagagctacaccggcggcttcaacggcatcaccgatcttgcccagctcgagatcttcggcgtcgccttcgacgcctatggccgcgccacctactatctcgtggcctgctgcgtactgctcagcctgctggtcgcctttgccttcaccaagtccaaggccggcctgatcgtgcaggcgatccgcgatcatgagagccgggtgcgctatttcggctacgacgtcgcgctctaccagatcttcgtgttcgcgctgtcggcggcgatcgcggggctcgccggcatgctctacacggtggtgatggagtttgcctcgccgaccttcctcggcgtgcagctgtcgctgtcggtcgtggtgtggtgcgccgtcggcggccggcagagcctggtcggggcgttcctcggcgccgtgctggtggcaggcatgcagggcgcgctgtcggaatccgcggcgtttctcgaaacctggacgctggtgatgggcgcgctgttcgtgctcgtcgtgctgttcctgcccaaaggactcgccggcctcgcgcaggtcatcctgcgctggatcgtgcagcgccgccaggccgccagtggccgcgtcgcgcaaggcgtcggccagacggagggcagcacatgagttcgcatctcgatctccgcgacgtctcggtcagcttcaacggcttcaaggcgctgaacgcgctcaacatgagcgtgcgcaagggcgagctgcgctgcctgatcggaccgaacggcgccggcaagaccactgcgctcgacatcatctgcggcaaggtcaagccgagcgccggcaccgtcagttttgacggcaccgcgctgcaggatctcgaggaatacgagatcgcccgcgccggcgtcggccgtaagttccaggtgccgagcgtgttccgcgagctttcggtgagcgagaatcttgacgtggcacgggcgcgccgcacctccgtgctgggcaatttgcgctggagtgtcggcaactccgggcgcgaagacatcgaacgtctggccgaattggtcgggctcaccgagcagctcgaccggccggcggcctatctgtcgcacggccagacccagtggctggagatcggcatgctggtcgcccaggacgccgagctgatcctgatggatgagccgaccgcgggcatgaccgcgcaggaaacccgcaagaccgccgaattgttcgcgcggctgaagggtaagcacacgctgatcgtggtcgagcacgacatgggttttgtgaaggcgatcggcgacgtcatttcggtgatgcatatgggccagatgctggccgagggcaccgccgcggaggtggaggcgcaccctgaagtgcggcgcgcctatttgggatcgggaggcatcagccatgcttgagctgaccgacatcgacgcgttctacggcaacagccgcgccctgcagggaatcaacctgatggtcggcaacggcgagttcctctcggtgctcggccgcaacggcgtcggcaagaccacgctgatgcgcagcatcctcggcctgatggaccgggtcaccggacggctgtcgctcgacggcgccgacatctcgccgctgcgcacctatcaacgcgccaaggccggcatcgcctatgtgccgcagggccgcggcatcctgccgaaattcaccgtgcgggagaacctgacgctcggcaccttcgccgcgaggtccgccggcggcatcgaggaatgggtgctcgagctgtttccggtgctcaaggattttctcaatcgctacggcggcaatctctccggcggccagcagcagcagctcgcgatcgcgcgtgcgctgctggcccagcccaaggtcatcctgctggatgagccgaccgagggcatccagccgaacatcgtcgagcagatcgaggacgtgatcacgcgcctcaatcgcgagcgcggcatcacggtggtgctggtcgaacagaatgtcgcgttcgcgcggcgtgcgtctcaccgcttcgcgctgctcgaaaagggacgcgtcgtcgccaagggcgcgatcggtgaactcaccgatgatctcatccagctgcacatggccgtgtagcgggaattatcgttcaagaaagggagtcgagacatgttgcatggagatatatcgagcagcaaggacacggtcggcgttgccgtggtcaactacaagatgccgcgcctgcacaccaaggccgaggtgctggataacgcgcgcaacatcgccaagatggtcgagggcatgaagctcggcctgccgggcatggatctcgtgatcttcccggaatactcgacccacggcatcatgtacgactccaaggagatgtacgagacggcctcgtcggtgccgggcgaggagacccgcatcttcgccgacgcctgccgcaaggccaaggtctggggcgtgttctcgctgaccggcgagcgccacgaggagcaccccaacaaggcgccgtacaacaccctgatcctgatgaacgacaagggtgagatcgtgcagaagtatcgcaagatcatgccctgggtgccgatcgagggctggtatcccggcgattgcacctacgtctcggaagggccgaaggggctgaagatcagcctgatcatctgcgacgacggcaactatccggagatctggcgcgactgcgcgatgcgcggcgccgaactgatcgtccgctgccagggttacatgtatccggccaaggagcagcagatccagatctcgaagtcgatggcctgggccaacaattgctacgtcgcggtcgccaatgcctccggtttcgacggcgtctattcctacttcggccattcggcgctgatcggcttcgacggaaggacgctcggcgagtgcggcaccgaggagaacggcatccagtacgcccagctctcggtgtcgctgatccgcgacgcccgccgcaacatgcagtcgcagaaccatctcttcaagctgatgcaccgcggctacaccggcctgatcaactccggcgacggtgaccgcggccacgccgtctgcccgtacaccttctacaagaactggatcacggatcccgagggcacgcgggagatggtcgaggccatgacccgtccgacggtcggcaccgacgaatgtccgatcgagggcatcccgaaccagaaggtcgcacatcgttgatttgagaaaccaggccgtaccggcgcgatcacatgcgccggcacggttctcaaaactgttgcaaggggaaacgggggttaccatgagcagcgaagccaatagcggtatcgttcaccaggccgaaggacagatcgacgatcttctcggccacgaattcgagcacgagccggtgccgatcagcgcccggcgcagcgccttctcggtcaccatggtgtggctgggctttccgatgatcatcaccggcgcgatgaccggatcgctgctggtgctgggcatggggttcaagaatgcgctggtggcgatgatcatcggcaatctgatcatgttcgcctatgtcggcgcactcggcctgatcggcacgcggaagggcatgaactttgcgctgatcgccagcatcgtgttcggcaggaagggctatgtgctggcgtcgggcctgctgtcgaccctgctgctcggctggtacgcggtgcagaccggcatcaccggcgcgttgatctcctcgacctacggcctcaactatgtggcgatgaccatcgtcgccggcgtgctctatatcgggatcaccttcgttggggtgaagggattgcactatatcgggctggcgtcggtgccgctgttcgtcgtgctcggcctctgggttgcggctgatgcggcctcgaccacgacagcggcagcgatcttcagctatgccggcaacaatggcgtggccagcatgtcgatgggcgtcggcctcaccgtggtgctggcgctgttcatcgatgccggaacggtgaccgcggacttcaaccgctgggcgcccagcccgggagcgtcgctgttcgccaccttcagcgcgtttccgttcgccaatctggtggcgatgctggtcggcggcgtgatgacggcggcgctcgcagtgccgaacgccaatccgttcggcgtcgacaacatgttcggctacatgaacggcaagcagctgacctggctcagcatcctcgccttcatcttcctctacaccaatctcggctcggtgtgttcacactgtctctacaatgcggcgaccggctggtcgcgtatcctcggcaccaatatgcgtctgatggccgtgatcctcggcgccatcggcatcgtcgtcgccgcgggcaacgtctgggcgttcttcatccagtggctgtcgctgctcggcattctggtgccgccgatcggcgcgatcatcctggtcgaccagtatctgttgcgcaccgaggcgcgtgcggatgtcgactggcgtgccaagccgttcattgcctggggcatcgggtcgctatgcgcttttgcggttgaaaacctgatgcctgggctgtccactgcaatatcagccgcgctggtcgccggcatcgtgtacggcgcgatcgcgcgggtggagtcttcgaccgaaaaggtggcgcgtccggcgtaagcgatcagctcaatcgagcaagaaggatacatcaatgagcgtcgactatcagatttatgatctcggcaatttgactttgcagcgcggcgcgaccctccgcgactgcaagctcgcctacaagacgtttggccagctcaacgcggccaaggacaacgtgatcgtctatccgacctggtactccggccagcactacgacaatgaatggctgatcgggccgggcatggcgctcgatcccgcgaaatacttcatcatcattccgaacatgctgggcaacggcctgtcgtcgtcgccgagcaacacgccggagccctacaatggaccgcggtttccgcaggtgacggcctatgacaatgtgcgcgcccagcaccggctggtgaccgagaagttcggcatcaagcacatccgcctggtggtcggctggtcgatgggcgcgttgcagacgttccattggggcgcgctttaccccgacatgatggatctgctggcgccgttctgcggctcggcgaaatgttcgcggcacaattacgtgttcctcgaaggcgtcaaggccgcgctcacggcggacgccgcgtggaaggagggctggtacaccgacaagccggcccgtggcctgcgcgccgccgcgcgggtctatgccggctggggcttttcgcaggcgttctatcgcgagcagctcgacatcaagacgatgggctattcgtcgctggaggatttcctggtggcgttctgggagggcttcttcctgccgaaggaccccaacaatctgctcaccatgctgtggacctggcagaacggcgacatcagcgccaacgagatctacaacggcgacttcaaggccgcgctgcgggcgatcaaggccaagacctatgtcatgccggggcagaccgacctctacttcccgcctgaagacagcgagaacgaggtcgccaacatgccgaacgccaagttcgtgccggtgccgtcgatctggggccacttcgcgggcgggccggggaccaatccggtcgatgtcgccttcatcgatggtaagctcaaggaactgctcgcatcgtgagttcgaacgattgcgaacggctgcctgcgcgatcatgggaggcgtgagcttgtcgaatcccgctttgctgctcgaccagtaccgcatccgcgaggagccgtattaccggccgctcaaggacgaggtggaactgttcggtgcagcctatgcgagccgcatgccggtgatgctgaaaggccccaccggctgcggcaagacccgcttcatcgagtatatggcgtggcggctcggccgcccgctgatcacggtcgcctgtcacgaggacatgaccgcggcggacctggtcgggcgctggctgcttgacgcggaagggacggtgtggagcgacggcccgctgaccacggccgtgcgtctcggcgcgatctgctatctcgacgagatcgtcgaggcgcgtcaggacaccactgtcgtgatccatcctctgaccgacgatcgccgcgtgctgccgctggagaagcgtggcgagctgatccacgcccattccgacttccagctcgtgatttcctacaatccgggctaccagagcgcgatcaaggacctcaaggaatcgaccaagcagcgcttcgcggcgctggatttcggctatcccgaccgctcggcagagaccgaggtggtgtcgcgcgaggccggcatcgaaccgaacctcgccgatctcctggtgaggatcgcccagcacagccgcaatctgaaaggtcaggggctcgacgaaggcgcctcgacccgcatgctggtcaatgccggccgcctgatcggatgcggcatcagcctcgagaaggcctgcgagaccacgatcgtcgtgcccttgaccgatgacgcggacaccaggaacacgctgcgcgacgtgatctcggcctctgcgtgaatggacgctcgcaggtggcggtcgcgcaaatcagttcgctcgatagcttccggtccggacgccggcttgcggcactgctgcgcggccacgacgagatcggctcggccgtactggcggcgcgggccgcattgcagcgcgcaggggcaatcgatcacctcgcggcctgggatgaggctgtccacgacctgttcggtgccaatctcggccatgcggtggttctgggctttctgcggctgtcagagcaatggccggcgcagcgatcgaccgccgatctgatcgcgatcgggcacgccgccggcgatatcggccgcggcgcgggaagccgcgccgctcatgggttgctgaccgaattgtccaaggtgctgccgcggcttgccggtgctggagacctcaccgccgtgctcgctgcgcttggccaactcgccgatgctggcccggaatcggtgagccttgcgatcggccggctggagccgctgctggcgcatgccggcggcgcggacttttccgcctgggtttcggccggcttgcgcgcaagcggcggccgcgcgtcgcgccggcgcgcctatttcgcgctcgacgatccgttgtcagcgcggctgttcgcggtgggacggaccggcgacgactttgcacggctggagaagcgcctcgcggcgacgacgcttgcgctgtggaatagaaagccgcgcttccgcaagcttgccatggcaccgacgccggtgccgcggcgcacctcgctcgctgccggcttcatcggtcttccggagacccttcccggcttcgagggtgaggcggcggactttacctatctcgcggcggtcgcgcatgccggagcgcatcttgtgcactccaccgtccgctttcccgtggggcggctgaaggcgttgcagctcgcgctggtctcgctgatcgaggatgcccgggtcgagacgctggcgctgcgcgagatgcccgggctgcggcgactttggctgccgtttcacagcgcgacgccctccggtcaggcaaccgcggcgggactgatgatgcggctggcgcgggcgctgatcgatccggactatcgtgatccggatgcgtgggtgggcaagggacgacagctgtttgccgctgccgccgagcgttggacggatccggcgatcagccgcgagatcggcgggctgctcggcaacgacatcgggcagatgcggctgcagttcaacgccaagagctatgtcgtcgaaccggcgtaccgcgacgacaatctggcgctgtggaactttggcgatcagccggacagcccgaccgagaccatcgaacttgcggtcgattccgtgcgtgtagagcgtcgcgaggacgccgatggacagtccaccgacgacaatgcaagacccgacgagacgctgcgtgccaaggccgccgcggtgacgctgctcgacggatttccggtcgcgacctatccggaatgggattacgcggcgcgggccgagcgagcggactggacaacgatcctggaggccgatgcggccgtctccgcgcagccgtttgagctaccgacggacaccgagacgacccgctggatcacgcggttgacccgcgacgcgtcgatcggccgccggatcaggcacaaggggcagcgcgacggcgaggcgctcgacatcgacgcggcgattgccctgaccatcgagcgtcgcgctggcagcatcagcgaaccaagggtctaccagcgcgatgcaccggggccgcgcgatcttgccattctgctgctgctcgacctgtcgcaatcgactgctgaccgcgaccgccgtggccgcgccgttctcgatgtcgagcgcaaggcggccgcgatcatggcagcggcggtcgaggccgccaatgacgcgatcgccgtgcatggcttcagctccgacggccgcgagcgcgtgcgttatctgcgcatcaagggctttgaggagccgatggatgccgtcgtgcgttcgcgtctcgccgggctcggcagcagccattccacccggcttggcgcggccttgcgccatgccgggggctacctcgcggaacgacgcgcattccgcaaggtgctgctggtcctcaccgatggcgagccgtccgatgtcgacgtcccggacccgcaatatctggtcgaggatgcgcgccgggctgcgcagcaattgcggcggcgcggcgtcgacatttttgccttcggtatcggtgaggacaggtttccccagctcgatcgcatgttcggcgcgcgccatgccctccgggtgccgcgcatcgaggtgctgccgcaccgggtgatgcagctctatgcggaactgaagaaataatggggaccgccgtccccggggccggctcaggtcttcctcttgcgcctacgcaccgctgtcacacttcgacgttaacgttgcagattggacacagcggcccgcctgggaacaatcgacgcggacacgatgagtattggatatctttcgaggggccgggcggggcgcccctcagatgcttgtcggctatacgttctgatctggctttgcatgctgggcgccagtgccgacctcgcggcgggacaggagaatacgaacgcgtctgcgccgcgcatgccgttcgatattccatctcagcctctgacatccgcgctggaacgttacggcgccacggcgcggcgtgaggtgctttacgatgcgcggcttgcgaccggccggcgctcaagcgaggtgaggggcgatttcgcgccgtcggatgcgctgcaggtcctgctcgacggaaccggcttggtcggccgtctgacgtcggagaatgcggtggtgatcgtgccctcgtctccggcggccgggcagccggcggcgcccgacatcgatccgaaaaaggccgatctggtcatccgcgcccgttactatgcgcaggtgcaggagcgcgttcgggacgccttctgcagggacagcctgttgcggccgggccgctatcggatcgcggtgcagttctggatcgcgtcgacgggcgccgtccagcagaccaggcttctcggcaagacgggtgatgcgcgcgtcgatagcgcgatcgagacgacgctgcgcggattgagaatcaaggacgtgccgccgccgggcatctcgcaacccctcaccatggtcgtcgcgccgcgcccgtcggaacagacgcaggactgcgccgggatcgacgcaatccgtaccagcggcgaggtaaactgagcgtgctgcgatgagcgacgcaaaccggaccatgctccgcagcttcctggctgaccgttacgacgatctcaagcagcggctgagccgtcgtctgggatcggcggagctcgccggcgatgcgttgcaggacacctatgtgcgtctcggccgggccgaagtggcgggggcggtgcaaagcccggccgcgtatctgttccggatggctttcaacgtcgcaatggaccggcagcgggccgaaaaacggcgtctcgcgcacaacgaggttcaggatctgctccatcttgtggacgacgcgccggggccgagtcagattgcggaggcccgtttcgagatcgaggccctggagaaggcgatcgccgaactgacgccgcgccgccgggtcatcctgctggcggcacgtctccagggcatgccgcagcgggaaattgccagccggctgggggtctcattgcgtctggtcgagaaggagcttcgcctcgcccaggaacactgcgcgcgaaagctcggaaaataattgtgcggttcatggcgatggcgaacgtcaaatggacaagcggacgacccggctgcggaggccgggtgcgctgcgaggcaggcaagtctgcatgacgagcaaaggcggtaaatcgacgatgggcctcggcgcgatggagcgggaagcacatgcctgggtcaggcgcttgacgtccggagacgcgacggtcgaggacgccgacgcattccagctgtggcgccgacagagcgcagcccatgccattgcgttcgcgaaggcgagcaagctctgggagacggtcggtagcgccggccataacctccgctatgaccctgcatcgcttggcgtgttgctcgatggcgaagcaaggcgcgtgatgacccgccggcgggtgcttcgcggcggccttgcgaccgccgccgtggctgcgggggcagtggcgctgcgtcccccgcttgcgctctggccgtcatggtccgagctcgcggcggactaccggacgggtgccggagagcagcgcaagcttgcactgaacgacagcgtgtcgatcaacctggatacgcggaccagcatcgcgctgcgcccggaccatggcgacagtagccggatcgagttgatcaccggacaggcatcgatcgcgacgaccccgcaggtgtcgcgaccggtgacggtgattgcgtcgagtggccaaacggttgcaacgcaggcctcgttcgacgtgcgctatctcggggccgaggtccgcgtcacctgtctcggaggcgaggtccgcgtcgagcaccagggaaatgcccgcattgttcgtgaaaggcaacagatcgcctatgacgacaggcgcatgagcgacaccgtcacgatcgatccggccgtcgaagcggcctggcaagagggtttgctgatcttccggtacacgccgctgcccaaggtggtggaagaggtgaacaggtaccgatcgggccggatcttcatcgtcaatgccgagctgaacgcccatctgatcaatggccgcttccatatcgaccggatcgacgaggttctcgtgcagatcgagcaggcctttggcgtcaaggcgaaaacacttcccggcggcattgtgctgctgagctgagcagaggcgcgcagggctgcaaaaaaattccgaccggggcgtgcgggtcgagccattcgggatcgtctcagccgcgagggtctcggtgctggtgccgagacgcgaaatgttcggctgttgtcgcccggcgcaagaaagcgatcccatggtttcccgcccctccaggtccctgtcccgcgcgaccgttcgcaccacattgttcggcagcgtcagtgtcgtggcgcttctggccagcgcaccggtggttgcacgcccgttcggatcgagctggacggtgtcgccctccgccgcggcgatggcggcgtcgcagtcggccgcgcaggatgcggcggcggccgccaagcaaggccaggatgcgatggcgcgggccacgcgcgccatccaggcgatccagggcttgcagaacgctgcgcgcagcgcggcccagacctcgcagcgttcggtgacgctgccgcaggtcgcggtgcccaatggcctcgcgcccggcggcctgcaggcggcgccgggctggcagggcgccaatgcgccgacccaggcggtcgacgccgccggccagacccaggtcggcatcgcgcagaccaggccgcaggcaatcctcaactggaattcgttcaacgtcggcgcgcgcaccacgctgaccttcgaccagcagggcaatgcgaactgggtggcgctcaaccgcgtggtcggcagcacggcgccgagccagatcctcggcaatatcaaggccgacggcgcggtctatgtgatcaaccagaacggcatcatcttcggcggtgcgagccaggtgaatgtcggcgcgctgatcgcctcgaccgccaacataacggacacccagttcctcagaaacggcatctactcgcagcaggccagcggccaatacgtgccgagcttcaccgatgcccgcggtgcggtcagggtcgaggccggcgcgctgatctcgaccaacccgccgtcctcggtgacgcagggcggcggcttcgtcctgctgatggggaccgaggtcagcaatgccggctcgatcaccgcgccgcgcggccaggtgcaactcgcggccggcaacgactttctgctgcggccgggttacagcacggatgccaaccagggatcgaccacgcgcggcaacgaaatctcgccgatcgtgcgcgacgcgatcgccgcggtcggcaataccggcctgatcttcgcccagcaaggcgacatcacgctcgcgggccgcagcatcacccaggatggcgtgctggtcgccaccagctcggtcaacacccgtggcaccatccacctgttgaacgccgcgtccgacgcagcgggcagcgtcacgctcggcagcggcagtctgaccacgatcctgccggagctcgacagcagcgagaccgcgctcgacagccaacgcagccaactggtcgccgattccaaggccttcgcccacgctccggtcgccaacgcccagttcgacaatctttcacagctttccgaccggctcgaccagggccgtatcgagatcgtcagcggcggcaccgtcaatttcagggagggctcgaccacgcaggcacagggcggtcaggtaacggtcagtgccggccaccgcgtcttcgccgaaagcgggtccgtcatcgacgtctcgggtgtacgcggcgtgatgctgccgatgtcgaccaacaacctcctgatcaacgtacagggcaacgaactgcgcgactcgccggccaatcgtgatcgggacaatctgaagaacgcggatgtctggatcgatgcccgcgacctggtgctggtgcccgcgggcaccggcggctatgcgaccgaccgctattacacgccgggtggcctgctcgaggtttccggttatctcgccaataccgcccaccggatcggcgaatgggccgcggttggcggcaccgtcacgctgtcggcgcaggaagtcgtggcgcagaagggggcggtgttcgacgtctccggcggttcggtcagctaccagggcggttatatcaggaccaccaatttccttggctcggacggtcgtctctacagcgtcgggcaggcccgcgccgacatgcagttctacggccccggcgccggcttcattcgcgagcacaagctcggcggcaaggttgcaccgaatctgaccgaagtctggaccagcccgttcggcaaggcccgcgtgacgacccgctgggaagacggctacaccatcggccgcgacgccggctctctcgtgctgtcgacgccgacgtcagtcttcgaagctgacatcgtcgccgatgtcgtcaccggctcacgccagacgacggctcggccggacggcgtcaccgacggctacaagctgtctcagaatgttgccccgctccagggcaagctcgcgctcggcggctattcggggctgggtctcaccggtgcatccgccgcgcgggtcgccttcgggcggacgcctgagatatcggaggcgctgaacgtcacgtcggtcttgcccgacgatcgcatcgggaccgcattcttcaattcggacacgctcaacgccgccaagctgggcggtctcaactttgcgagcagcaaggagatcctcgtcgaggcgccgctcgaactcgcccccggcgcacaggtgatcttcgcggcgccgcatgtcgaactcggcgcaaacgtcacggcgcatggcggcagcatcgcgctgaccaatctgatgcatgctgtgttcggccagaaccagaacgagcaatggtgggcgcttcgcgacgcggacggcaagtcgcaggtcacgatcggccagaacgtcgccgttgatctcagcgggttgtggagcaacggactgacaggagccgatgtgtccgggcaggcgcatgtggatggcggcaacttcacggtttcgacgacgggcggcatcacgcttgcgcgcgggtcgctgatcgacgtgtcatcgggcgccgccatcctggcgaccggcaagaccaagggcggcaagggcggcaatgtcagcctggtcgccaatgactattcgcatctcgcctggacgcaattcttcaccaatccgctcatcctcgatggcacgatccgcgcgtatggctttgccggcggcggaacgctgacgctgaacgcgggccagcagatcgcgatcggcgcggccgtggccgatgcgctggtgcttgatcccgcgatcttccagtccggcttcacggcctacaacatcagcagcaacaccggcattcagatcggcgaaggcacgcgcgtggacgccgaggtgccggtctatcgcttcacccagggcagctacaccgcgccgagcggcagcctcgtcacggatgccgcggaactgtggacgccacccaaatttacaatcaactcgttcacgcatggcgccacgcagcgtgccggtgccgatctgacattctggagcctgcatgatttcacgctggcgaagggcgcatcgatcaacgtcgatccggggcgttcggtttcgatctacgccaatcgtcagacggtgatcgacggcacgatcaaggcgcccgccggcaatatcctgatcacgagcctgcaggacgccaccggcgacaccaggtacaatatgggttacggcgagttcggcctgacgcgctcgatctggatcggcgacgacgcggtgctggatgtctcggcccgcgatgcggtggggcgcgacgagcgcggggtttcctacgcagcggtgccggatggtggaacgatcagcatcggcggcactggagggctcaactccgacggttatcccgtggtcagtgatgccttcgtgatcgttcggccgggcgcgttgatcgatgcgtcgggtacctctgcggtggtccaggtccagaacggcaggacctatatcccgacatttgctgcgagcgacggcgggaccatctcgctgtactcaagtttcggcatggcgctggacggcaccatgcgcgcagcggccggtggcagcggcgcctccggcgggacgctgaacctgaccatgtcgagtcgcggctatgcaacggggcagcccaacgcgaacgcgccctatgccgtaggcgatctgcccgcggctttccagcggtcgcgcgatatcaggctggtgcagagcgccccaggcagtggcctgagcgccgatctgctgcccggcgaggccgatccggccatgcaattcggacgggcggtcatcggcgtcgaccagatccagaagggcggctttggatcgctttcgctctacacgcgcgatcttctcatctttgacggcaatattgatctcagcctgtcgcgcagcctgcacctgtccagcggcgtcattgccgccgcgcccgatacaccaaacagcacaatacgcctgtccgcatcctatgttcgcctcggtggcgtctacgacgcggcaaaggcgcaagcgcaagtgggttattccccggggatcaacgatcttcacgtccgcaatccgtcggacggcggcagtttcacgatctccggcgatctgatcgacgtctatggcaaggtccagttcggagccaccggcagtcaaggcagcggagacgtgaattttggacgtcccgtcaatctccccgtcgatgcgcgcggctttcaccaggtcaccttgcagagcacgggcgacatccggttcggtaatggcggtctcgatgtcgagaacctcgcgctgaccgcggaccagatctatcccttgagcggcgcagtcgcgaccatcattgttgggcttcgtccggacggggtggctaccggctacgatccgtatgcccgtctcgtcatccgccgtaatgacgacgcgacgccgacggtgccggcttcggtctttggcgaactggtcttcattgcctcgaacatcgaccagggtggagtcgttcgcgcgccgctggggcgcatctggttcgacaattacgttcaagcgtatgccaatggtttacccgatccacacgtcacgttccgcagcggcagcatcacttccgcgagcgctgccggcctgatcatgccgttcggcgggacttcggacggcatcacctatcaaggtgcggacggcaccttgctcaatctggcgagcgcctcgattgtcgatacttcgggcaatacaaagatcgcgagcggcgtttcgatcggtgccacatcgttcgtgggtgaggccggagccgtgatcgatctgaccggcggcggcacgctgaccggcgcgggtttcatctccggccggggtggctcggtcgatgtgctgaagacggtactcgtcaacgccaacccgatcaacaattacagtgcgaccggcaacaaggtctacgccatcctgcctggttacgcggcgaactatgctccggcgatcgcgagcaatggcgcaggcgatcctgcgatcggccagcagatcacgctgtccacgggcgtgccggggttgcctgcgggcacctacacgctgctgccctcgagctatgcgctgctgccgggcggttatcgcgtcgagcttggcgcgaccggaacaaccatgatggcctcggcggcggcaggcaacggctccgtcgtcacgtcgggctatctcggagttgccaatacggcaatcctggacacgttgccgacgcgggtgatcctcaccgctggccagactatgcggtcttattcgcagtacaacgagaccagctatgccgatttcgcacgtgcgcaggcagccaagttcggtggcttccggccccgcctgccggacgatggcaaggtactcgaaatcggtcttcgcacgccgcttgatggtagcaaatcgctgtccttcgccggcaccgcgtcgttcgagggcgccaacggcggcattgacggtgcattgatcgtcaggccgttgctcggctcgtcgggtcctgccgtgctcgacatcacggcgtcaggggctgcgccgattgccggacatacgtccgtatcgagcgacgacgtcaatgccttcaaggcaccgacgctgctgttgggcggcacgagtacattctacaaggaggacaatccgggaaccggcgccaagatctattttgacgcagggggaaccgcggccgtcaatctgctcgacggcgccaccatccgtgccggccaggttttcctggtcgccaaaaccatcggcatgtcgggcggcgcgacgatcgatacgcgtggactgggcaatgggatcgtggattcgacgctcggctacgtctattcgaacatcggtccttattcgtccgcagatcccgcaaacagtccggccgtgctcgcggtcgccaatggctggttccaattcctggatgccgtcggacccggcaagatcagcatcgccagcggtgcctcgctcctcaccaacggcagtgtggtactcgccgcgccgggcgggctcaccatgggcgacgtcaatttcggcgcgcgttacctcaacgtcacccaggagcaggtcaatgtcggcaccgaggccgcgctcgccgcggcgcaggcggcgggccaactgccaacgggctggaatctcacccaaggcgtgctcgacaagctgctgcggccctctacgactgcgggcacgcccgcgctcgagcaactcatcatcacggcaagtggctccttcaatctgatcggaagcgtcgacctcgacaccacgcgccagggcgggtcttcgtccgattctctcaaattcgttctcaatacgccggccatctatggcctcggctccgcgagcgacacggcccgcatcaccgccgacacgctggtctggaacggcatccgcacgggcagcggcactgtcgcgagcccatacggaaaccaggcgcccggcgccgtcctgcccggcgggcccggcaccggatcggggcatctcgccatcacggccaacgaaatcttgttcggcttcgacgcatctttgagcaagccgaccgacggcgcaacgctgggccgcctggcgctaggcttctccgatgtcacgctcacggcggcgaagcgtgtcatctcgaacagcaacggcacgctgacggtggggctcagccaggacagcaccggcgcggtgcagggcggcacgctcaccatcgcgaccccgctgatcacggcgagcaatgggtccaagctcgatgtcagcgcgggcgctgccttgcgtctgatcgcgccggcaggggcggcttccgccgatacgcacggcgtgacggatctcggcggcacgctctctttcactggcgacagcgtctttctcgacaccgctttcgccttaccctccggcaagctgacgctgaatgcgacgcacgatgtcgtgctcggtgccaacgcgaccattgacctctccggtcgcggcatcgctttcttcgacgtcaccaagttcagctggggcggtgatctcatcctgagctcgaccaacggcaacatcattcagaacgcgggctcggtgatcgatgtctcggccgtgaacaacgcggcgggctcgatctcggccaaggccatcgacgccgcccatgggcaggtttcgttcgccggtgcgctcaggggatcgtcgacgggcgattttgacagcggccagttcacggtagcggcacagaatttcggtgagttcgccgcgctgaacgccaaactcaacgatgccggtttcttctacgcccgcagctttgatctccgccagggcagcctcgtcgtcggtgatggcgtcaaggcgcgctatgtcacggtctcggtcgatcagggcagcctcgcggtgaacggcaggatcgacgccagcggggcgaagcccggcaccatccgcctgtccgcgagtggcgatctcagtctcgcgtcgaatgccgtgctcgatgtccatggcaacgtgctccagaccgacagctacggggcggcgatcgaacccaacaacacggcgcgtgtcgaactcaccaccacgcacggtaccatgacgctggccgcgggcgcgaccatcgacatgacgtcgccggacggcgtcgcgcgcggcaagttggagctcagcgcgccgcgccgcggcggcgccggcggcgatggtgcgggcgccaacgatatcgcgatcgacgcgcgcggcccgctcaatattcgcggtgcgagcagcatcgcgctgaacggtttccgcacctacgaccttccgggcggcagcatcatcgatcaggcctatctcgatagtctgcatgtcgacagcacgcagttcatcaacgccgcgcttcagaacagcgacttgcagaaccgcctttccgggctcgcggcctatggttccgccttccatctgcggccgggcgtcgccatcacgtccgatggcagcctgtcgaccaagggcgatctggatttctccggttaccgctacgggccgaatgccgatccggcggtgcgcggctccggcgagccgggcgtgctcgtggtgcgcgccgcgagcgatctcaagatcaacggcagcatcaatgatggtttcgcgccaccgcccgcttcgccagatgcggtgacggtgattgccacgggcacgttgacgtccccctacaccgttacgaccgatggtgtggtcatcggcagtggatcgaccataccgaccagtgccacagtcaacatggagctcaatctcgctgacggcacggtcaagctgagcccgagtgccgcacatccgctgcccgccacggtcaccttggcggaggactacaccgtcagaggacccaatgttcagaccaggaagctgaatggcgggcacatcatcacgccggataggacctacaatccaggtgatacgttgctgaccaacacggaatttccggccggcaccgtgttcgaaaaaggcgtttattttaccgggccggccttcatcaatacgttcaacagtctggttctccagccgctgaggctgccggcgggtgctagcctttatgtattcggggggtacacattcgctgccgatacgccgcttcccaagggcacggtgctgccggccaacatgttgaacgtcaatctgatcgggcccggcgatcgccaggcctgggcgatcgccccgatgctcgcacctggcacgcaatcctggtcattccggctggtgggcggcgccgatcttgcgagcgccgacagtcgatcgctgcagaccgccggcgcgctcgccggatctggcaatgttgtgttgaacgatccgttcaacgtcacgatcaacaagccgacgacggtcggcgtcagcgtcctgcgcaccggcaccggtgatctcgaaattcttgccggcggcaattacgaccagcaatccccgttcggcgtctacacgtccggcaccgcggtcagggagaccgggacggcggcgaatgatccctacaacctcgcccgaggcagattgaccgacggcaccctgcttggctccgacaacgccaactatgaaccgacacttggcccggaacggttgtactaccccgaacacggcggcgatttcctgcttgtgacgcagggcgacgtcaagggaacgctgaggccgggatcgacccagatcggctcctggttgtggcgccagggcggctccgagatcggccagcggacggcctgggggatcaatttcggcagctatacgtacgatcaaatccgcgaccccagcattcagtcgttggggttatctgcattctccggtctcggcacgctcggcggcggcaatgtcacgctgcaagcgggtggcacgatcggcgatgcaggtcgcggcgtcgtcgtcgccgtcggcggcagtggccgggtgatggccgatggcagtctggtgcagacaggcggtggcgtgctgtcggtgaaggcaggcgatatcggtaccggcggcaatcagttcgtgaacctgcgtggacggatcgacatcgcgaccggcgatttcggcagcctggtcgcgacaaactttcgcaacgatggcgggtcggatccgcgaccgatcaatccgttgacggcgtattcgatgacgacgcttgtcggtggcgatttcgcactgggcgacagcgtgatcgaccttcgtgcgcgcggcgacctggcgatgggagcgattatcgatccgggcatcgtcggcatgaccggcttgaccgacatcggcagcggctccgcgagcggcgagggcgcgagctggttcacgctgtggacggggaacaccgcggtgaacatgttcgcggctggcggctcgctcgcgtcggccaatgcctacagcgactcccgcttcttcccctcgatcgtccggcagatcgccgcgaacggcaacatctacaatccgggcggcgggatgatgctgccgtcacagaacggcgagctcgaggtgctggcgcagggatccatccttggcgacacactcgtgatgggtccgttgacgacatcgatgtcggctctcgcgacaccgttctggccgggctgggcaagtttgctcggcagccgcacggggcagtcaataactggctccaattattggggcgactacaccgccgtgaacgatagagccaccaacggagccgtctactcctgggaccgaggcgggcaccccttcgtctttgatgcaaacacggtgaaggatcgggccgtgcaggacccgggtaatgtgtcacgcatctatgccgtgaacggtgatatcacgagcatcacatacgggcaggccatcacggtgcgccgctacgtcggcaacattgcctttgacagtctctactatcaggcagcagggccgctgcggatgctggccggcggcagcattgtcgataccaagggcttgatcctgcacgacgatgcaaacgatgtctcgaccatcgcggcgggtggcagcatcatctatgcaggctggccagggcttgacgccaacgcgaagccaggctggctgattgcgggccccggcacgctcgagatcacggcggccggcaacatctatcagggatcgaccgcgacggtcgaaagcatcggggctctcgccgccggcgacaagcggctcggcgctggtgtcgtcatgcaggccggtgtcggcacgggcgagatcggcaccggacaggtggactggtccggctttgccaagctttatctcgatccgggcaatctggccggtgcggggccactcgctgaccagcacggcaaggtggcgaagacctacggcgacgagctttatgactggctcacggaacgtttcggctatggcgggaccaaggcggatgcgctcggttacttccttgcactgccggacgcgcagcagcgcatcttcctgcgccaggtctactatgccgagctgaccgcgggcgggcgcgaatacaaccagaccggtggcccgcgcgccggctcctatctgcgcggacgcgaggcgatcgcggcgctgttcccgaacccgtccgcctatcgtggcgacatcacgatgttcaccgcggcctccggcacgccgggcgcggcgaactacaagattcaaagcggctttgttcacaccgatttcggtggcgacatccagttcctgacgccgggcggcggcgtcacgatcgggaccgagggactggtgccgggcgccgatgccggcctcatcacgcagggcgcgggcaacatccagatctattcgcagaacagcgtgctgatgggcctgtcgcgcatcatgacgacgttcggcggcaatatcgtgatctggtcggcggagggcgacatcaatgccggccgcggcgccaagaccacggtgatctacacgccgcccaagcgcgcctacgacaactacggcaatatcacgatatcaccggtggtgccgtcgagcggcgccggcatcgcgacgctgcagccgatcccggaggtgccgcgcggcacggtcgatctgatcgcgccgctcggtaccgtcgatgcgggcgaggccggcattcgcgcgtcgagcttcgtcaacatcgctgcgctacatatcgtcaacgctgccaacattcaggcgcaagggggcgtgatcggcgtgccgcaggtccaggcacccaacatgggggccctgagcgaagcctcgaatacggcgggagccgctgccaagcaagccgccgtgccgccgccaagcaccaacgagcagccctccgtcatcatcgtcgaagtgctcggctatggcggcggcgacggcagcgatgatcagaagcggcgcggcaacgacaagcaaagccagtatgacccgaatagcgccttccagttgatcggcgacggtcaactgagcgcggagcagatgaagaagctgacgccggaggagcgccgacaggtcgtgaactaggacatgatccggaaaggtgcggagcgggcagcgcttcacctcgcccggcatttgcggacggggggaagcatgatttctgaatattagaaatctgagttgcccgacgtgtcaagtagccctgtcgacgccggcagccgccggctcctttgcatggggttgttttcgatatttttgtagcgcgcggctgcggcggcggggcaatcgtgttcgatcgcttcacggacccatcatgcccggtcttgggccgggcttcggcgataccgactagccggttgcgcggggcagggagccctttgcggtgatctcggccgagagctcctcgatggtcttgcgctgctccatggcggctcgccggatcagcgcgaaggcggccggttcggccagcgcgtgcgtatgcatcacctgaagcacggcggcgagcacgacgcggcgcgatcgaaggcgctgttcgagcttgagcacctgctgcttcagttcgttgctgcgctcacttcgttcgaatgccagcacgagcgcggcatagatgccggccgagcgcagcggcttgaccaggaacgatgccggatcgaggtcgagcaccagcttcaggcggctcggcgtctcggtgccgagcagggcgatgaccgggctgcgcccgagcgatgcacgctgcgccggcgaggtgagcggcaggaattcgtcgtcgatcagcgtgacgtccggccggcagtcgacattggcgttgccatcccatgtgacaatgtcgatcccgagccgctcgaactggcgcctgacgatggtggcgtcgcgctcgtccttgatggcgaccagcgccttgcgtccgcgcagcgaaaatgaagacggtttgctcatttcacgacccgcaaatgtggcgcgttcggcaacgtcccatcccgcgcgggactggcggcgatgtcgagctgcgtcagataaggatccggcctgaccggagcttcggcttcccagaagatgtcgaactgtccttcggcgttggagacggcgagccgcggcgtcaggacgcagtggttgttgctgccgtcgatccagaccggaccctgcggcgaattgtagcgatggccggccgcagcgcgccgcacctcgccgatgtcggacgtgccggcgcgctgcagcgcgcgggccagcagatagaccgcgacataggcggattggccgtcaaccgacgggctggagtggtcgccgtgacgcgccttccagcgcgcgacgaaggcccggttctccggcaggcggatgctctcgaaataggccgacgacgtgatgcagccggccgatgcgggacccgcgatcttgagctcgggctcgcacaggctgcagctcagcatcggaatgtcgagacccgcagcaagggtcgcggcatggaaggcgcggatgaaatcatagctcgagctgccgaccagcgtgttgaacacgaccggcggccggcggcgcacgatctcgtccacgatgtgcgtgaccgcgctctcgccgagctcgagcaggcgttccgcgagaatccgtccccgcgccgccgtcaccagctcgcgggtgacgcgattggtttcccaggtccagacatagttggagccgacgcagaatatctcgcgcgacagattgtcgagcacgtagcgaaccagcggcagcacgttgtggttgggcgaggcgccgacatagatgacgttgtcggaacattcgaagccctcgtaacgtgccggataccagagcaggcggtcggtgcgctcgacgatcgggagcacctgtttgcgcgaggcggacgtgtagcagccgatgatgtgctcgaccccgacattgcgaatgaggtcgtcgcagaccgtatggtattccgaaatgatcccgcgggggtcgcggacgtgcgcagcgatcgagaagtcgaattcgtcctgctcgttgatctcgtcgaccgccatcatggcgctcttcaggatctcgcggcccatggcctgataggggccatgctgcgagcagataatgccaacgggaatggacggcttggtcatcgacgactttcggtgcaacgcgcgaaggaaatcatcttcgcagaggccggcgcaagaggtcatgccgatttgctgcgcatgtaccttgcgaaatttgtgcagccagcctcgttgacaacgcgctgcacacctccttagaattttctcctacagggcttcctgtcgaaccttgcgtgcgtcgatctggccgatgacgtcccgatcgccgcgcagagtgctccgttcgatcacggttccttgcgatagatcatagccgcggcatttgggccattcgtcaccttcgttttggaggggcgggtggctttttgcttttgccgccgaacaaattggcgacacgcccgtgtcgccaagccgaaggcgcatgcgcggtgatgggcaaggcttgcgtcgtgccaaatgcggtgccaagtgcggggaatgagaaacgatgccgacgacggatcttcactatctcggactgattgaggtcggacagcaaatccaggccaggaagctctctccggtcgaggtgaccaaggcgatgctcgggcggatcgagcagctcgacggcaagctcaagagctacgcttatgtgatgggcgacgccgcgcttgccgaagccgcaacagcggagaaggacatcgcatacggcaggatcaaggggccgctgcacggggtgccgatcgcggtcaaggatctgtgctgggccaagggtgcgccggctgcgcatggcatgaccatccatcgcgactttcgccccaccgaggacgccacggtcgtcgcgcggctgaaggaggccagcgccatcattctcggcaagttgcagcagaccgagggggcctatgccgaccatcacccgaagatcgatccgccgaagaacccgtggaatgcagatttgtggtccggtgcgtcgtcgagcggttcgggcgtcgccaccgcggcggggctttgcttcggttcgctcggaaccgataccggcggctcgatccgctttccgtcagccgccaacggcatcactgggttgaagccgacctggggacgcgtcagccgttacggcgccttcgaactcgcggcgacgctggaccatatcggtccgatggcgcgcaacgccgccgattgcggcgcgatgctggccgtgatcgcggggcaggatcccaaggacaccacctccgtgccgctgccggtgcccgattatctcgcgggcctgaccggagatctgcgtggggtcgcaatcggcgtcgatcggcgctggaccagcgagggtaccgatgaggctgccggcaaggtgctcagcgaaggcctgcgcgtcgcggccgacctcggcgcgaagatcaaggagatcacgttccccgatccgaaagccgtgatcgaggattggttcccgctgtgcggcatcgaggtggccgttgcgcacgaagcaacctatcccgcgcgcaaggacgaatacggtccggcgcttgccggcctgctcgatctcggccgggcgcaatccggcatggactatcagaagatcgtgctgcggcgcgaagcgtttcgtggcgccgtgcggctgctgttcgagacggtcgatctgattgccgttccggcccaggcattcgccgcgccgacattggccaagatggcggcgctcggcgaggacccgtcgctgatcaccgggctgctgcgcttcacctgtccgttcgacatgaccggcagcccgaccgtgacgcttcccggtggcttcgcgccgaacggcggcccggtggccttccagttcgtcggccgtcatttcgacgaagcgagcctcgttcgcgcgggcgatgccttccagcgcgtcaccgactggcacaagcgccatcccgcgatctgagcccaaggagccgtccgcatgaccgaagactggttgagaagttccatcatggcaaggcgggccgtcgccaacggcgcgaccggcacgacccatagtttgacgatcgagcagcagggcagcttccactacgtctacggaccctatgccaagccgacgctgtcgattgatccgggcggggtggtggtcgtcgagaccgaggatgccttcggcggcgtgctgaccagcgaaagcgatagcccgacggccaagctgaacttcccgtacctcaatccgcaatgcgggccgatcgcggtcaagggcgccaggaagggcgactgtctcgccgtctatatccgcgacgtcgagacccgcggcgcgcaaccggccggcaccacctgcatcatcccggagttcggtggtctggtcgggaccgcatcgaccgcgctgctcaatccgccgctgccggagcgggtcaagaagctgcatgtcgaccgcaacggcgtgcgctggaacgacaagatcacgctgccctacgagcccttcatcggcacgatcggcgtgtcacccgagatcgaggcgatctcctcgctgcagcccgattatcacggcggcaacatggacctgcccgacgtcgcgccgggcgcgatcatctatcttccggtgcatgccgaaggcgggttgctctatgtcggcgattgccacgccacgcagggcgatggcgaactgtcgggcgtcgcactcgaacagcgtgcgaccgtgacgctgcagatcgacctgatcaagaactggagctttgcctggccgcggctcgagacgcgcgacttcatcatgacgatcggcagcgcccgcccgctcgaagacgcggcgcggatcgcctaccgcgaactggtgcggtggatgagcgccgactacggcttcgatgagatcgacgcctacatgctgctcagccaggccggccgcatgcggctcggcaacatggtcgaccccaaatacacgatgggggcgtcgatcctgaagaactacctcaaggcgtgaacttccaacaatcattcaacgacagggaacatcgctatgaattcggggcgaatagttggaatggctttgcttggcgcaatgcttggaatcgcggcaacaggcagcacgcaggcggcggagccgccgctgaaggtcggcttgcttgaggacgtctccggcgacctcgccttcatgggcatgccgaagctgcacggatcgcagctcgcggtcgaggagatcaacaagagcggtggcattctcggccgccagatcgagctgatccaccttgatccccaaggtgacaatgcccgctaccaggagttcggcaggcggctgctcaatcgcgacaaggtcgacgtgctgatcggcggcatcacttcggcctcgcgcgaggcattgcgtccgatcgtcgatcgcaccacgacgccatacttctatacgaaccagtatgaaggcggtgtctgcgacgccagcatggtcagcatgggggcggtgccggagcagcagttctcgaccctgatcccctggatggtcgagaagttcggcaagaaggtctacgtgatcgccgcagactacaatttcggccagatctcggcggagtggaaccgcaagatcatgaaggaccttggcggcgaagtcgtcggcgaggagttcatcccgctcggtgtctcgcagtttgcgcagacgatccagaacatccagaaggcgaagccggactggttgctgacgatcaatgtcggcgccgcgcaggattcgttcttcgagcaggcggccgccgccaacctcaatctgccgatgggctcctcgatcaaggtcatgctcggcttcgagcacaagcggttcaagccgccggcgctcaacaacatgcatgcgaccgcgaactggttcgaggagatcgacacgcccgaagccaacgacttcaagaagcgctggcacgccaagttcccagatgaactctacatcaacgacatgggctacaacgcctacaacgcgctctacatgtacaaggcgctggtcgagaaggcgaagtcgaccaagctcgaggacatgcgcaaggtgatcgcgactggcgatgcctgcatcgatgcgcccgaaggcaaggtctgcatcgatccgaagagccagcatacgtcgcaccgcatgcgcctgatctcggtcgggcccaagcacgaggtgaccgtcgagaaggactacggaacgatccagccgtactggctcggcgagatcggctgcgatctcaccaagaagaacgacaaggatcagtacacgccgagccatcttcccagcaaatcgtgatgcgcgcgggcacgaatcttgctcgtgttctcgcgtcaggctttgaaccgaaccggcgccgcaatgctgcggcgccgtgaccacggagagcggaatgtcggctgaactcttctcgatattctatcaattcgccgacgtcttcgcgttcctgatcctgtccgcggcgggccttgccatcgtgttcggcatgatgggcgtcatcaacatggcgcatggcgagttcatcatgtgcggcgcttatgtgacggtcgggctcgtcaatctcggcgtaccgctgccgatcgcccagatcatggccgcgctgaccgcagggatcatcggcatgatcgtcgagctgctgatcgtgcgtcgcttctacaagcgcccgctcgactcgctgctcgccacttggggcctcagcctgatcgtgacgcagtcgatgctgctgatcgtcggctccgcggtgcgcggcatcggcacgccggagggcagtttcgcgatcgggggctacacgttctcaacctaccgcctcgtgctgttcggctgcgcggtggcggtgttggccgggctctacatcatcttcatgaagacgcgctttggcgtgatcgcgcgggcgacgatgcagaacgcagccatggcgaaggcactcggtgcgcggactggacggatctattccatcagcttcgggatcggcacggcgcttgcaggactctgcggcgcgctgtacgcgccgaccatgacgttgatcccgaccatgggcgcgaccttcgtggtcgagagcttcgtgaccgtggtgatcggcggcgcaaatgtgctgcttggaaccgcgccggctgcggtgttcctggcgatgatacgaatggcgctgaatgcgagctacgggcagatcatcgggcagatcggcatgctgtttgctgtgatcctgatcatacgtgtgctgcccgaagggctatccagcgtgctggtgcgtcgtgggcgctagacaggaatttccgatgttgaagctgctcgacggtccgcagacgctcggacgcggcaggatcttctggtcctgcttccttgccgtgctggcaggcgcgctgatctatccgctgttcgccgattcctatgatgtcggcaatttcgcctacttcctgatctggatcttcatggcgctcgggctctgcctgatgtggggctacggcggcatgctgtcgttcggccagaccttcttcttcggcatcgccggttacggctatggcgtgcttgccatcaatatgggcggcggaacggccacgatcgccgcacttgtcctgtcggtcgtcatcgcgatgatcgcggcgggaatcctcggctacttcatgatctggggcggcatcagcgggatcttcttcggcatcgtgacgctgtcggcgacattggtgcttgccttcttcctcgggcagaccgccgggcccgaatggcatatcggtccggcccggctgaacggcttcaacggcatgaaggggatggacccgctcaccgtcggcagcttcgacatcgagggatcggcgctctactacgtcatgatcgcgctgatcgtgatcgtctacatcgcgctgcgcatgctggtgaactcgggcgtcggcaatgtgatcgtggcgacgcgggaaaacccgcagcgcgccgagatgctgggttacgacgtccgcaagtatcagctcctgaccttcgtgatcggcagcggcctcgcgggcctcagcggtgcgctgtacacctcctgggggcagttcatcacgccctccagcatcgggttgccggccgccgcgatgccgatcgtctgggtcgcgttctccggccgcaacgatctgaccgcgaccctggtcggttcgttcctgctgctgttcggcttccagaccatcaccgtctatagccagcaggctgcgctggtgctgatgggcgtgctgctgctcgccaccgtgatgctggcgccgcagggctttgtgctcggcatcggcaaactcgtggtcgattggtggtccaggcgccggcggcgcgacgagagccccgcgctggccgatgccggccgtctgcaatcggatgagacctgatcatggcgctggtcgatgtgaaaggcgtctccaagcgtttcggcgggttgaccgcggtctccgaggtcgatctgacggtcaatgccggcgaagtgcactgcctgatcgggcccaatggagccgggaagagcacgctgttcaagctgatcgtcggtctctatccgccgaccgcgggcagcatcttcttcgattccgtcgacatcaccgcggagcgtccctatgcgcgggtgcagcgtggcatgagcatcaagatgcaggcgcccagcgtgttcaaggagctgccggtgcggcagaacatccagatcgctctccaggaccggctttcgggcgccgaacgcagcgccgaggaggaacggctgctgtcgctgctcaatctcgtcgaggactccggcaagctcgccggcgcgctgtcgcacggccagcagcaatggctcgaaatcggcatggcgctggcgttgcagccgcaactgctgctgctggacgagccgaccgccggcatgtcgccggaggagacctacaagaccggtgagctgatcaagtcgttcaatgccgagggcatgacggtgctggttgtcgagcacgacatggcgttcgtccgacaggtcgcccagcgcgtcacggtgctgcatctcggcaagatcttcgcacacggcagcctcgaatccatcctggaagacgagaaggtcgccgaaatctatctgggtaagacccatgcccactgatcgcattctggacgtctcgggactttgggcgggctacggcgcgacgccgatcctgcagggcgtcagcatgcaggtctcgcgcggcgagatcgtcggggtgatcggccgcaatggcgtcggcaagtcgacgctgatgcgctgcctgatcggcctgctgcaaacctggcgcggcaccatcaccttcatggaccaggacgtcacgcaactcgaggccgatgcgcgcgcgcgcgccggcttcggctatatcccgcaaggtcgcgacgtgtttccacagatgagcgtcgaggagaatttgcaggtcggcgaattgatcggcggccccgaggggaagaagctgccggaactggtctacgcgtattttccgcgtctgaaggaacgccggcgccagatcgcgggcaccatgtcgggcggcgagcagcagcagcttgcgatcggccgcgcgctgatcggcaacccgtccctgatgatcctcgacgagccgtccgaggggattcagccctcgatcgtgcagcatatctgcgaggcactgaaatcgttccgtacggagcttgggacgacgatcatcatcgtcgagcagaatctcgacaccattctcgcggtcgcgcagcgctgctacatcatggagaagggcaagatcacgcgatcgctggccgatgaggaggtcaacgaagacaatgtgcgcgcgcagctgctgctttgatcggccgcgcaattcggttcgaacgtgcgtgttccataatcgataacaatggagggaatggatatggatctgggactcaagggagcaaaggttctcgtcaccggcagcaccaagggcatcggtcgggcaatcgctgacacattcgcggccgagggcgccaatgtcggcatctgcgcgcgcaatcaggctgacgtcgatgccgcggtcaccgcgatcaaggccaagggcgttgcggcgttcggttctgccgtcgacgtcgcgaacgggcccgcactgaaagcctgggtcgccgacatggcgtccaggctcggcggtatcgatgtcgtggtcgccaatgtcagcgcgctgtcgatcggacaggacgaggaaagctgggagaaggaattctccaccgacatgatgggcacggtgcggctcgtcaacgccgcgatgccccatctcgagaagagcaaggcggccgcgatcgtcaccatctccagcgtgtcgggtcgcgaggtcgattttgccagcggtccgtacgggacgttcaaggccgcgatcatccactacacgcaggggctcgcctaccagttggcggccaagggcatccgcgccaattcggtgtcgccgggcaacacctatttcgagggcggtgtctggaacatgatcaaggacagcaatcccgaactgtacaagtccgcgctggcgctcaacccgaccggccgcatgggcacgccgcaggagatggccaacgccgccgtgttcctggcgagcagggcggcgagcttcatcacggggaccaacctcgtcgtcgacggtgcgctgacgcgcggcgtccagttctagttgggccacagcgacatgtcagcagatccattgcactacaagtcgatcaccgagatctccgggcttatccgccgcggcgaagcgaaaccttcggagatcacggagacgatcctgagccggatcgcgaagttggatgggcaattccatggctatgtgcacgtgctcgcggagcgggccatggcccaggcgaaacagcatgacgcggaaatcgccaggggcatctggcgcggcccgctgcacggcgttccgatcgggctgaaggacctctgctatacgtcgtttgcgccgaccgcgggcggcacgacgatccacgccaggttcgtgccgtccttcaacgccacgatcgtggaccggctggagctcgccggcgcggtgacgctcggcaagctgaagatgacggagggcgcctataccagccaccatccggccgtcgaggctccgctcaatccgtggaatgtgaactattgggtcggctcctcgtcgagcggatcgggcgtcgcgacctcggccgggctctgctacggctcgatcggcagcgacaccggcggctcgatccggtttccgtcggcgacttgcggcttgaccgggatcaagccgacctggggccgcgtcagccggcacggcatcttcccgctggcggattcgctcgatcatgtcggaccgatgtgccggagcgcggcggatgcggctgcgatgctcggcgtcatcgccggcgccgatgccaatgatccgaccgccttgagggcgccggtgccgaattatctggccgggatcggcgagggcatcaggggcctcaggatcggcgttgatcgcaggtacacccaggagggaatcgaccgacaggtcgtaacagcattgctgcaagccgagcgcacgctggccgatctcggtgccgacatccgcgaggtgcatttcccgccgtaccagaaactcgtcagccagtggattgcgatgtgctcggtggagacggctgaggcgcatctcgacacctacccgacgcggaagtcggagtatggaccggacctcgcccagctgatcgagcagggcaggtcggtcagcggcgtcgatattgccgcgatccatcacgagcggctcaagttcggtggcagccttgctgcgatgttcgaggatatcgatctcctcctgatcccgacgatgccggtgccgatcccgacgctgacgaagatgagcgagtacggcgccgatcccaatgtgctcctgagcatcctgcgcttcacggcggtgttcgacttctcgggcagcccgaccatcacattgccgatgggcatggcatccgaccggatgccgctcagcatgcagctggtcggcccgcatctctccgaagacgtgctggtccgcgccggcgcagcgtaccagtcggtgaccgactggcacacgcggcggccgccggtcgaatagggcatgatccggaaaagtgcgaagcggttttccgaaaagatcatgcttaaacgagaaccaaagcgcgatgacgattcaacctgatctcatcgcgctttagcgccccgtcagccggtcttgtcgacgttccagaacagcggcaccggggcgcggacgatgtccttcaacgcctttcgcgtcgcggccggctggttgtactgcccggtcgggacgtgggtgaccacctcataggcgcgcgcctggatcttgtcggcgatcgccttctggtccgccggcgccgcagcgcgggcaaaaccgtcgcgcagccgctcgagttcggcgtcctcgacccagccgaagaagccgccattcttgcccttgccgttgacgcaggcattgccgatcggattgacgaggtcggcgctcgcccaggtcgaatgatagagcgaccagccgccctcggccggcatcgattgcttggcgcgccgcgccaccaccgatccccagtccatcgccagcaggttgacgttcatgccgatcgcgcgcaacgcctcggccgtgaccgtgccgagcgcggtgatgatcggggcgtcggtcgcgtgcaggatcgtgatcggctcgcccttgtagccgccctgcttgagcagctccttggcctttgcggtgtctgctctggtcgaccagccgatcgtactctcgaacggcgtgccggcgacgaagatcgccggggtgaccttgtagtaatcggggttgccgatctgggtgtcgagccagtccttctggttcactgcgtgcagcacggcctggcggatctccacccggtcgaacggcggcaccagccagttcatccggcacatgccggagaagccgagcgtgttgtaatcggtcagctcgacgttcgcggcgcgcgccagcaatggatgatggtcgtgcggcggcacctcgaaatagtcgatctcgtcgttcatcagcgcgttggtcgcgatctggaagtccggcacgctgatccattcgtagcggccgatcttcaccaccttgccgccgccggtgccgtccgacggctcgtcgcgcgagacgtagtcggggttcttctcgtaagccgctttcacaccgggttggaattccggcgtcacgaaacggaatggcccggagccgagatgatccgtgatggcctggtcggcgggcgtcgcggcgatccgcgccggcacgatgaagggcacgttggcggtcggcttgccgagcgcggcgagcacgaagccgcacggctccttcagcgccatgcggaaggtccgctcgtcgaccgccttaagctcggcgacgaactcgaacagcttctggcccatcgagtcgcgcttggaccagcgctgcagcgaggggatcacgtcggccgaggtcaccgcactaccgtcatggaatttgaggccgggccgcaggcggaatgtataaatgaggttgtcggcagagacctcccaggcctcgaccatctgcggcttgatctcgaacttcgagttggtcgagaacagcgtgtcgtagatcatgtagccgtggttgcgcgccgtccacgccgtcgtcatgatcggatcggtggcgcgcagcggcgcgtgcatgacggcggtgatcgttttggtgctggcccgcgcgatacctggcatcgcaagacttggcatcgcaacgccgaggcccgcgcctgcgcccatctgcagcaggcggcggcggttgatcgatggtcccatgatatccccctgtcgcagccgtcaggcgtcgccgccaagcctggccgcgatcgcgcgatagccgcgcatccacatgtggtcgagatcgagatccatcggcagcggctgcgaggagacacgcgcgatcacggtctcgtgggccggatcgatatagatccactggccatggatgccgacggcggcaaacggcgtttcgcgccggtcgagggtgtaccatttgttgcggtaattgccgttcgggaacaccttggtcaggtcaccgcgcgaccaggcctcggcgttgccgttctgcctgatgtcgtcgacccaccagccgggtacgacctgtcgtccgttgctgataccgtgattgcgcatcatctcgccgaagcgggcgaggtcgcgcagcgtcgcgcagatgccgccggcgacgcgcgccgcgccgcgggaatcgaccgtgatgtaggcgtcgtgctcggcgcccatcggctgccacagatattgcgagaggatcttcgcgtaggacatgccgcaggcgtgctcatagacccagccgagcacgtcggtattggtcgagacgtagtggaaggtctcgccgtgcggcgcgccgtttggccgcagggtgcgcagataatcgcgcaaattggtcggtggaacagccggatccggcggctcccagccggtggagcggcggtagttcacgacgtcaccgtcgcgcgccatgtaatcctcttcgaaccggatgccgacgctcatgtcgagcagatgccgcaccgtgcagctgccgccatagaccgatccttccatctccgggatatagcgcgtcaccggcgcgtcgggatcgagcatgccgcgatcggccaggatgccgccaagcgttccggcgaccgatttgctgacggagaaaatgaggtgcggggtgtcaggtgtcaggccatgcgcgtaccattcgaacacgacctgtccgcgatgcgacaccacgatgccgtcggtatggctggcgcgcagcgcctgaccgacgccgatcgtctcgctgcgcgggtcagcgaagccgatgtcgtcgagatggcggggcgcaaaggacagcggcgccggcgtctgggcgcgcgcgatgtttgcggtgggcagcagctcgcgaacgttgcgaaatccccactcgctgaacggatgctgacgccagttggcgagcgtgacttgttggtcggccgccgaggggaaggcggccatgatgcgacgcgaattcattcttgatccagcaatgatatcggaagatgtctgaaggttccgcatgcgccgcgccgctcgcaatcaaccggatggtggaggggccgtcgggttactccggcgtaaccgtttcgaggattgtgcgtggtgccggtttggcccgcaaattgcttgactacgccctgcgtctgccccagcgtgccgggcatgcgacgcgcagacgttcgccatcgggaaacatcgggaggtaggtcatgatcgcgcttctgggccgaccggatccggcgaccacgcaggccattcagttcgcgcgaggcattctcgagggttccgcgaccgcgttctacgaggtcgacggtaatttgaccctcaaccgcttcgtgctgagcagcaacgtcccgccgagcttccacgatcagtatctggccggcatgaaccggctcgatccgctgcatccgcgctctgccagcaaccggccgatcgccaggctgagcatcgccctcgaccaatgcgcctcccaggaggctgcgacctatcgcgccttcgccggccagtgcggcgtcgccgacatgatcgagttcttcttccgccgcaacgaccgcatcgtcgccggaatgagcgtgctctgggcgccgggctgtgcgatccccgacggcagcatgcatattgccgagaagatccacgactatctcgagttcaacctgaccagtcgcctgtcatccagttccgatgagccggcgcgttacggcctgacctcgcgcgagatggaagtcgtcgagctccttggctgcggccggaccaatcgcgagatcggcgagtgcctgaacatcgggctcgcgacggtgaagacgcacctgatccatatcttcgagaagctcggcgtcgagacccgctcggccgtggtggcgatgatgtcgcggccgcattgaggggcgcgggctgtagattgtaagtccgtggccttccagcacgtcgtcccggcgcaggccgggaggtggattcacactcgaagtgcaacacttgagcagcaaagacctctgccggggtcctgaagtcaaggcatttgcgcggggtgttgttgtaggcggcgatggacttgcgcaggcggcgggttggcagcttttcgaggtcggtgttgcgcgggatgaagcggcgcatgcggccgatggcgttctcgatgccccctttttgccagggggcgtggggatcgcagaagtacgtcttgatcaagaggctttgcaaggcaaggtgagatgcgaactcggtgccgttgtcgaaggtgacggtctggcggatcggctgtggcaggacctcgaacaggcgtacgagatggtgagcgacgccggaggcgagcttgcttgcgagggggacgccgagcaacaggcgggaggtgcgctcatgcacggccaggatctgctgaccgtatttggagaacatcatgaggtcggcctcccaatggcccggggtcttgcgatcggcgacctcgacggggcgcagatccagcgaaacacggccttcgatgaagcttgcgggactgccgccccgcttgccgcggcgaccgcgcttgctcttgccgcgcggcaggtagcgccgccagctgaagtccgaggtgcgggtgagctgggcataaatgaagcggtagatgctctcataggagatcaccttgcggccgtgctcgcgagccagccggccggcgacctgctcgggcgaccagccccggccaagacgttccaacaccgcacggcgcaggccgg

SEQ ID NO: 8 - DNA, 204493 bp, Bradyrhizobium enterica
  misc_feature (153641)..(153656): n is a, c, g, or t
accgcaacactcctgacgatgcgcagcgcccctcgatcgggtgagacgcgcacattgaacatctgagttgggtcaaacgccaagcggaatattttccgcgtccggactggacaggggtgatcgctttgtttgggttagggaatttggtgctttggtgcaaaaagatgataagtcgcacttcagaatctgcacaattctattttgtcgaactggcgtcgtcctgatttccacgcatgtggaagaacggctgtactgctgaaggttgtctgcaaaatttcgagtatgatcacggggcatggggcggaggacgcgaaggaaatgggaaagaggcgcggcaaactgaggccgacgacgcaaccgaagaacacaagcccccacaccgcggacgagagcagaattcttccggtttccaatcaagtcttgtcttcgcagtctagtgcctcctcggatagcgttgctaccgttgatgcaattgcggaggccaacctacggctaactcgatggttggtaatatggaccgccgtgctcgcaatcgtcgccatcatcacaaccgtcgttgggtacatacagtggagggcattgcttaaaactgacagcacgacccgcgaagcgttcacggcggtccaacggcctttcatcatcgcgacaggcctagcagcatcccaagaccttccgggctactggacctttcagacgattttggagaacacaggtagtacgcccaccaaaaatatgaccgtgacatctgcagtatcattctcagtgcctgtattgcccgacagccccgatgatcctggagaactaagaaagcaatcgagggaagcctatccaaccgtgaccgattacttcatcggcccacacggcaaagtggccgttgacgcgatttcgctgattaacaagactcttgaagatatggctgaccagcgtgctgacttcttcgtgtatggaattgcgaggtacaatgatcaattcgcggagaccgccgaacgtctaaccaagttctgttttgtggtgcgtccatataagggccaaaccggtttgacgcttcaaaatcgcggtccctgccatcactggaattgtggtgacggagattgccaacgagacaagcaagggtatgaagaggagcgtgcggagttcctgaggaaaaatcccgccgcgaaatatgttgctcgagatatccctatcgcagctatcatccccttctatccgataccgctcgttaaggcgcactaatgtgctgctcgacgtttgtccgtaagccaatagcaacgccgcttatttggtaattgggagacaataccttcgatgcggtcaacgcagcgatctgccaaaatagcgcgccgggaacgccttgcacctgcatttcgcattccgcttgctggctcggaactgcaggcgcttggagaattgtgcgcgattcaaggacaatgcgaacatctgctcgtccatacgctgcactatgttttggatttgccaatagaaacagcgcgtacaatgttagcgtcaagtagcatccatacgaacgcaagggtatggatcgaagtgcttcgcgcgaaatgccgcgatcggtcgattttagaaaccgccgaagaagctttcagtttagttgagagcacgactaagggaagaaacgacttcgttcacgcgatttttgccacaccgatcggaaatatgtggatgcttgacgttgctccgaacggcgcgaagcatcggcgatcgaaggaaaacgaagccatcgcggtgcgcacccgagacatcagaaagaagcgaccggtttctgacctcgtttcagtacgcaatgacgcggcaaaattatctctgctgctctcgaaaattgcctccgagttcttgcctgattaggaagcaatcgcagctgggctcattcttgtccgctttctcggccttccagtattcggctcctgtgggcgttgcaggcttcacaccaccttcctcgccgccgccgtcgccgcatcacccgtgttcgccgtcccggtcggctcgatcagcaacagatgcgcctcctcccgcgcgacggggcggtgctcgacgcctttcggcacgatgtacatctggcctggcttcagcgtcacggtgcggtcgcgcagttcgatgtcgagcacgcccttcaagacaagaaagaagtcgtcggtatcgtcgtgcttgtgccagacgaacgcgccctgcaccttcaccaccatgacgtcgcaggcgttgaactgcgccacggtgcgcggcgaccagtgatcggagaacgtggacagcttttcggcgagatcgatcgggtcgtgcactggtgcctccaggctcggaatgacaatggcgggagtggatcgaggccggcgccgcgccttgatcagcatcaacgcgcgctggaccgccccggctatcgatatagccgatgtcaatgctgagggggacggctgatgctgtacacgacgaactttgtaccgatcggctccgagtccgaccgcgaagcagccgcgcggcaggcgatggccgcgatcgtcaacagcaagcccaccgtgaccgcgaccaccgagaagatcaggatcaagaacctgaatttcttctacgaggacggcagccaggcgctccgcaatgtctcggcaccgatctatgacaagcgcgtgacagccttcatgggtccgtccggctgcggaaagtcgacgctgctgcgcgtgctgaaccggatgcacgacctctaccccggtcagcgtgccgaaggcgaaatcctgttcgacggcgaggacatcctcagcaagatcgatgtgtatcagttgcgcgcgcggatcggcatggtgttccagaagccgacgccgtttccgaccaccatctacgacaacatcgcgttcggcatcagactgcagcgcaaggtcagcgacgccgagatggacgttctcgtcgaacaggcgttgcgccgcgccgcgctgtgggacgaggtgaaggacaatctgacgcgttacgggttcgacttgtcgggtggccagcagcagcggctgagcattgcgcgcgtcatcgcaaccggcccggacgtgctcctgctcgacgagccctgctcggcgatcgatccgatctcctcggccaagatcgagcagacgatcgacgaactgaagcgggatcacgccatcatcatcgtgacgcacaatttgcagcaggcggctcgggtgtccgacttcgccggcttcatgtatctcggggaactcgtcgagttcggcaccgtgggcgacatcttcgtcagccccaaatacaagcagaccgagcgcttcatcaccggaagattcggttgacggcgcatcaaccgaaaatcgcgaaccccggcatcatccgggactcgcctggtgtgtctcgtgccaatgcctattgatatctcgtcggctgatggccgttcaattcgccgtgcgcttcaccgttgccgttggcggccttgcgcgccagcagttcccgttcggccttgtaccagagctgatccatctggcctggcggctcgccggcgtccttccacagctcataggcgcgggtccgaatttcctgctcggtgggacctgtcatgggcggctccctcaatttgagacatcaaactgtttgagagtggaactgccagcatagcgcaaggttccaaggcgtgcgagatggcgcgcggccaattgcgtacccatgctgtgcacaatcgccgcggcggcaagcctaccccttcagaggtatgaaaccgatgcgcgcttgccgcagacctatcctcatcaggattttgccacgaccctcctggggctagagacagcgccgctcgcaggtattttaagcgggcggcgttgcgctgtcaggcagggcgcgttcccagttcccagccatcaatgcgggatgtgacgcgttttcttcacgcaaacccgcatcgggagagtgcctcggccgagcggccctactccgccgcctggcggacgtggcgcgcggtcggggtgcgcatcgtcaccagctcttcggacgcggtcggatgcagcgcgatggtggcgtcgaaatcagccttggtcgccttcatcttcaccgcgatcgcgaccgcctgggtgatctcggcggcggcatcgccgacgatgtggcagccgagcacgcggtcgctcgcgccgtcgaccacgagcttcatcagcacgcgggtatcgcggccggacatcgtcgccttgatcgggcggaaatcggtcttgtagatgtcgacgtgggaaaactgcgcccgcgcctcttgctccgtcaggccgacggtgccgacctcgggctgcgagaacaccgcggtcgggatcgtcgcgtgatcgacctgaaccgggcgcttgccgaatacggtgtcggcaaaggcatggccctcgcggatcgcgaccggggtcaggttggcgcggtgggtgacgtcgccgaccgcatagatgttgtcgaccgaggtcttcgaccagccgtcgacctggatgccgccattggcgggattgatggcgacgccggcagcttcgagcccgagacctgcgatattgggatggcggccgatcgcgaacatcacctggtcggaggcgatgcttgaaccgctcgacagatgcgtcgtgaaatcacggccgtgcttgtcgaccttggtcaccgtgcagccggtgatgatggtgatgccgcgcttctccatctcggcgcggacatgcttgcgcacgtcctcgtcgaagccgcgcaggatgttgtcgccgcggtagaccaccgtgacgtcggagccgaagccggcgaagatgccggcgaattccagcgcgatgtaaccgccgccctggatcacgatccgcttcggcagctccttgagatgaaacgcctcgttggaggagatcacatgctcgatgccgggcaccgccgggccatggttgggcgcaccgccggtggcgatcaggatgtactttgctgtcaccttctcgccggtggcgaggcggatggtgtgggcatcctccagcaccgcgcgggtctttacgatccgcgcgccggacttctcgacattggtggtgtaggcggcctcgagccgggcgatctccttgtccttgttggcgaccagggttgcccagtcgaacgagatctggccgatgttccagccgaagccggcggcgtcctcaatctcctggtggacatggctgccgatcacgaacagcttcttcggcacgcagccgcggatcacgcaggtgccgcccatccggtactcttcggcgaccatgaccttcgcgccgtaattggcggcgatgcgggcagcacgaacgccgcccgaaccaccaccgatgacaaacaggtcgacgtcgaactcggccatggcaacctctttcttcgccctcgccccgcaagcggggcgaggtgacaagcgcgcttagatatcctttagatatccttgccgcgcttcttcatctcggccttgaactggccggcgacgatcacgccgaactgctgggcccattgctgcatatattgcagcgagccgttgattgcagtgggctccgcggtcaaaagcttctggccgagcggggtcttgtagaacgtcacgagatccttcagctcctgctcggtgaactcggcggcgtagatctgcgccatgccctcgccgatctccttctcaccgccggcgaactgcttggcgacgatcaccgcgacctcgtcgagatccttctggtagttcaggtactgctgcaacagaccggtcttggtcttctcgatgatccccggaacggcgccggagtacatcaccgccacgttcttcatggtcaggatttccttggcagccgcgatcgccgcgggcgtcgactgcttgaccttgggcatcggaggcagctgctgctgcgccatggccggtgcggccgccagcgccagtccagcagccagggccgccgccgacaaaagtcccgaaaaacgcttcattccaagtctccttgcttgcggcgctatcgccgttcaacaacccgaattccctgcgcgccggccagaacggcgacgctgccaagcccgatgaacaggccgtgttcgaccacgcccggaatgacgctgagcagacccgcaagacgcggcgggtcgccgatccggccgagatgggcatcgacgatccagtggccgccatcggtgacaaaaacgtgaccgtccttgcccttgcggatgaccatttggccggacacgccggcctcaccgaacgctcgcgccagcgcggcctgggtggcggcgagcccgaacgggatcacctcgatcggcagcggaaagcggccgagcacgtcgacccatttgctgtcgtcggcgatcacgatcatgcgatcactggcggcggccacgatcttctcgcgcagcagcgcgccgccgccgcccttgatcagattgagcgcggggtcgatctcgtcggcgccgtcgatggtgaggtcgagatggtcgatctcgtcgagcgtggtcagcggcacgccgcagcggatcgcgtccgcccgggtcgcctccgaggtcggcacgccgatcaccttcatgccggcgcggaccttctcgccgagcagctcgacgaaatgcttggcggtcgacccggtgccgagcccgagtttcatgccgtcgcgcacctcttcgagcgcgcgcgccgccgcctggcgtttcagtgcgtccatgtccacgtgccgatagcccccggttgtcgattccgggcacgccatcggccgcccagcgggcgcatatctagcctcgattcaccggcaggaacagcgccatccggaccggtcttctggacgaaacggcatcgatcacggccaaaatcgccgaaaaccgctctccggccgcatctgctcttgcatcgcggtgcgcagcccgatagcgaaatgcgtgatgtccgccgcctctccccccatcatcgtgttcgatctcgacggcacgctggtcgacaccgcgcccgacctgatcagcgcactgaaccacgtgctcgaccgcgaaggtctgcggccggtgccgctgtcagccgcccgcaacatgatcggcgccggcgcgcgcaagctgctcgagcgcgggctcgaagtggaaggccgcgtggtcagcatcggtgagctcgatcgcctgaccagggatttcatcgacttctacgccgagcacatcgccgacggctcgcgtccgttcgacgggctcgaggccgcgctcgaccggctcgcatcgaagggccatcgcttggcggtctgcaccaacaagctggagtggctgtcgaagctgttgctcgacaggctcgacctgacgccgcgctttgccgccatctgcggccaggacacgttcgggatcgccaagccggatccggcgttcctgcgcgagacggtggcccgtgccggcggccggctgcccggcgcgatcatggtcggcgatgccggccccgacgtcggggtcgcccggcgcgccaacgtcccggtgatcggggtcgatttcggctataccgacgtcccgatgaccgagctgaagccggaccggctgatcagccatatgcgcgatctgccggacgccatcgccagcctcatcgcgacataagtttttcgcaacacactgatatcgcttggcaatgttttgccatgcgattttttcattaaccatcctttaacgaacaggcctcgccctgttgcgcctctgttccgacgctcctatggtcgggccggggattgtggctgattgccgcagtagagtgtggatcatgcgtcgtatcatcgtaattgcggccgccgggctgagcctggccggctgctcctccttctcattggattcgttcaagtccgcgccaccgccaatgcaggtgcagctggattcgaatccgcaaggcgccgacgccgtgacgtcgatcggaccgggctgcaaaacgccctgctccgtgtcgatcccgacgccggagagcaacttcaccgtcaccttcaacatgccgaagttccaaccggcgacggtgccggttacggtgacccgctcgccgggcgacttcgcgagcccggccaccaccgcgctcgatcccagcccggtgttcgccgagctgcagcccgccggcccgccgccgcgcgcgcacaaggggatgcggccgaaaaagaagaagccgaagccggctgccgctgcggcccccgccgctgcgcctgacgcggcgccgccggctgcggcggctccgacgcgctagcacgcagcattgcgcactgcacaaagaacccggcccaaggccgggttttggttttcgtcgagacacatcggcgattgcgatcatgcatcgcgcgatctacctcgcctatcactttgcaattcgcattgcaggttgcggatcatcccttggaacgcattgtgacgctgtgccaacatgcatagattgtgcgtgcgggccggccacggcttggcccgcagcgacagattgcaaggctcgagctgaatgaacggatccacgcaggcgcatcccgacacgctgttccgtccgatgaccgacccgttcggccggaccatccgttacctgcgtgtctccgtcaccgaccgctgcgacctgcgctgcttctattgcatgtcggaagacatgaccttcctgccgaaggccgatctcttgacgctggaggagctcgaccggctctgctccgccttcgtcgccaagggcgtgcgcaagatccgcctcaccggcggcgagccgctggtccgccgcaatgtgatgggcctggtgcgttcgctgtcacgccatctgacgacgggcgcgctcgacgaactgacgctgaccaccaacggctcgcagctcgcgcgcttcgcgcaggagctggccgattgcggcgtgcgccgcgtcaacgtctccctcgacacgctcgatcccgtaaaattccggagcatcacccgctggggcgacatcgacaaggtgctgtcgggcatcgaggcggcgcgatcggccgggctcgcggtcaagatcaacgcggtcgcgctgaagaacttgaacgaggacgagattcccgcgctgatggaatgggcgcatggcaaggcaatgggcttgacgctgatcgaggtgatgccgatgggcgacatcggcgaaggccgcatcgatcaatatgtgccgctgtcgctgctgcgcgcgcggctcgagaagcactacacgctgaccgacctcgccgacgacaccggcggccctgcccgctatgtccgggtcaccgagaccggcggcaagctcggcttcatcacgccgatgacccacaatttctgcgaatcctgcaaccgggtgcggatcacttgcaccggcacgctgcacacctgcctcggccatgaggacgcctccgacctgcgccggccgctgcgcagctcgccggacgatgatctgctgtcggcggcgatcgaccgggccatcggactgaagccgaaggggcacgatttcatcatcgaccgccgccacaaccgcccgagcgtcagccgccacatgagcgtgacaggcggctagttcaaaaccctgcgccgacgcctgcgtcgtcctccgatttccaaggcgggacaacggtttgccgtgccgtcaatttgcccattttccgattgacggcgctacacggcgctgatttggtgccccggctttcacgcttgcccggccggataggccgctgcctcccgtcggctccagccgacgatccggcagccaagagcacctaaagacggcggaagcggatttcgggggaggacgaacgcttgcaactgctcctgaaagtgagccgtgctccgcgcgcatgcgcgcggcggccggatgatgcttgaaagatattcggtgcgcagatcgcgcgaccgcggagatcgtgatgcgcccaatgttggcactaagtcaggccatcgaccgcctcaatgagaagatcggcaccatctgcaacctgctcgtgctgatcgcctgcctggtcagcgccggcaatgccatgatccgctacgcgttcagctactcctcgaacggctggctcgaggcgcagtggtacatgttcgcgatcctcgtgatgttcggcgcctcctacaccttcaagcgcaatgagcatgtccgcgtcgagatcctttatctgatgctgtccgaacgcggccagctctggctcgacctgatcggcacgctgttcttcctgattccggcctgcctgctgctcgcctacctgtcctggccgttcttctaccaggcttatgcggtcggcgagatgagcggcaatgccggcggcctgctgcgctggccgatcaagttcgttatcccgtccggcttcgtgatgcttgcgttgcaaggcgtctcagaggtgatcaagcggatcgccgcgctgcagggctatgtgaccatcgacgcgaagtatgagaggccgacgcaatgacgatcacgttggagatgatgccgccgctgatgttcggcggcctgatcgttgcgatgctgatcggctatccggtggcgttcacgctcgccgcggtcggcctgtcgttcgggttcctgtcgatctatctcggcttcttcgacctcaacttcctgcaggcgattccgggccgcatcttcggcagcgtgctgtccaacgagctgctgctcgcgatcccgttcttcaccttcatgggcgcgatattggagagatgcgggctggccgaggacatgctggattcgatgggccagctgttcggcccgatccgcggcggcctcggctattccgtgatcatcgtcggcttcatcctcggcgccatcaccggcacggtggcggcgcaggtgatcgccatggcgctgatctcgatgccggtgatgatccgctacggctacaacatccgctacatcaccggcgtgctcgccgcctccggcaccatcacccaactcgttccgccctcgctggtgctgatcgtgctcgccgaccagctcggcaagtcggtcggcgacatgtatctcggcgcctggggcccgtccgtgttccagatcctgctgttcgccggctacaccttcctgctcggcatcttcaagccgagccacgtgcccgcggtgccgatcgaggcccgcaccttgaccggctgggcgctgtggaagaagtgcctgctcggcatcatcccgtcagcggtgctgatcttcgtcgtgctcggcaccatgatgatgggccttgcgaccccgaccgaagccggcgcaatgggtgcggtcggcgccatcgtgctcgctgcgatccaccacaaggacttcagcgcgaccggccgcaaggtgctgatagcaggcgtgatcgccggcggcatcggcaccatcatcgcgatgctgttcagcgagaacctgatcttcaggctcgccttcgcgatcacctatctcgcggtggtctggatctgcctcgaggcggtgaagatccctgacctgcgcgacctgatcaagcagggctacgagaccaccatgcgcatcacctgcatggtcaccttcatcctgatcggttcgacctgcttctcggtggtgttcctcggtgtgtccggcggggtttggctggagcacatgctgacctcgctgccgggcggcgtctggggcttcctgatcttcatcaacatcttcatcttcttcctggcgttcttcctcgactttttcgagatcgccttcatcatcctgccgatgatcgccccgatcgcgcagaaggtgctggcgccggtggtcggcccggatgcggcgctgatctggttcggcgtgatgctctgcgtcaacatgcagacctcgttcctgcatccgccgttcggcttcgcgctgttctatctgcgcggcgtggcgccgaaggaagtgaagagctcggacatctactggggcgcgatgccctggatcgggctgcaggcgatcatggtggcgcttgtcatcgcgttcccggtggtggtcaccggcctgctcgacaagccgctcgacgtcgacctcaacaaggtcaagatcgaggtgccgcagatcgagttgccgccgctcgatttcggccagccgaagcaatagccggcgtcagcccctgcggcgcgcctcgcttccgcgaggcgggccgcgatggttgacggcggcggcgcggcctgtgaagacggggatccggatcgtcctcgaacccacagatcgccgcccatgccccaatcgcgttccacccgctcgttcgtccgcccgctcatcgcatccctcggcctggcgcttgccgccaccacggcgcaggcagcgccggcagccgacattcgcgcgctggcacagcaggagcagcagccgctgctcgacaccctgcgcgacctcgtgcagatcgaatccggcagcaaggacctcgacggcctcaaccagatcgccgcgcgcatcgctgcggagctcaagcagctcggcggcgcggtggacatcctgcagaccaccgacatctatcgcctcgacgacacgcccgagaagatcggcccggccgtgcgggccgtcttcaagggcacgggcagcgcgaagatcatgctgatcgcgcacatggacacggtctatctcaagggcatgctgaaggatcaacccttccgcatcgacggcgacaaggcctatggactcggcatcgccgacgacaagcagggcgtcgccaccatcatccacaccgtggcgctgctgcagaagctgaacttcaaggactacggcacgctcacggtgctgatcaacggcgacgaggagatctcctcgcccggctggcgctcaaccatcacccgcaccgccgcggagcaggacgccgtattctcgttcgagggcagcgacgccagcggcacgctccgcctcgccaccagcggcatcggctcggcctatctcacggtgcacggcaagtcgtcgcacgcaggcgccaggcccgagggcggcgtgaatgcgctctacgagctgtcgcaccaggtgctgcagatgaaggacctgtccaagcccgagcagggcctgaagctgaactggacggtgtcgaagtccggcaccaaccgcaacgtgatccccgccgaagccaccgcccaggccgacgcacgcgcgctcaaggtcgcggatttcgacgagctcgagaaggccctgcaggacaagatcaagaaccgcctgctgcccgactccaaggtggacgtgaagttcgaggtgcgccgcccgccgctcgaagccaacgacgcctcgcgcaacgtggccggccacggcaaggcgatctatcaggaactgggcctgtcgatgaacgtcgccgaaagggccaccggcggcggcaccgacgccgcctttgccgccctcaagaccaagggggccgtggtcgaaggcatgggcctgtccggcttcggcgcgcactccaacgatgccgaatacgtccagctcaacagcatcgtgccgcgcctgtacctgaccacgcggatgatcatggacctgtccgacggcaaggtgaagtaaagcggcacggtcggcgacccggccgggctgccgccgaaaaccggtgagccggtcacgcggtcgccggctcggccttggcgagatgaaagctcagcgtgaactgggcaccgccggatggcaggttctcgaccttgatcgtcgcgtcgtgatcgtcgaccacgccccggacgatcgagagtccgagccccgcaccatccgtgcggtggcgctgccgatcgccacgccagaagcgctggaacaccaggccctgctcggcaggcgcgatgccgggcccgcagtcgcgcacctgcaccgagccgtcctcgtgcacctcgacatcgactgacgtagcgtcggcggtgtatttgatggcgttctccgccagattgaagatcgcccgctgcagcatctcggcattgcccttgacccgcaccggaccgtcggtgccgcgcagcgcgatgtccttctgctgcgccagcgcgtagggcgcgatcgagccgaccacctcggcgcacaccgcgcgcaggtccgcggtctcgccggggtccagcaccagcgtatcgagctcggcgatctcgagcagctgactgacgatacggctcatgctctcgatgtcggcatgcagctccctggtccccttgctcgcatccagcgtctcgatccgagtcctcaggatcgcgagcggggtgcgcagctgatgtgcggcatcggccgtgaactggcgctgcacatgaaacccttcctccagacggtcgaaggcctggttgacagcggtcaccagcggcaggatctcgctcggaatccccttcgtcggcagccggacgccggtcctggccggcccgatggtcctggcctcctccgatgcccgcaacagcggaaccacggcgcggcggaagatcaggatgtcggtcgcaagcagaatcaggagaatcgggatggtgatccagccgacccgccggaagaagttggagacgatgtcgtcgatgatgacgtcgcgatgcgacaagtcctcggcgacctggatgcgcagcgtctcgccgccgagcaccttggtgacgctggcgccggaaatccggttggccgaggcgggcggccgcggcggctcgcgatgcgacgagaacagcagatgatcgtccgcatcgtagatatcgtagcggtagcggccatacgcgtcggaatacagccccctcaggctgtccggcaggttgagctgcaccttgccggcggcatcgaccgcgaggttctcgccgagatcggcggcttggtcgcgcatcgcctcgctatgcagatggttgatctccgaattcaacagccacagcagcagcagcggcaggaagatcgcagcgaccgcgaccgccacgatgtgcaggaacacgatccgcgaggtcagcgacgtgaagcggaacacccctatttttcctccgccatcaaatagccgacgccgcgaatggtgtggatgatgaccctggcgcggtgctcggtcagcagcttgcgcaggcgcgacacatagacctcgacggcattcgaggcgacctcgcccgacagaccgaagatgtggtcctcgacgttcttcttcggcaccacccggccctgccgccgcagcaggatctccagcacggatgtctcacgcgcggagaagacgtgcggcgcaccgtcgacgaacacctgcttgctctcggtgtcgtagacaagattggcgagcttgagcgacgagccgagcagttggccgggccgccgcagaatggcttcgagccgcgccaccagctcctccagcgcgaacggcttcgccagataatcgtccgcgccgctgcgcaggccattgacccgatcctgcagcccgttgcgcgctgtcagcaccaggaccggcagcgggtcgctcctgcggcgcagctccgacagcaccgacaggccatcgccgtcgggcagaccgagatcgaggatcatggcagcataactgacgctgcgcagcgcatcgcgcgcttcggcgacgctgttgacgatgtcggactcatagcccgccgccatcaacccgctggcgagcagtctcgagagctcgacattgtcctcgacgatcaaaaggcgcatcgcagcattcctgtcttcaccaaagcgcgcctgttcgcacacccgattgcaataggccagccattcccgaaataccggaacagaccacttcgcgggcaccagcatcgtgcaaatgccgcgcatgtccgcagaccgccccagacacgcgaaaccggctatgttttttctatgggcggaccggcccgcgcctacaaaaaatagataaaaccgcctatgctgcaacggaaattcgttagtcgcatgcgaggtttgtgcaaagcagtgtaaggctggcgtaagctggtcctgataacaggttcctggccccgtcgagaccaacattcctgtccgcgatgcggttaggtttcgggttcttgtgcggcctctccaatctcggcgaatcgggcggacgatgtcatttcggatgaagtatgcgggttactttgcgctgcccctgctggctggactgctggcgggcgcatggctgctggtgcgaaccagcggcgtcgagagtgtcaaggcggctgcgccgaccaacacggcgcctgacgtcaacatcgagcagcaatatgtcgtcctgaccgacaagcaggccgccaacttcaagatcatgcccgccgaacagcgctccttcaagacgctgaagaatgcggtcggctcgatcgactttaatcagaacatgctggtgcaggcgttcacgccgaatccgggacggatcgtcgatacgttcttcaacgtcggcgacgaagtgaagaagggcgatgcgctgttcaccatcgacagcccggacctgcttcaggccgaatccggactgcttgcgtcggccggcgtgctcgagctgcagacgagaacgctcgcgcgggtcaagcagctgctcaagaccggcggcggcgcgcagaaggacgtcgatcaggccacgtcggatcagcagaccgccgaaggcaatttcaaggccggacgagacgcagtccgcttgttcggcaagaccgatgccgagatcgatcgcatcgtcgccgatcgcaaggtcgactccatcctggtcgttccaagcacgatttcgggccgaatcatcgcgcgcaatgccgcgcccggcctctacgtgcagcccggcaacgcgccggccccctactcgctggccgacatctcgacgatgtggatggtggccaacgtgatcgaaaccgacgcgccatcttatcggatcggccagccggtcgaggtgcgggtgccggcctatccaggcgaggtgtttcgcggccgggtgacgacgctcggcctcaacatcgatccgaactcgcaccgccagctggtgcgttcggtgatcgaggatccccagcacaagctgcgcgccggcatgctcgcgagcttcaccatcgagaccgagccgccgaagatgtcggtcagcgtgccgctcgaggccatcgtccgcgagggtgacggaacgatgacagtgtgggtcacgactgatggccgacggttcgatcgacggtcggtgaagatcggaatggagcaggacggctggcgtcagatcctcgacggcgttgccgccggcgagaagatcgcctccaccggcgcggtgttcctcagcaacaagtttgccaacgcggccacaggctagccgtggccgccgagatcaaccgcgccgtccatcgttcaagaccaagtgcagtagtccagtgatcaagagcatcctccagtttggcctgacacgaagcgccgtcatcgtgctcagccttgccgtgttttgtgccgccggcatcgccgcgttctacaagctgaacatcgaggcctatccgaacccggcgccggtcatcctcgagatcacggcacaggccgccggcctctccgccgaggagatggagaagtattatacgatcccgatggaggtcgggctgtactcgacgccgggcgtcgtcaacatccgctcgacctcgttctacggcctgtcgttcgtgcgggtcaccttcaaatacggcgtcgactactatttcgcgctctcgcaggccaccaacaacctcacgcagaacgtccagcttcccggcaatcagatcccgcaaatccagcaatcgagcctggtcggcgagatttttcgctaccagctcgtcggcccgccgaatttcggcctgaccaacctcaggaccttgcaggactatgtcgtcgcccgccggctgatgacgataccgggcgtggtgcagatcaactcatggggcggcacgaccaagcagttcaacgtcgatgccgacctcgagaagctcgaggcttacaacatcaccgtgccgcagctgatcagcgcgctcggtaacgccaacatcaacgtcggtggccgcgaaatcgcgatcggccagcaatccgtcaacatccgcggcatcggcctgatcaattccggcggcgaagacgacgtcaccaaaggctaccgggtccgggacatcgagaacgtcgtgttgacccagtcgaacgggttgccgatccagatcaaggacgtcgccaaggtgtcggtcggctacgtgccgcggctcggcatcgcaggaaaggacagggacgacgacgtcgcggcagcgatcgtcgtcatgggacgcacgcagcacaccaacgacattgtccccaaggtcgaggaggaagtcaccaagatcaacagcgacggcaccttgcctcccggcgtcaagatcgcgccctactacgatcgcacctcgctggtcagcgtcacgacgcataccgtgctgcataatttggtgttcggctgccttctggttttcgtgatccagtgggtcttcctcggcgatctgcgcagcgcgctgatcgtcagcgccaacatcccgttcgcgctgttcttcgccatcatcatcctggtgctgcagggcgaggacgccaacctgctgtcgctcggtgcggtcgatttcggcatcatcgtcgattccgccgtcatcatgatggagaacatattccgcaacttccagtccgcgcccgagaaccggctccgcgtgctgcaacaccttgcacagggctattgggggaccgatccgaccacgtcgcccagcggccagcccgcgccaggctggaccgaacggctgcgcatgatcttcgtcagcgcattgcaggtcgacaaggcggtgttcttcaccgcagccatcactgtcaccgcgttcgtgccgctgttcaccatgcagggcgtcgaaggccagatcttcggaccgatggcgcgcacctatggctacgcgctcgcaggtgctctgctggcaaccttcaccgtgacgccggtgctggcctcgctgctgctgccgaagcatatcgaagagaccgagaccgtcatcgtgcggtcgctgcgtcaggcctacacgccggtgctgcgctggtcgctgtcgcatctgagggtcgcggttgccgccggcatcatcttcctcggactgagcggccttgccgcaagccggctcggcagcgagttcctgcccgcgctcgaggaaggcaatttctggatccgcgcctcgatgccaccgaccatgtcgctcgatgccggtaccgagccgacgcgcaagatgcgcgagatcctgctgcgccaccccgagatcatcaccgtggtgtcgcagcatggccgtcccgacaatggcagcgacgcgtcggctttctccaatgtcgagctgttcgcgccgatcaagccgttcgaccaatggccgcctggcctgaccaaggaaaagctcaccgaggagctgcagaaggaattcgacgaggaactgcccggcgtcaccttcaacttctcgcaatacatccaggacaacgtcgaggaggcgctctcgggcgtcaagggtgcgaactcagtcaagatcataggtccgaaccttgcagtgctcgaacagctcgcgggcaaggtcgcgcaggagatggccaagatccgcggcgttgccgacctcggcgtcttccacctggtcgggcagcccaacctcaacatcaaggtcaacagggagaagaccgcgcgctacggtctcaataccggcgatgtcacgaccgtggtccaggccgcgctcggcggcaccagtgcgacgacggtgctcgagggtgaccggcagttcggcgtggtggtacggctcgatccgaagttccgccagagcatcgacgaggtgcgcgagatcaaggtggcctaccagacgccatccggcagcaacgcctatattcccttgagcgaactcgccgacatctcgctcgataccggcgcgtcgttcatctatcgcgagcgcagccagcgctatatcccgatcaagttcagcgtgcgcggccgcgatctcggcagcacggtggcggaggcgcagaggcgcgtcgccgaggccgtgcagcttccggccggttaccggatgatctggtccggcgagttcgacaatctcgaggccgccaaggcgcgcttgttgatcgtggtgccggtgacactgctgctgatcttcgtgctgctctacagcctgttcaactcgctgcgcgacagcctgctggcgctggccggcattccattcgcggtcggcggcggcctgatcgcgctgtacctcgccgggctcgatttctcgatctcggccgcgatcggcttcatctcgctgttcggcgtcgcggtcatggacggcatcctcaacatcacctatttccgcgagttgcgggcctcgggcatgagcatcgcggaggcggtgttcaacggcgccgagcaacgcatgcggccgatgctgatgaccgcgctgtctgctggcgtaggcctgttcccggccgcgctgtcgcatggtatcggcagtcaggtgcaacggccgcttgcgacggtcgtagtcggcggcatgttcatcggtccgctattgctcttgatcgtcgcaccggcgttgcgcaagatattcctgtcgcgcgagcgcgttgcttcgcccgacgagacggctgccgcggcgccgcccgaagcagcgcattagaggcgcccagtcatgcacgccctcagcgcaagaatgtctcgccacgcagccgccttccccatgcgcgcgctggcggtagcggccggagccctcatgctggcgagctgcgccgtcggcccgaatttcgcgccgccggccgctccggacgtcgaacgctttacggccgagaagctcgcttcccccagcgccaataccgcgggccccagcgtgccgaagcagcatttcgtcaacggagaggacgtgtcgctgcggtggtggacggcgttccggtcgaagccgctcgacgagctgatcaagatgtcagtcgagcacaacccttccctgcagtcggccgaagcggcgatcaggatcgcgcaatacaacgcgctggcccagcgcgggctgttcttcccgcagatcggtgcaaactacacgccctcccagcagcagatttccggcgcgtcgagttcgggcccgggcggccagtccccgtcggtattctcgcttcacaccgcgcaactgaacgtcagtttcgtgccggacatctggggccagaatgttcgcgcggtcgagagccttgatgcgatctccgagcagcaactgttccagctggaagcggcctacctcacgctgacggccaacgtcgtcaccgcggcgatccaggaagcatcgctccgcggccagatcggagcgatccagcgcgtcgtgaagatcgaacgcggcattctggagatcgtcaagaaccagttcaacgcaggcggcgccgcccaggtcgacgtgctggcgcaggaagccgcgctggcgcagtccgagcagctgctgccgccgctcgaaaagcagctcgcggttcagcgcgacctgctgacgtcgctggccgggcagttctcggctgacgagatcctgcaaaagtttacgctcgaccgcctcacgctcccagcaaacctgccggtgagcctgccgagcaaggtgatccgccagcgtccggacgtcagggccgcggaggcgctgctgcattcggcgaacgcccagatcggcgtcgcgatcgcggcgcggctgcccaacatcacgatatcaggaaatgccggaaccaccgccttcaccctggccgaattgttcacgccgggaaccagcttctacgccatcgcggcgagcgcgacccagccgatcttcgatggcctgacgctttaccacaagcagaaggccgccgaggccgcggtggaccaggccgacgcgctctatcgtcaggccgtcatcacggcgatgcagaacgtcgccgacgccctgcgaagcctgcaggccgacgcccgcgcgttgcaggctgcggtcaaggccgaactcgccgcaaaggccagtctcgacatcattcagaagcagcttgcgctcggacaggtcaaccaggtggtcgtgctcaatgcccagcaagtctacctgaacgccgcggtggtccgcgtccaggcccaggcgacccgtctgtcggacaccgccgccctgttcatggcgctcggcggcggttggcccaccaactgcgcgtccgacgactggcgcaaatgcgccctcgaggacgcgcccaccaccaccgcgcagcaggtcagcgaaaaccggcctgcggcccgctgaccgggcggaacgcaaggtcccaactggaggagtcggcgaatgaaaaacatgctcactttggcggcaatcctgcttgcgatctcggcgggatccgcggccgcacagagcgctgtcggcggcccgaaaaagccgagcaatctcggcgggccaaccgcccagaagaacccggtggttccggctccgcagggcaacgcaccaacgcctccaccagcgccgccaaagcaagcgccgaagaagtagcgcatgcttcggcaattgagttggcacccggacatcagctgatcggcccgatgagaccaatatgaaacgcacgacgcccctgcttctcatcgttgcggcgatcgccgtcatggcatcggaggtccgcgctgtgcccgttcacgtcacaacgctgtggtcgcaacctcctgcgagcaccgttcaagtgcggctcgcctgcgaccaggactgccgttgctggcagacgcgctaccggcagcgaagctctcgccatgggatcgacgatcaagcgcgcctcgatccgaactactgccccggcggggggcactacaacggtcattaccgcaccggaccggccaccggattgagcttcgagagccgcgatcgggtgcgcgcattcccgtttccattttgatcgacgggatcgcaccggtgacagccgcccgctcccgcctcaggccaacgccttgtgaaggaaccgcaccatgaaaagcgctgccttgggcgtcgtgccgttgacggcagcgctgtgcctgggtgccctgtcgaacgccgaggcgtcccgcaccaaccccgacgattgcacggtgagagtcctgcacgccgaagagctaccttacgctacgatcggatactggcttgtgaaagtgacgctggaggtcaccccggcgagcggaccgcaattcgtaagaacgctgttcaacaatgtcccatggcagaagtcgtcgcccagacggggcgacacttaccggttgaggtgcagctcgctggacgggttcggttattgacggccgcgccgttgtcggccgccaatgcccgatgggatctctgcacgcgctgaagaggcgcggcgtcagacctgagagtgccgcgccatgaaattgtcgtaaccgacttcagcgacctggaaccactgatagccgttgttggagaacgacgtcagcgaatcatagaccttcttgaagttggcattgcccgccgcgacctcggcatgcagctccttggcggccttgaaggaggcctccatcaccgcagacgggaacgggcgcagcttggtaccgaccgcgagcagcttcttcagcgcgaccgggttggcctgatcgtagcgggccatcatccagttgttggcgagatggccggcctgctcgaggacgtgctgatagtatttcggcagcgcgttccatttgtcgaggttgatcatcgcaaccagcatcgggccgccctcccaccagccggggaagtaatagttcggcgcgaccttgtagaagccgagcttctcgtcgtcgtagggaccgacccactcggccgcgtcaatggtgcctttttccagcgccggatagatgtcgccgccggcgagctgctgcggcaccgcgccgagcttctgcatcacccttccggcaaagccgccgatccggaatttgaggcccttgaggtcgtcgacgctgttgatctccttgcggaaccaaccgcccatctggcagccggtgttgcccgcgagcagcgaggtgacgttgtagctcttgtagaactcgttgagcagctccttgccgccgcccagcatgaaccaggcctggttgaggcgcatgttgggcccgaacggcaccgacgagccgaaggtgaaggtcgggtccttgccgaaataataatagggcgcggtgtgccccatctcgaccgtgccgttctgcacggcgtcgagcacctgcaggcccggcacgatctcgccggcggcaaaggtctggatctggaacttgttgtcggtggcctcaccgaccgccttggccatcagctccgcaccgccatgcagcgtgtcgagcgatttcggccagctcgtcgtcagccgccatttgagctccggcatcgactgcgcgatcgcgggagctgcgactgttgccgcgcccgcgacactgaggcccgtgaccttgatgaaatctcttcgcttcattttgaatcccgccctgtgtgattgtgttgtccgagcgtcgactgcttgcgctcgtcgcgctgcttttctttgccgtcatgaccggtgaccgatcgcgcgccgccttcgtgccgaggcttcggcagcgagcatggaacatcccccgggcgaatgccagacgcaaaaaacccggcccccttgcgggggccgggctacttaagtcgaagctttttggcgcgttcgcgtctcgcgaacgcccgaaacgccgtcagccgcgggtgcgcgagcggatcatgaagctgtcgaaggtgtactcggcaacctgccaccacagatactggtcggaacggtatgcctgcatggcatcgatcgacttcttgaagtcggcgttcttggccgagatttcaccccacagctcgttggtcgccttgaggcaggcctcgagcacctcgttggtgaacggacgcagctgcgtgccgctggcgaccagccgcttcagcgccgaaggattctgcatgtcgtagcgcgcagccatccagctgttggcgttggcggtcgcgttggtcaggatcgcctggtagttcttcggcagcgcattccacttttcgaggttgcagtaggcgtgcacggtcgggccgccttcccagaagcccgggtagtagtagtacttggcgaccttctggaagccgagcttctcgtcgtcatagggaccgacccactcggcagcgtcgatcgtgcccttttccagcgccggatagatgtcgccgccggcgagctgctgcggcaccacgccgaccttctgcagcacctggccggcaatgccgccgatgcggaatttgaggccggagagatcggcgacggtcttgatctccttgcggaaccagccgcccatctgggtgccggtgttgccgcaggggaatccgatcacaccgaacttcttgaagaactcgttgccgagcgcctcgccgccgccctggtaccaccaggaattctgcatgcgcgcgttgaggccgaacggcaccgacgcgtagatcgcaaaggtcgggtccttgccgacatagtagtaagacacggtgtggcacatctcgaccgtgccgttcgacgtcgcgtccagcgcctgcagcccggggacgatttcacccgccgcgaacacctggatctggaacttgttgtcggtcatttcggcgacatacttcgccacctgatcggcaccgccatagatggtgtccagcgacttcgggaagctcgaggtcaggcgccacttgatttcaggcgaggactgcgcgatcgccggcgcggcaaccgccgtcgcggcagcaccggccgcagaaactttcaaaaaatcacgacgcttcatcgtaaggcttctccttgaggggcgtttcccagtgatcgcaagcaattctccggcaggacgctagcacgtccagccgaggcgctctgatcggccctttaacacggaaggcggcctcacggaaacgcgacaatggcatgaccgcgccaattaaacgaaagtctgatgacgcgggaatctgctggaaattgcaggctcaggccgccgcgccgacaccttgccgctggtcgcggaccctgccgccgaccgcgcggtaaatcgccgcgtgcgggccgtccggttgtttctcaacctccgggtgaccgtggcaatcagcgccgcgtcgtctcccgcgatttcttggccttgtcggccaaatgccgcccacgccggatccagctttgcgcggttgtcttgctgacaccatacatcttcgcgatcgtcgccgcggcttcgccgatggagtcggacttcttcgcaacgttgaacgccacccgggaggcctcttcgcgcttctcccgcgtcagatgcttgcgctctttgtctgcttcgcgtgacgctgccatgtcgatggtcgctccacgacccttcccgcggtttcggcttcatccctggccgccttcaattgatcgaaagacggtatgattcggccagtgcagcacaaacatacaggccggaaccgattcagcaatcgccgcggggcgacaggcctgtgaagaaagcccgccgcggcgcgccggaacaccagcgcgggctcaggcggcggcgatcacgccttgcagctgctcgcggaccttgccgccgatcgcgcggtagatcgccgcgtgcgggccgtccggttcgctctcgaccaccgggttgccggaatcggaggcggtgcggatggcgatgtgcagggggatttcgccgaggaacggcaccccgagcttctcggcctcgtggcgggcgccgccatggccgaagatgtccgagcgcgtgccgcaatgcgggcactggaaatagctcatgttctcgacgatgccgagcaccggcacgttgaccttcttgaacatcgccagaccgcgccgcgcgtcgatcagcgagaggtcctgcggcgtcgagatgatgacggcgcccttgagcgggacgttctgcgccagcgtgagctgggcatcgccggtgcccggcggcatgtcgacgaccagcacgtcgagcgtgccccaggccacgtcgcgcagcatctgggtgatcgccgacatcaccatcggcccgcgccagatcatcgcggtgtcttcctccacgaggaagccgatcgacatgatcgacaggccgaagcgcgccagcggaatcatcttcttgtcgtcgttgagctgcggcttctcgcggatgccggtcagccgcggcaccgacgggccgtagatgtcggcatcgagcagcccgacgcgcaggccgaggtcgcgcaggccgagcgcgaggttgagcgccgtggtcgacttgccgaccccgcccttgccggaggccaccgcgatgacggcggagatgccggggatctcggcctggcgcgccatcggtgattgcgcgccaggggggtgcggatggcggtgcgctgacgccggctggacgccgccggccggccgcggcgcgggtgccgcgccgccgcccgccttgcgctccgcggtcagcgcgatcatcgcgacgctgacgccgggcatggcgcgcacggcattctcggcctgcgcgcgaacgctctcccaagcgcgggcttccgcggcatcgacgttgatcgagaagaacaccttgccgtcggtgaccgtgatcgccgacagcacattggcgttggtcaaggggacgccgcggggcgacatcaccttggcaaggcaatcgagaacctgttgctgcgtcacgctcaccgcgcatctcctgggcttctagcgggcatggtcttgttcggaaaaccgcttcgtactttcccggaccgtgcccaagagacgacccaatagagcgttgcagcgcaaaaggctacctcgctccgacgtcgtcccgccgctcggccggtgccgcggcgccgccttccttggcggcctcgtaattcagctcgatcatgaccccgttggggtcgttcacgaagatctgccagaggtcgccgccgggaacctggcgtgagtcgaattccatacccttggactgcagccgcttccgcatcccgtcaaagccctggctggcaaaggcgacgtgatggacgacgcccgaatccggcttctgcgcctcgtcggtcgcggagatgtcgaccagatgcacgacagccttgccttcgctgtacatccacgcaccggggaacgcgaagttcgggcgggcgcccttttccaggcccagaacgtcctcatagaaccgcaccgtggcggcgagattccgggtccgtatattgaaatgatcgagcacaccgacgctcatgcccatgcgagacactcccttttttgtgaggttcttaggtagcccgatcctagcacaaaaccggggcctgccatccaacgaacccgttgccctccgctgcgcagggggtatggtgcggctccttccatggacggaatgccctgcccggcgcgacgttttccggcggtcttgcggggcgatcaccacggcaaatcacaaggtatcagacatggctaaagtcgcttttctcggtctcggcgtaatgggcttcccgatggcgggacacctcgtgaaaaagggcggccatgaggtcaccgtgtacaaccggaccgcggcgaaggcgaaggaatgggccgacaagttcggcggcaagaccgcagccacgccgaaggccgcggccgaaggtcaggacttcgtgatgtgctgcgtcggcaacgacaatgacctgcgctcggtcacgatcggccccgacggcgccttcgccggcatgaagaaaggcgcgacgttcgtcgatcacaccaccgcttccgccgaggtggcccgcgaactcgatgccgccgccaccaaggccggcttcaagttcgtcgatgcgccggtgtccggcggccaggccggcgccgagaacggcgtgctgacggtgatgtgtggcggcagcgaggacgcctatgccggcgccgagccgatcattaccggcgcctacgcgcggatgtgcaaattgctcggaccggcaggcgccggccaactgacaaaaatggtcaaccagatctgcatcgccggcctggtgcagggcctctccgagggcatccacttcgccaagaagagcggcctcgacgtcgccgccgtgatcgagacgatctcgaagggcgcggcgcagtcctggcagatggaaaaccgctacaagaccatgaacgagggcaagtacgatttcggcttcgccgtcgagtggatgcgcaaggacctctcgatcgcgctggcggaagcccgccgcaacggcgccaccctgcccacaaccgcgctggtcgaccagttttatgccgaggtcgagaagatgggcggcaagcgctgggatacgtcgagcctgctcgctcgcttgcagcgctaaggcctcggcacgcggccacggtgacccgcgcaggcgggtcacctgccatgcggcggcgtctcgcaaattccgcaccctcgacggctgctggcggctagaagtagcggcggtttgaaactcgccgtcgacgccggaagcccgtgaggaaagcgagacgaccttggaatacctggtgtggtcgctcccgttcgtcgtcgtcgcggcgctgattgccacgggacgcgcgtcctccaccacggtggggctgttcggtctcgtgacctcgctcatcgtcgcaatggtggcgccaccgcatccgtttggtgcgcgcgatgcgctcggcgcgatcgctcacggtggatggctggcgttgctcgtcggcgccgtcattcttggcggattattcttccgcgaggtgatctcggagcatggcgcggcagacgatccggcaccggtcgctccggaacggcgtcgcaaacagctctacaccacgtgctttctgatcggcccgttcgcagagggggcgaccggcttcggcgttggccaggtcacgattgcgccgatgctcaacggcatcggactcgcgccgctccacgccatcctgttcgggctgttcagccagatgatggtgtcgtggggcgcaatggccaacggtacgatcgtcggcgcgcagctctccgggattgcgccgaccgacctcggcgtgcacagcgccctgctcaccgcgccgcttctgatcgcctggctctgtctgttctggcgcatcgccgccctcgccaaggtccccggcacggcgctcgatttcgtcggcgaggcgctgtgcacggccgcggcggccggattgctggtcgccgccaatgcggtgttcggtccggaggtggcagcactggcagcgctgggaccactgatcgtcgcacgatttctgatgaacggccggcccgatcgcgagcaatggcggtcagcgcttcgcgtcggactgccctatgtcgcgctgatcgcggtgctgatggcgacgcgtgcgatcacgccggtgaacgaatggctccgccttgcgctcgcggtaaagccttttgccgacggcccggcctggttcccgctgctgcatccaggctcatggctgctggtggtcggcctcgccacggcgatcgcgatgcggcggccggcggtgcttgcgctcgcacgcgcatggacccgtggccgcaagccgatcctgaccatcggctgcttccttgcgatggcgcaggtgatggcgacgtccggcctcgccgatggtctcgcaacgggcctgaggtcgggacttggcccgctcgccgttctcgcaacaccgctgtttgccgcagcgttcggatttctgaccggcagcagcaacgccgccaatggcctcctgatgcccgcccagatcgcgctcgcaagggatgctgcgctcagcctgccctggctcggcgcgatccagaacactgccgccgcggccctgaccatgctgtcgccggtgcgggtcgcagtcggctgtgcgctggtcgggaagcccgaccttgagcgcaccgtgtacttgcggggctggccgctcggtgcggttccgctcgcaattctggtcggcgccgcagcgctgttgctggtgcactgatgcgtcatcggcgcaccagtgcaagcccggcgcaaaagttaatttaacctccggttaacggttttctttagctctttaagtcatcgcttaatgatttggcgtcacagatagacaatgcaaaaggcccgcgcggtacgcgggcaggatttgtgttgtttatgagtaatcccgcagaaaagcctgaagttgtagcgcttccggcaggacctcaggtggcagcgccggtgaacagccggcgcgtcgctgcgcagcgggtgcgtgaggcgcgggatcggttaacgtcaaccagtggaacccgcccggcgttcgacgccgaactgctccgccaatacgcccagacccggatctcggcgtcctatgtcgtgatgctgctcgtggtggcaaccggcgtgctgttcggcctctggatgaagccgatcgtggccggcgcctggacggtcggcatcctctgtgtccatctcctgatcattcgcaactgctcccgcttcctcgccgagccgacttcggtcgcggtgacgcgcaaatggcggacgcgcttcgtgctgctcgacctgctctacggtctgtgctggaccgcgatcctgatccaccccgccgggcgcgatctcgcttccaacacgctgatgatgttcctgatgccgctggtgatcgcggtctccagcatgctggcggcgagcctgccgatcgcagcgctcgcggcgaccgttccggtcacggtcgggatcgcgctcgacctcgtgctcaacggcgcgttcgacaattacgtgctggcgctgctggcgcttgccgccgagggctatttcgccctgctggcgcaccgcctgcattcgaccacgcttgcgaccctggaggcccgtgccgaaaaggacgcgctgatcggcgaactggaacaggccaaggcgatatcagacgaggcccggcaccgcgccgagtccgccaacgtcgccaagtcgcgcttcctggcccagatgagccatgaactgcgcacgccgctcaatgccatcctcggcttctccgaggtgatgaaaagcgagatctttggcgcgcatgcggtgcccgtctataaggaatactccgccgacatccataattccggcgtgcacctgctcaacctcatcaacgagatcctcgatctgtcgcgcatcgaggccggccggtacgagctgaacgaagaggccgtggcgctggtgcatgttgtcgccgactgccaccatttgctgaagctgcgcgcctccagccgcggcatcaccatccacgaagtgttcgagcacggcatgccgaggatatggggcgacgagcgcgccatccgccaggtcgtgctcaatctgctctccaactcgatcaagttcacgccgcagggcggcgagatctggctgaaggtcggctggaccgcgtcgggcgggcaatatctgagcgtcaaggacaccggcagcggcatcgccgaggacgagatcccggtcgtgctggcctcgttcggccagggctccaactcgatcaagtcggcggaacagggtgccggccttgggctgccgatcgcgaagagcctgatcgacatgcatggcggcaccttcacgctgaaatcgaagctgcgcatcggtaccgaggtgatcgtgaccttgccgccggaacgggtgatgagcgcactggcgccgatgacggaagaagcgccgccggtgcagccggagcccgccgagcccacgatgggcgccgaccggaagcgtgtgcgccgcaagtcgatcatgagtgccggcaccggattgtagaacatgtcgcggacaatcgtgactagggtttcgttgccaacaaatgcaaggcgttcgcgccgagaccatgctcgcgacaaggagccggggcgtgatggcgcatcccgtttcgagcgacttgcaccagcggccgaaacggttcaacagttgcagcatgagctcagaaacgccgtgtatcgcagtctgcatgatggaccccaggacgaagctctgcttcggctgcggtcgcacgcttccggagatcgcgcgctggcacaagatggatcgcgcggagcggctgtcggtgatgtcgactttgccggcgcgcatggccgatgccgggctcgagcgcatggagccgcgcccgaagcgcgcctgaccgccgccgcgagcgggggcgcagcatgacccgcatcctcctcgtcatcctgctgctgatggcgaccgccggcgcggtcgtcgcctatggcgatcccgatcagatcgcgcgcgccagggagaacctgacccagatcttcggccgcaccgtcgccgccgcagcccccagctccacctccgcccccgcggtgcagatcgcgcgcagccagggcggcgagttcgcgttccgcgccaagatcaacggcgtcagcgcgccgatggtgatcgacaccggggcgacctctgtcgtcctgacctgggaaaccgccaaggcgatcgggctgccgaccgacatgctggactacaatgtcgacctggagaccgccggcggccacaccaaggcggcgcggctgacgctcgatcgtctcgcggtcggcaagctggtcgagaaatcggtgccggcgctggtggtgcagcgcgggcagatgaagaccaacctgctcggcatgagcttcctcgaccggctggagagctggggtgtccgctccgacacgctgtccctcaccggctaccccgacgtcaccggcagcatcagcacctcgagccgccaccggcgtccgcgcacggcgatcgactaggacgcacgcgccgacctcagtcacgcatacaagcttgtgctaccggtcgtcgtcgcggatcgaggacggatgccggcacagcggcgtgacctggatttccatgaagggaaacagcggcaggctggacaggatgtcgtgcaactcctgcgcgcccgatacgtcgaagatgctgacattggcgtagcgtccggccacccgccatagatggcgccatgcccccgtgcgctgtagctccatggcgcggacgcgttcggcctgcttcagcgcgtcgaccttttcggctgcgatgtcgtgcggaatccgtacatccatttcgacgtggaatagcatggcgatgggctcactttgcagaaataatggagccgccgcgcaatcgcggcggctcatcgatttgtcttaccagatcgtcagccttgtcgtcagccctgtaccagaccgcggctgacgagattgatgtcgtcgggattgacgaggtccttcgccgtccaacccgagacgtcgtagtcgctcatgcagttgcgaacgaaatcctgcatggcgccgagatcgccggtggcgctcgcggccatcaacgtctcgacgcgcagattctcgtaattgccggcatagttgcgctcgtagagctcgtgccggccgccgaactcggagcccatcgcgtcccacagcagcttgagcagcttgatccggtcgatcgccgcatagccgttggagccgcgcacgaagcggtcgagatagggccgaatcgcctcgctctcgaggtcggccgaactcgacggcagatagatcaggccgctcgcgacatggcgctcgatcaattccttgatccgcggataggccatcggcgcgaacacacgataggccagcccgtagttcaggttaggcagattgtagccctcggtgccctgccaggcgatcggcgatttcaccatcgcgtcggcaatgccgtggaacaaattgcgccaggcgatgacctcgccgaccgcggtctgcacgccgcggaaatccttcgagccggtcgcctccaccgccatcgagaacaggccggcgatgaagtcgagcttgacggcaagccgtgtcacaccgtgcagcgtgaagcgcgggatgaagcctgacgccgggaagaactggttgatcttgtcgacgtcgccatagatgaagacgttctcccagggcaccagcaccttgtcgaacacgaggatcgaatcgttctcgtcgaagcggctcgacaatggatagtcgaacggcgagccggtcgcggccgccgtgaattcgtaggacgagcgcgcgatcagcttgatgcccttggcatccatcggcgcggtgaagatcagcgcgaacgacttgtccttgatcgggatgccgtaatgggcgatgaaattgtagtgcgtcagcgccgagccggttgcgaccaccttcgcgccggacacgatcaggcccgcgtcggtttccttctcgacatgcatgaagacgtcgcgcacctcctcgatggcgcgatcgcgatcgatcggcggattgacgatggcatgattccagaagtcgagccgctcctgggttcgtgaataccacttcttggcgttgccggcatattcgccgtagaagcccgaattcgcaccgagcgtgccgaggaatgccgccttgtagtccggcgagcggcccatccagccatacgcgaccttctgcaattcggcgatcgcatcgcggccccgcacaaggtcgtcggccgttttcgagccgaggaagaacggatgggtgatctgtcccgagccggtatcggtgagaacgccgatctgatccttcttctcgtggaagcggtcgtaccagcgcgccaccatccgggccgaattgcggaacgcgggatgctgggtgacgttcttgacgcgctcgccatagatgtagatttcgcggccgtcctggatgctgtccaggaattccgcaccggtatagacgctggttgtcgacgcaggcgcgtcggcccgcagagctgctgctgtcgtcatgggtttctcctccgcttgtgtcgctcgaccggcggacgtcgccgcattggcctggacaatcccgtcacgctcttggtcggcgtgacatcggaggaaaagctacgcgctcacccggagccggcgaaaggtatcacaccataccgcgccggccgccgcggctcgcgctatgacttgggtgcaccgaccggacgccaagatcgtccagcggacgcagcgccgcagctgaccatgcacaatgcacagcacggcagagggagcgaaccatgggcaagggttttgacagcagcgctgtcgctttccatcgcgatggggaattggccctcgacgccagcgtcgtcaccatcggcgcgttcgacggcgtccatcgcggccatcaggaactgcttcggcagaccattgcggcagcgcagcgccgcggtgtcccggccgtggtctacactttcgatccgccgccaaaggtgtatttcggccaggccgaggcactgatctcgctcgacgagaagctcgatcgcatcgcaacatttacgcccgaccatgtcgtcgtcgcggacttcaaccagatctacgtcagccgcagcgcggccgatttcctcgccgagttgcagctcctgcggccatgcgaactgatcgtcggcgaggatttccgcttcgggtcctgcaagggcggcaccgcgcagctgctccggcagcacttcaacacgcgcatcctgccgccggtgcgctgcggcaatggcgagatcgtctccagcagccggatccggagcctgcggcgatccggtcttgcggccgccgcggcggcgctggagaactggaaggatatcgtgaccgcgccgcgcgccattcgatcccgtttggcccaattcgaggtcgcaaaccaatgagcaccatcgatccgcgtgagctgcgcaacgcctgcggccagttcggcaccggcgtcaccatcatcacgacgcattgcgagggacgcgatcacggcatgacggccaatgccttcatgtcggtctcgctcgatccgcctctggtcgcgatctcgatcgccaagagcgcgaagatgcttcgcaacatccagagcaccggccgcttcgcggtcagcgtgcttgccgagggcatggaggatctcgcctggcatttcgccggcaagccgaagctcgacctccgcgacgtgttcgagcgccgcaacgacctgccggtcatcgccaacgcggcggcgtacttcgtcaccgatctcgccgacgagatcatcgccggcgaccacaccatcttcctcggccatgtccgcgagatggcactgcagcagagcacgcgaccgctgctgttctttcgcggccggttcggcagccttgccgacccgcaccccgcccccgcgatgctggagaatgcggcctacgaatttgtctggtgaatcgaccagccgaaattcccgaaaacgggaatgcaagcttgatcaaactgcaagaaaaggaggaaacgaccatgctgaacgtcaacaaggacaccatcaccgaccacgtgatcgcggcgctctcgccggatatcccggaccgcaaccgccagatcatgaccagcctgatccgtcacatgcacgcgttctgcaaggaggtcgacctgacctttgccgaatggttcgcggcttgtgaattcctgcgccgcgccggcgacatctcggacgagaagcgcaacgagttcatcctgattgctgacattctcggcgtcgaggtgctggtcgacatgctcgaccaccgggtcaccgacggcgagagcgaatccaccgtgctcgggccgttctaccgggagaatccgccggtgctgccgaagggcgcctcgatcatcaagaagacgttcgacaacgcgcagaccgtgaaggtcagcgggcgcatcagcgacaccgcaggacggccgatcgagggcgtcaccatcgatgtctgggaagatgcgccgaacgggctctacgatctgcaggacccggagcagccggcctacaatctgcgcggacgcttcaccaccgatgccaacggtgaatacgccttcgtggcgctgcgccccgagccctacccgatcccctatgacggcgccggcggcgagctgttgaagtacatgggtcaccatccctggcgtcccggccacatccacttcatgctctccaaggacggctatcaatcgctgatctcgcagatctacgattccgagaccaaatatctcgacaacgactcggtgttcgccgtgaagcagagcctgatcggcaagttcgccaaggcgccggccggcgccgacaccgacctcgtgctcgagttcgacttcaagctcaagaaggcggccgtcgaacggctcgtcgcggccgagtgatgcgcattccgccccgccaggcagagcctggcggggttcattctgatctgacctgtgaggacatatgagccgtgccgtgattgaaatcgccgagcccgtggagcacgtgcaggctgccgccaaggacactgcgatccgcagcatccgcgccaccatcgtggaagcgccgacgcgccggcggcacaagctctcgaacacggaagtcacgcatcagggttacgtgctggtgcgcgtgctgctcgacaacggcgtcacggggatcggcgaagcctcgacgctcggcgggccgcgctgggccgaggagagcgtggaatcgattaaggctgcggtgacgaattatctggcgccggccctgctgggacagccggccctcgccttcgaggccaatggcttgcgcatgagcaaggccgcgacccgcaatttcgccgccaagggcgcgatcgaatccgccctgcttgatgccgccggcaagacgctcggccttcccgccagcgcgctgctcggcggcgccgtgcgcgagcggatggaggtgatctgggcgctggcctcgggtgacagcagccaggagttggaggaagccaaggagaagctgcggcgccgcgaacaccgtcagttcaagatcaagttcggattcgaccggccccaggccgatctgaggcggctgcaggcgctgcgcgccggcctcggcgacgaggtgcggctgatcgtcgatgtcaatcagggttggaccgaggccgaatgtatccgcttcctgccggcgctggaggagctggacgtcgccctgatcgagcaaccggtctcggcgctacagctcgaagccatggcgcgggtcgcggcgcgcacctcgatcccgttgctggtcgacgaagcggccttcaccaaggaggaaattgcccgcgtcgcgacgatgggctgcggcagtgtctattcgctgaagctcgtgaagagcggtggcctgtttgaaatgaagcgtgcggccgcggtcgccggcgcgcatggcctcgaactctacggcggctgcctgctggagagcagcatcggcgcggccgcgcatctcgccgccttcgcgaccctgcccaagctcgaatggggcaccgagcatttcggtccgcggattctcgtggaggacctggtcgtcaacccgatcaaattcgacgcgttcgagatctgcgtccctgatggcccgggtctcggcgtcgaggtcgacgaggacaagatccgtgccttcgctcgcgaggactagtccgatgacgtcgtccccgcggacaattgacaatccggggacccacgcccagtcttcgcgcagaaaccatcgtctcgaacgcgcgctgatgaccacacggcaccaaacccggccagccttcccggcagcttctcttgaagcgcgtggccgaacgtccggctagctcccgtgaccgagcgcgacgatgtcatggatctcaggcgactggtctatttcgtcgcggtcgccgaggaattgcatttcggccgtgccgcatcgcggctcgcgatcgcccagccgccgctgagccggcagatcgcgcagctggaaagcgatctcggcgtcatcctgatcgaccggagccgcagccagatccggctgacccaggccggtagcgttctgctggaacgtgcccgcgacgtgctggagcggctcgaccgcacccaccgcgagatcaagcggatcggcgaaggcttttcgggtcacctgcgcgtcgccttcgtcggatcggcgacctacggcgtgctgcccaacgtgatcaaggcgttccgttcggcctatcccgacgtcgagcttgcgctctcggcgatgaacaatgccgagcagaagcgcgcggtgatccagcgtgagatcgatatcgccgttgcccgcccctcgctcgacgacgaggaattgaaatcggagccgctgctgcaggagccgttgatcctcgcgctgtccgacacctcgcccttgctcgagcagcaggtcccgcggctggcggcgctgaaggccgagaccttcgtgctctacccgcgcaagccgcgcccgagcttcgccgaccacattctcaacatctgcctcgaagagggcttcattccgagatcgcaggtgctggcgcaggactatcagaccgcgatcagcctggtgtcggtcggcgtcggcattgcgttggtgccgaaatcagtctcgcaggccgaacgccccggcgtcgcctaccgcgcttatgagggacacaatccgggcaccgcgctgtcgctgaactaccggcgcgacaaccggatgccgcacctgttcaatttcctcaaggtcgcacaggaggtcgtgcggcgtcagcgcaagccgtagtttgtcgcgtcaggccgccacggctgcgcgtgcgcgatcgtcaaccagcgcgatcgcgtcgcgcagcacgttgacaccggcgcccggccgcacgccgttctccgcgaggtgcctgcggaacgcccgcgcgccgggaacgccatggaaggcgccgacgaaatggcgcgtgatcgaatgcagccgcgtgccttcagccagttgccgctcgatatagggcagcatcgccgcgaacacgtccttcatcgtcgcatgtggcggcgtttcaccgaacagctcggaatcgaccgtgagcagccgccacggctcctgataggctgcccgccccagcatcacgccatcgacatgcgccagatgctgcttcgcctcggcaatactcttgatgccgccgttgatggtgatgggcacgtgcggcaacgccgccttgagacgatagacgcgatcgtagtcgagcggcgggatgtcgcggttctccttcggcgacaacccgttgagccaggccttgcgcgcatgcacgacgagcgcatccgcgcctgcggcaatcacgccgcgcgccagcgtatcgagagcgacttccggatcctggtcgtcgatgccgatccggcatttcacagtgacagggattttcaccgcgcgcttcatcgccgcaacgccttcggcgaccagcgcaggctccgccatcaggcaggcgccgaaccggccgtccttcacccggtccgacgggcagccgacattgaggttgatctcgtcatagccgaaatcctcgccgatcttcgcggcggtcgcgaggtcgcgcggatcggaaccgccgagctgcagcgccaccggatgctcgctggcatcgaagccgagcaatcgcgcccggtcgccgtggatcacggcaccggtggtcagcatctccgtatagagccgcgcccgccgcgacatcaggcgatggaagaccctgcaatgccggtcggtccagtccatcatcggagccacggaaaagagatagtcttgcgattccaattatttaccttacactttcaatgggatgaagcacgaacgtgtgcactccaaactagcccaaattgcacacgtttgtacctgttttgacctctcattgcacacgtagagcacacgaattgccatcgccgttgaccagctggttgcccttcgcgcaggcccggaaccgttgcgtagggccgttccgttaaatgcagtcaatcgggctcgtcttccggactccgctttgccctacttgctatgcatatcgaacgctataggtcgcgctcactggcacgggcgtttccaagcgcgtcatttctgagcatcaactcggcaatattccgagcggagccattgccaattcctgcaaaggctatcccaaggcgccgcgcgccctccccgtcggtttcaggattgtcgccgatcacgatcgcctcgcaggattcaacgcccgccttcagcaacgcagctctgaacagcgcctcctccggctttccgatcgcccggtacctcagaccaggcaagcaggttttgacggcaccgaggagagctcctgtttccgggacaagacctccgtccgcggcagggtgagtagcatcgatgttggcgacgatcagttcggtgccggcgctcagcaggcgcaccaacctttcaagacgctcataggtgaagtcgacgtcgcgggtcagcaacgcgaaatccgcgtcccggtcggtgagaaccaatcctctcatcgaggctcgagcggccagcgtcgcagagccgatcagcgccagcctggcttcgggtgacgccatcgcgatctcgtcgatcgcggtcgcgcccgcgaggacgatccgatccgcaggtaacgcaagaccaagccgagcaagacgcgccgccagcgtttccggcgtatccgtcgaattgttggagatcgcgatcagccggtctccgaaccgggacaccagttcggatgcgcctggcaacgccgtgtctcccgcaatcagacatccgtcgatatcgcagaggatggccttgaagtgatcgagccgaaccctcattcgacgaagcggccttccaccgcagcccggtcgtgcagccaatatgaagggccgtcgtagaggaactgccgatgatggacggtcagaccgtcgcccgacacgcggaccagggcaaaatcgggcggctcgagcgagccgggaatcttgtcctcggtctcgaggtcgaaaccgacctgatgcatgatcgagcgctgcacatgatagggcacgccccgccacagcccgaaaacaggccgatggatgtggccgtggaacatcgcatccggtcggcggccggcgcgctcgaacgtctcccattgttcgtcggcgttgcgcacattgtagcgatccatcgatcgcaagccgaccttgccgctgtgatgatgctggaacaacagcagcggacgatccgcaggtgcctcgcgtagcgcgcgctcgagaaacgccaaccgacgtccgcacaggatgccgacatgggtacgcccatcctcgtcgagcgtatcgagcgtcaagatgcttgcggccgggaagacgcgcagcgcctggacgaatccgtttccgtcgtcatcggcattcgggaacacgctcctgaacggaccccgcctgtcgtgattgccgagcatcaggatcggcggaacctgcagcttcgtaacggcaccggcaaaattttcgtaggcctcccgttgcccgaggtcggtgagatcgcccgcgaagatcacgaaatcaacccttgcatgatcccggttgacgacctcgatggccgcttccaggcgctctcgcggatcgaggccgtagaacctctggcccggcgggccgaaatggcagtcggtgagtatgacgaattcgagcgcctggtcgctcatcgaaagagcctccatagggttttcgttcggggggcggacgcggcattcgcgcatccgccccgatcgatttcacttcttggcaagaagctcggtgacctcctcctgcaactcgcgctgcagggccggcatgtcgttggcgcgtcccaccacgatggactcgatgccgtcgtagatgacctgcgtcaccgcaaggccgttcgcgccgggatagggctgccattcgcgcagcagtggcagctgacggaccgccgtctccttgttcgggttctgcttgtagaaatcggacaggatcagctcgttcgcagccttgttcggcggcatgtagccggtcgtgcgcgccacgtcagccgcaccttcgcctgacgtgatgaacttcagccacttccaagacgcctcgaccttcttcgcatcagttgacgtcgtgaccagcagcgccgcattgccgccggccggcagccccttcggtcccgcagcatcgatgcccgggaattcatgggtaaccagcttccattcgcccttggaccgttcgatcgcgcccaattccgaggtcgaggtgaagtacatcgcgatctggccagcggcgaacgatttctgcgcatcagcgagcgaatagttcggcatgttgcagccccggaagatcttcttcatcgtctccagggctgtcaggccggcattgctggcgagattgaacctgccgttcttcatgagcgaatcgccctgcgaccacatcagggtttgcaggaaccagttgccggtgatgttccaggtccagaacagcggagtcttcacgccggccgactgcagcttgccgcagagacccaccacatcgtcccatgtcttcggcagttgatcggccttggtgatgccggccttggccatcatgtccatgttgtaatagctgaccggcagcgaaatcgcgaacggaagcccgtagaccgctccgttcgaggtgccgagatcgagcatcgccttgtggtaaccgtccttggcgaaatcaggttctttcgcgatatacggctccagcgatttggcgatccccttctcgaccaggatcgcctgccgattgaggccctggatcgtcacatcggggagaccgccggaggccgcctcgcgaaggatcgtgttggtgccgtcctcgtaatccttgtaggcggcgcgcatcttgatctcgatgtccgggtgctgcgcgtagaatttcggcagtatcttctggaacgtgacgtcgaacagatatgagtaggtgtagccgaactcgacgacggtcttttcttcggcgttcgcacctgacgacaatccgagcgcgagcagcgcggcagtggcgagaaggcgtttcaaggtcattctccatatggtggtggtcgaagggaggttcagccggattgacgctcgagcccggacctccccttcttctcttccgcgggatcgcggagattgcgatgctgcagggctatttcatgccagacagcgtaattccttcgatgaaccgccgctgcgcgagcaggaatgcgacgatcaggggcgcgacgatgacggtggcactggccatcatcggtccgtagaggcttccgtcgccgccgccgcgaaattcgtgcagcccgagcggcggcgtgaacaggttgcgatcgcccgtcacgacgaccttcggccagaaatagtcgttccaatgcgcgacgatggagaagatcgcgaaggcgagcagcgccggtaccgccgtcggcagcatgaccttccagatgatcgagaactcgctcatgccgtccatgcgtgccgcatcgatgagatcgtcgggcaccgtcatgaagaactgccgcatcaggaagatgccgaacacggagatcgtccagggcacgatcagggccgcgtaactgtttgtcaggccaagcttggcgagcataatgtaaagcggcagcgcgatggcatgcacgggaatcagcaggcagaacaggaccaggccgaagactgcatctctgccccagaatttgagcttggccagggcgtaggcggcgggcaacgcgatgatgacctggagaacaaagatggacgccgtcacgatgacgccgttcaggaggtagcgcagcagcggggcctccttgaacgccgatgcgtagttgaagatcaccggtcgctccgtgcagtgctcgcgcagcgcagccgagagcttggcgcggacggccgccgtgtcgagatccggattggctcgcgtggcctgctcgatcgccgtccggcccggctcgttgcgcttgacgcagaactcgtcgaccatcggcgcttgcgagccgaagaagcctccctcattgcgctcgatctcgcccggcgacttcagcgacgtcgacagcatcacgtagaacggcaacgcgacgatcagggctccgagcatgagcagggcgtgtttgaggcattccgttgcggagaagcgatggacggtcatgcgtagtgcgccttcctctcgatcacatatttctgaatcgtcgtcgcgatcagcacgaaggccaggaaaatcacggcgatggccgcgccgatcccgatcaggttctcgcggatgcccttctcgaacatcgcgaacaggatgacgtaggcgctgcgggaggggccggccccctggtcgtaaaatccctcgacgatgtcgaagacctggaacgagcggatcaccgtgatggtcacgacgaacaccgtcgtcggcgccagcatcggccacgtcaccaggcggaatcggtcccatgcagtccgcgcgccgtccatctctgccgcctgatagagctcgggcggcaccgaggtcaggccggcgagaaacagcaccatgttgaatccgaatccctgccagaccccgacgaaacagacggtccagatcgcgtaggatctatcgcccagccaaagcgggaagccactgcgacagccgcgatcgaaccatggccaggcatggagccaatcggcgccgcagaaggacgccagcgtgctgttgacgattccgagcgtggggtgaagcgcgaagctccacaccaccgacatcgccatgagcgttgccatcacgggcaggaagaacacggtcttgtagaatgcgccgccccagcgcagcgagtggatcagcagcgcggcgccgaggcccaggccgatcgatagcggcgtgaccgtcaagacgtaggtcagcgttgcgccaaacatgctcatgtagcgcgtctgagtgaatatcttgacgaagttgtcgatgccgacccagcgcgggccgtcaccgcccaggccgtagtccgtcaatgacagcagcgcgacgccgacgatcggcagcagcaggattacgaccatcagcgccaacgcgggagctacgaagatccggcctgcatgacgagccgcggacgacgtggacgccatctcacgcccccgccatgaccggagaccgatcgcggaccgcggcagtttcgcggagcggcaggcgccccttgtcggcgccgaacaccaaaatccttgccggatcgaggtgcagctgcactgccgtcccgaccgcaagggaccgcgccgtctcgggtgatgaacgcacgatcacgcggtgctcgacatcggtgatcccgccgccgagagcggcatgaacgaagacatccgctcccaggttttccttatagataatccgggcgtccagcccttggtcgcaatcgccggcgccgatccgcagatgttcgggccgcactgccaccgtgacggctccaggcgtgccgacaaggcgctgcggcaggatccgaccgaacacggcgatatgcccgtcggcgtccgccgtcgccggcagcgtgttgatcttcggactgccgatgaactccgccaccctgagatcgcacggctcgtcgtagatatcttcgggagttgcaacctgcagaatgttgcctcccatcatgacggcgatgcggttcgacatcgtcagggcttcggcctgatcgtgcgtcacgtagatgaaggtcgcgcccagcgcgcgatgaagctcggccagttcggcccgcatatggacccgcaatgccgcgtcgaggttggatagcggttcgtccatgagaaaggcgaccggcttgcgaaccatcgcccggccgagcgcaacgcgttgccgctgtccaccggagagctgccccggtttccgctgcagcaattgctcgatcttcaaggtgcgcgccgtctctttgacggctgcttggatcgaccggagcttccttccgcgcgcgggcgacaaacgtcccagcaagggcagccgctcgagcagcgaaagatcgcgcaacaacagcggcgtcatcatgttgcgctcgaccgaaagatgcgggtagagggcataagactggaacaccatcgcgagatcgcgggcgctcggcctgatgccggcaacgttcctgccgtcgatcagtacatctccgctgcacggatcctccagccccgcgatgatgcgcagcagggtcgatttgccgcagcctgacggcccgaccagggatacgaattctccgtcggcaacgttgaggccaacgtccccaagcaccttggtcgggccgaaggccttttcgatattacgcaaactgatcgcggccatgtgagcttccgtcgcaacgatttttccgcagacggttctggcgctccaatgcaacaaagctgttacattcataacctaagcttatgtttgcgcatgcggggtaacgacgcatgtcggatatatccaggacgaatcgagatgttgctgacgagcgcgagggttcgcgcgttcaatgcggtcctcgagaccggaagcttctccgccgccgcgaaaaaactgggtctatcgcagccggcgatcacgcagtcagtgcgtgacatcgagcgggaagcaaacattacgctgttcgaacgccgcggacgagcgatcgcaccgacagccttgtgcgcggagttgtatcggctgacggcggaatccgaacgctgcgaaaccgaggcgctgaagctactgaagcagcacgccaacttggaaatcggaacatttcagatcgggctcgggaattcgatgcccggcatggcgctgatccgagagttccgccgccgatttccgggcgtccaggttcaggtcgagctggggtcatgggccaacatcatcgcagccgtcgtggagcagcgtgtcgatgtcggcgtgctgcccaacgtgcccgatgacggccggttcctgcgcagaatctgcgtcaagcaggacgtggtcgccatcgtcgcagaggacgccccgctggcccagctcacgcaaacgagctgcagcgaactggtacgccatccgcttattttcagaaccgcgacctcttctacacagcgggtcgtggaccggggctttcgcagcagtggcttggcaccaaggccgaccatggttctcgacactcgggacggcgtccatgaagccgtcgcgaacggcctcgggatcggcttcatgtgggagttcggctcaagccgcaaggacggcatccgcaagcttcgtgtggtcgactttgagcagagtcatcccgaacacgtctttcacctgacgggacgcgcaagcccgctcgtcagagcgtttcaggccattcaaatctagctagtcgaattggaccggatcagatccgggatatgagtgggcgacaaattcgcagaacgcgcgagcggccgcggacagcttcgtcttgcctttccaggcaagcccgacgtccatggtgtggacgtcgtcatcgagcgtcttcagatcaatgcgatgaccttcgagcgaccagggacggtagaccatgtccgaaaggatggtgattcccataccggtcgcgaccatgctgcgaaccgcctcaaccgaaagggtacggaagatgacgttcggaacgtgcgtcgtgtgctgccagtagcgcatcgcggagcgttcggcctcatcgacggtcagcatcaaatacggctcgctcgccaggtccgccagcttgacgctgtccttgcgcagcagcggatgattgacgcaggtccacaagcggcgcggtgagcgcagcagcagccgcgagcggatcgagtgccggtcatgcaggttcgcgatcaacatgatggctgcatcgacgctgccgctgatcaggctctgctcgatcgcatcacgttgaaactcgtgcagccggaccgtgatgcccggaaaggtccgccagaaccgcgtcagcagcggcggcaggaaatatccggcaacggtgtagctcaccgccacgtcgacggtgccgtcgacctgcgttccccagcgatgcggcccccttgtcgcatccgacacgctcgcctcgatcgcgcgggcgcgctgcaggaactcatggccgtcgaatgtcagcgtcacgccgttggaatggcgatcgaacaatttgcggccgagctcagcctcgagcgccttgatcgacgaggtgaccgccgactgcgtcacgttcaaagccgccgcagccgccgaaacgcggccgctctctgccgtcgcgatgaaatgccggacctgacgaaacgtcagagacataaaaaattccgatatcagtgaacgatatttcgaattttacaatcccgcgacggaacggaaaaatcaatccgtcggttccgggtgagaaggcgttgggatgatgtctgatggtttggagttggtcgctcgcggtgtcagcgtccaattcgaaggcctgaaagcgctgtccaacgttacactgaccgtgccgcgggggcgtatcgcaggactgatcggccccaatggggccggcaaaaccacccttattaacgtactgaccggattccagccggtcggcaccggcaccgtcgtgttggaaggcgaaacgctcaacggcattgcagcgcacatgctgcgacgcaaaggcgtggcgcgaacctttcagtcaggccgacttttccgcgacctgcctgtggtggacaacctggaagtgaccggcgtcggcctcggccagagccggcccgacgcaatcggcgaggccgaacgggtcatggcctggctcggcatttcgcacctcgccaacaccatcgccggcgcgctgccctatacggacgagcgtcgcgtcgcgatcggccgcgccatcatgggcacgccgcgctatctgttgctcgacgaaccggcggccggcatgtccgaacacgagagccacgaactcgccgcgatcatccgccgcatcgcggtcgagctcaatgtcggcgtgctgctgatcgagcacaatatcggcctcgtgctcgaactctgcgaacgcatcttcgtgctcgactccggcgaggtcatcgaagtcggcccgcccgcccagatccgcgacagcgatgcggtgcggcatgcctatatgggcacgcagcgcgacgagctgcttccatcggtcgcagccgaagcggccgtcgcgtcatgaccgcgctcgtcgtcgacgacatcacggtaagctatgggcgcctcacggcgctccgcggcgtgacattgacggtcgaggaaggcgaaatcctgttcgtgaccggcccgaacggcgccggcaagtcgacgctgctgagcgccatcgcaggcgtcgtgccgccgcgctccggctccatcatgatcgatggcgcagggatcgccggcgccgcgcccgaggacatcgcccggcgcgggttctcgctggtgccggagggacgcaacgtcttcggcgcgttgacgatcgaggagaacctgaaggtcggcaccggtatgcgcgccgaccgcaggacaatcgccgacgacctcgatcagatctaccaggaattcccgatgctggccgagcgccgccacaccccggcgggcatgctctccggcggccagcagcagatgctggtgatcggccgcgcgctgatggccgcgccccgcatcatggccatcgacgagccgtcgctcggcctcgcgccgaagatcatcgaccaggtctacgagatcctgctgcggctgcgggcactgcgcaagctcaccctcctgatcgtcgagcagagttcgacgcgcgccatgatgacgggcgggcggatggtcctgatccgcggcggtcgcatcgtgctcgagggccccgccgccgacctggtccgggacgatcgcctgaagcaaagctatttcggcttcggagatcactgagatgcgcgagctgctccagatcatcttcgacgcgctgagcctcggcagcctctatgccctcggcgcgctcggcatcgccctgatcttcggcgtgatgcggctggtcaacttcgcccatggcgatttcatcgccttttgcgtgttcgccatgctgtggccgtcgatcgatgcggcggcggtggtgtttgccggccagctgccgttctatctcctgatcccgctgctgctgctgaccggcgccgcgctgtcgatcctgtctgaaatcgtcgtcttccgccgcttccgcaacgccaacccggcgacgatgatgatcgcgtcctttgcgctcggcttcgtcatccggcatctgctgctgatgctgttttccagccggccgaagtcgatcacgctgtggccgagcctcggcctgccggtcgaattcctcggcgcgcatattccgatgctgcaggtcgtgaccatcatcatcacgctgaccgtgctggtgatcctcgtcctgttcctcaagcgcacccgctacgggctggagatgcgcgcggcggccgataatttcaccatggcgcgcatgctcggggtccgcgccaacggcgtgatcctgctggccttcgccatcagcggcatgctggcggcggcgatcggcctgatcctggcgaccaattccggcaccgccgacatcggcatgggcgccaacgtgatgctgatcgcgttcatcgcgaccgtgatcggcggcctcggcagcattcccggcgccgttgccgccggtttcctgatcggtgcggccagcgtcgtgttccaggcgaccctgccgcacgatgcccgcgtgttccgcgacgcgttcgtctacggcgccgtcatcgtcgtccttctggtgcggccgcaagggctgttcgcaccgaaatccgccaagcagagggtctgatcgatgtcgcagcggccgtccgtcatccggcaaacgatcatcacgccgatcgtgctgatcgtggcgctgctcatcatcgccgccctctcctatcagttcggcagccgggcgttcaaccgcaccgtggtcgagatgttcatcaacatcatggtggtggtcggtctctacgtcttcgtcggcaattcgggcctgctgtcgttcggccatatcagcttcatgtgcctcggcgcctacacgaccgcctggctcacgattccgccggtcatgaaatcgatcacgctcaagggcctcccgacgtggctgcttcatgcgcagctgccgatgtgggtagcaacgccgatctccggggtattcgccgcattgtttgccctgatcgtcgggcgcgtcatcatgcgcctgtcgggcatcgccgcctcgatcgcgaccttcggcctgctcggcgtcatcaacaatgtctattcgaactgggattcggtgacgggtgggcaaggctcgatcgtcggcattccgcccaccatgaacgtctggaccggatggatcggcggcgccgcggcgatcgcgatcgcctatctctacgcgatctcgcgctcgggactggcgctgcgcgctacccgcgacgaggcagtcgccgccagcgcctcaggcatcgacatcgtccgcgagcggctgatcgccttcgtcgtcagcgccttcatcatcgggctcgccggcgcgctctacgcgcacttcctgagcatcgtcaatcccggcgcattctatctgcggaccaccttcatcacgctgtcgatgctggtggtcggcggcatgtacagcctcagcggcgcggtctcgggcgtggtcgcgatctcgctgctgatcgagctgttccgcgatctcgagaaaggcatcagcctcggcgggcacaccgtcggcttgccgaacggcgcccaggagatcgcgatcggcatcatcaccatcgtgatcctgatgtacctgccgaccgggttgacccgcaaccgggagttctcctggcgccgctggccgctgcagcggcgcgtggcccggccggtccagaccgcattgaaggaactgcactaacgctcgttttgcaaaattggaggagtggcatatgcgcttgacgacattactcggcatcctggccggagcatccacgctctggatcgcaccggcccgggcggccgacgagatcgtggtcggttttgcgaccgcggcatccggattcatgcaggcttatgacaagccggcgcaggacgcggcgctgatccggatcgacgagatcaacaaggccggcggcctgctcggcaagaagctcaagccggtgtttgccgacaccaagaccgaccaggccgaaggcgccaaggccggccttgcggtgctcgaccagggcgccgacctcgtgatcgtgtcctgcgactacgatttcggcgcgcccgcggcgctgcaggcgcaggctgccggcaaggtttcgttcttcctctgcgccgaatcgatcaaggccggaattcccggcgtcggcccgttctcgttctcggcctcggtgctggcgccggtgcagggcgcgacgatgtcggaatgggcgtataccaagaagaacgcgcgcagcttctatcggctgctcgacagctggaccgtctacaacaagggtatctgcgacggtttcgactggatgctgccgcgcctgaaggaggccaagctggtcggcagcgacaccttcaagaacgacgacgcctcgatcgcttcgcagatcacgcgcatcaagagcctgccgaaggaacccgacgccatcatgctgtgcacgatgatgccgggcgccgtctccgccatcaagcagatccgcgccgccggcatcaagtcgatgatcctcaacggctcgggcgtcgacggcagctactggatgaacgccgttccggatctgtcgaacttctacgttccggttcagggctcggtctacggcgacgatccgaacgccaaggtcaacgagttcaacaagaagtacaaggaggtcaccggcggtgacccgtccagccagtacgtctatccgggctatgtgctgatcgacgtctgggccaaggcggtcgagcgggccaagtcgaccgatgcagcggcggtcgtggccgaactcgagaagatgaacaacgagcccacgctgttcgggccgcgcaccttcaccaaggacatccaccaccagaaccagggccgttacctgatcgtcgacaccgaggccggcaagccgaaggtgatcgaccagtggacgatctcggagaagatcccgctggactatctggtgtccaagtaacccggcaacacgccgctctgggtgcgctggacgcacgcagggcggcctcgccgccggtcctttataaagcctgctggaaggaaatcaggagatggtcgtgatcaactgcgacatgggcgaggcctacggcctctacaaaatgggcgacgacaaggcattgatgccccatatcgacgtcgcgaacgtcgcgtgcggctttcatgcctccgacttcaatcacatgcgcaagaccgtgcagctcgccaagcagttcggcgtcaaggtcggcgcgcacccctcgctgccggatctgcagggctttggccgccgcgagatgaagatcagccgcgaggagctcggcaactgcctgctctatcagatcggcgcgctcaaggcgttcctcgacgccgagggcatgccgctcaatcacatcaagccgcatggcgcgctctacggcatggccgcgcgcaacgaggagatcgctgaggccgtggctgacgccgccgacgtctacaaggtgccgctgctcggcatgaagggaacgctgcaccagcaggtctacgagcggcgcggccacgctttcgtcgccgaatattatgccgacctcgactacaatggcgacggcagcctgatcatcacacgcgagcacgaggccaaggatccggtcgatgccgcaagccggtgcgcaagggccgtcaacgaaggcaagacgcgcacggtagcgggaaatgacatcatggtcggcgccgattcgatctgcattcattccgacacgccgaatgcggtcgccatcgcagaggccgttcgcgaagcagtccgcccctatctcaccgcgcgctgagccgtcgcggcaacgaagcaaagattctcaaagaggaaaccatggccacccagcagatcttctcgccactcccgggcatcttctaccgcaagcccgcacccgacaagccggtctacaagaacgacggcgacgtcgttgcggagagcgacacgatcgggctcatcgaggtgatgaaatcattcaatgaggtgaaggccggcgctgccggcaagatcgttcgcttcctggccgagaacgaggatgccgtgatggccggccagccgatcgccgaaatcgacgtttgagcgcacccggccatggcgatcaagaagctcctcatagccaatcgcggcgagatcgcggtgcgcatcatccgcgccgcgcgcgatctcggcattgtgaccgttcaggtccacagcaaggccgacaaggactcgctcgcggtccggctcgccgacgaagcggtcgatatcggtccgccgcaggcgtcgaaatcctatctcaaccaggcagcgatcctcgccgcggcacagagcagcggtgccgatgcgatccatcccggctacggcttccttgcggagaatgccgagttcgcagccgccgtcgaagcggccggattgatcttcgtcggcccgaccgcgcaatcgatccgcctgatgggagacaaggtcgcggcgcgcgaggccgccgcggcggccggcgtgccgacggtgcctggcagcgaagggcggctggagtcggcggaggcggcattcgcgctggtcgggaaaaccggcttccctgtcatgatcaaggccgcagccggcggcggcggacgcggcattcgcatcgcgcggtctgccgaggagtttcatcatctgatgccgcaggcgcaggccgaggcgctcgcggccttcggcgacggcgggctctatgtcgagaaactcgtcgaaggcgcgcggcacatcgaggtccaggtgctcggcgatggacgcgacgtgatccattgcttcgagcgcgaatgctcgctgcagcgtcgccgccagaaggtctgggaagaggccccctcaccctcgctcacccaggccgtacgtgagaaactctgcacctcggccgtggcgctcgccaaggcggtcaactaccgcggcgccgggacactcgaatatctctatgatgacaggaccggcgagttctatttcctggagatgaacacccgcattcaggtcgaacatcccgtcacggaaatggtcaccggcatcgacctcgtgcgcgagatgatccgaatcgccggcggcgagccgttgcgcatccgtcaggacgaagtgcgcgtcagcggccattcgatcgaggttcgcatcaacgccgaggatcccgccaggaatttcctgcccaatccgggtacggtgaacgcgctgtgcgtccccggtggtgacggcgtgcgcttcgacagcatgctctatcagggctacacggtgccgccgttctacgacagcctgctcggcaagctgatcgtgcacgacaaggatcggccgagcgccatcaggcggctcgaacgcgcgctggccgagctcaacgtcgagggcattttcacgacaaagcccctgcaccaggcgctggcgcgcgacgccgacgtcaaggccggacgcttccatacggcatggctcgaaccgtggctggagtcccatgccgccggccttgccaccgctcaaccgccatcgaccgtgaaggtcgcgccatgatggcaagagaatccgccccgtcagcaacaggaggccgctagtcatgcaaacccgattttccttcggcggcgacgagcacatcttcgccgaggtcggcgaagcgatgtcgctcgaggcctttttcaagagcctcttcatcaccaatgcggtgcgcgacgcgaagatcaagggcgtcaccgagatctgcccggcaaacgcgtcctatcaggtcaagttcgatcccgaccagatcaagcccgacgatctcctcaccgagctgaagcggctggattccgcatcggagaaatcggagccggtgatcaagacgcggatcatcgagattcccgtgctttacaatgatccctggacgcacgagaccctgatgcgcttccgcgagcgtcatcaggatccaaacgggaccgatctcgagtacgccgcccggatcaacggcctcgagagcgtcgacgccttcatcaaggcgcattccagcgcgccctggttcgtctcgatggtcggcttcgtcgccggactgcccttcctctaccagatggtcgagcgcaagcggcagcttcaggccccgaaatatctgcgcccgcgtaccgacacgccgaaactcaccgtcgggcatggcggctgcttcagctgcatctactcggtgcgcggcgccggcggctaccagatgttcggcatcacgccgatgccgatctacgatcccaaccagaacatcagctatttgcgcgacttcatgtgcctgttcagaccgggcgacatcgtgaagtggaagccgatcgaccgggcggcctatgacgccgcggtcgccgacgtcgacgccggccgctttgcgcccgtgatccgcgacgtctcgttctcgctgaccgagttcaaccgcgacgttgacgcctacaacgccaagctcgatggagttctccatggccgttaaggttttgaagccgggtctagcgaccaccgtccaggatctcgggcgtccgggctattatcacatcggcatcccgctctccggcggcatggaccgtcacgcgctcgcggccgccaatctcctggtcggtaatgaggcgggtgcagccgtgctcgaagccgtgttcatgggaccggagcttgaattcaccgaggataccatcgtcgcgatcaccggcgcggagctgccgccgaaactcgacggcgagccgcgcgagacctggaccagcttcaaggtgaggcgcggccagatcttatccttcgatttcctcaagcagggcgcacgcggctacatcgcagtcgccggcggtattgatgtgcccgtcgttctcggctcgcgctcgacctacgcgctcggcgcgcttggcggattcaagggccgcaagctcgaggccggcgacgaattgcccatcggccatgccgccgcgacaggcaaggacggacgcagcgtcgccagggagttgcgcgggcaaccggcgggaatgccgacggaactgcgcgcgatgcccggcctctactggcaccgcatcaccgaggcggccggcaacggcttcttctctgacacctggaaggtcgcaccggaggcggaccggatcggctaccgcttcaagggcgggaagccgctcgaattcgttccacgcgaaccgccgttcggcgccggttccgacccgtccaatatcaccgatgcctgctatccctacgggtcgatccaggttcccggcggcaccgagccgatcgtgctgcatcgtgatgcagtctccggcggcggctacttcatggtcgggaccgtcatcgccgcggacatggacctaatcggccagctgcagcccaacacgccggtgaagttcgtcaaggtcgatatgaaggaggcgcttgcggcgcgcaaaagccgctcggagttgctcggcaggctgcacagcgcattggcatagtcgccggtaacctgccctgtccgccaagaccgcggtcaccgatcggtgaccgcgtgatcacgtcctgcgcttcaggccgtcggttgcggcctctcaggtccggaatcggcgccgccgcgcgctctcggcttgtcggcacgagagttgcaaagaataccgctgggctgagaaacacgctcatgagttaggcaacatcggaacaaccgcgatgtccgtttctctgaaacagatccgctacttcgtcgccgccgccgagaccgggcgcatcagccaggcggcgatcgacctcaacgtctcgcaatccgcagtcaccgcggcgattcagcagctcgaggcgaccgtctgcgcgcgcctgctggaacgcgcgccgaacggcgtcaccgtaacgatggagggcagccgcttcctgtcccagggccgtcagatcctcgccgccgtcgccgaggcggtgcgcaacacgcagatatcggcgggaccactgttcggcacgatccgcatcggcgtcacctataccgtgtcgggctatttcctgccgcgtcaccagaagcggttccaggccagctttcccggcatcacgatcgagctgttcgaggcgccgcgcgacgtgctggaacgcgcgctcgtcgacggcgcgctcgatctcgctgtgatgctggtctcgaacctgcgcgacaatgccatgctgacgagcgagacgctgctgcgatcgccgcgccgcctgtggcttgcgccagagcatccgctgacccgcactgagcgggtccatctcgccgacatcgcagcctatccctacgtcatgctcaccgtcgacgaggccaagcacacctcgatgcgctactggagcaacgcctcgctcgaaccgaacacgatcttccgcacctcctcggtcgaagccgtgcgctccatggtcgcaggcggcatggggatcgccatcctctccgacctgatctaccggccctggtcgctggagggacagcggatcgagacccgcgtcatcgaggacgaggtgcccagcatggatatcggtctggcctggcggcgcgacaccaagccgtcggaagcagcgatggcgttccgcgatttcatgcgcttcgcggtcgccggcgtcgggccggggcggccccccgtcagcatggatcagcggcaccaggccgaggaggcgatcgaaatctagaacatctgtttccgttttattcgacttgacgccgtccggctgtcctcgccaaactttggccggggacacgacgaccggaggcacagccggcggcggggagtgagacatgcaagtcacctacacgaccaacgacatcccgttgcagagccgccgccagtactggcaggaggtcgtctcgaagacttactactcgctcgacctgcgcttcccgagcaggcgcgagttcgatgcgcgcctcggcgcctggtcgatgggtcccctctcggtctcgcgaaacatcgccaatggcctgctgtacaagcgccatgagcggcatctcctgagcgagcgggaggaatccttcctgatcacggtgcccgaactcgccgaaatccgcttcgagcaggacggcaaggtggtgcactgcaggcccggcgcattcctgatcgagcgcagccacctgccctacgaattcagccatcaggatccgacggcgctgtggtgcctgaaaatcccgagcgctgtgctgcgcgggcgcatcacacggcccgaacgcctcgccacgctgcaattcgacgccagccgcagcgtcggcgcgctgttcgtcgacacgttgcggctctccgccgagcggatcgaggaaatggacgagacggctcgcgcgatgatgggcaagcacctcatcgagctgcttgcgatggccatcgaatccgacgaccgcgtgctcaccggccactcctcctcggtgcgcaacggccatctgctgcgctgcgagcagttcatccgtagccacctcgacgacatgcggctgacgccgcagatgatcgctgatggctgcggcatttcgctgcgctatctgcaccagatcttcgaaggcgagggtctgaccgtctgcgcccatatccgcaaccagcggctggcaatgtgcgacgccctgctgcgcgatgcgagctgccgcaagagcatctcggaaatcgcctatcaatggggctttgccgaccaggcgcaattcagccgcaactaccggagccggttcggctgcacacccagcgaggcccgcgccacctcgcgcgccgccaacgcctgacgacggcatcgataacgccaccggtgtgatgttccctggtcggcccgccgccggtccgggcaggtatgcccccgtgcagggcatcgcatatggttacggccaggtcccatagcgggtgtaagccgcctgcatagtttcggaataatagaataacacgactgatttgcccgacatgtcaagccgggcgaatgccggcgcgccgccggctcctttgcatggggttgttttcgacgttttgcagtacgcccctgcggaggcgggcgatatgcgacagccccgccccatgcgggtacgctctctcgcacaaatcttcctgcgctcagcgtcaagaaggcaagccgccgctctgcctaagatcggcgaaacgcttgttcgaaaggaagacgcatggtgcaggaccttcgtgtggctgtcgacgtcgggggcacgtttaccgacatctgcatcatggacgagacgaccggtctcatccgcatcgagaagacctcctccacgcgcgatccgatcgaagggatcatgggcggcgtgtccaaggccgggatcgatctgtccagggtggcgctgttctcgcacggcacgacggttgccaccaacgcgctgattacgcgccgactgccccgcaccgccgtggtgacgaccaaggggttccgcgacgtcatcgagatccggcgcgccaacaaggaagatctctgggacacctacaaggacgtcgtgcggccctatgtgccacggcgggaccgcctgaccgtgcccgagcgcgtcgatgccgggggcaaggtgatcgaaccgctcgacgtcgaagccgcgcgcgcggtggcgcgcatcctcaagcgtcgtggcgttgccgcagtcgcggtctgcttcatgaacgcctatctcaacggggccaatgagcgcgccatgcgcgacatcctgctggcggagatgcccgacattccggtgtcgatctcctcgcaagtgcttcccgagatcttcgagcatgaacggttctcgaccacggttgccaacgccgtggtgagcccggtcgtcgtcaactacacgagccggctcggcgagcgcctcgcccgcgagggctacacccgcgatctcctgctgctgcacaccggcggtggcgtgatgacgccggcgagcgtcaaggattttgcggcccgcctcgccggctccggtatcgctgcgggcgccatcgccagccgctatatcgccggcctctgcggctttcccaattcgatcggcctcgacatgggcggtacgtccaccgacgtgtcgctcgcctatgaaggccactcgcgcgtcaccaaggactggcacatcgaattcggctatccgatccgcttcgcttcgatcgaggtgctcacgatcggcgccggcggcggctcgctggcctggaccgacccggccggctccctgcgcaacggcccgcaatcggccggcgcccacccgggaccggcctgctatggcaatggcaacacgcagccgaccaacaccgacgccaatgtgacgctgggccgcctcgggaccgatctcgccggcggcaaggtcaagctcgaccccgcattggccgagcaggcggtcgaagacggcgttgcaaaaccgttcggcctcggcctgcacgaggccgccgacgcgatcgtcaaggtcgccaatgccaacatgtcggatgctgtgcggctgatctcgatcagccgtggctacgatccgcgcgacttcgcgctggtggcgttcggcggcgccggcgccctgcacggggtcgacgtcgcgcgcgagctggcaattcccgtcgtgatcgtgccgccgaatcccggcgtgacctccgcgctcggatgcctgctcgtcgacatgcagcacgatttctcgcagagctgcatggtcgacgccgccgacgccgacgcgaccgagatcgaagcacagttcgccgagctcgagaaagccgcgctcgcgcgcctcatccatgagggcgtcgcgcagcaggacatcgtgctgcagcgctcgatcgacatgatgtatcgcggccagtggcgttcgctcgcggtgaacgcgccgcagccgatcggcgcgatcgccgacctggtgcagagcttccacgccgagcaccagcgcgaatacaatttccgccgcgacagcgcaccggtgagcttcttccgcctcaatctgaaggcggtcggtgtggttccgaaggccgaatttgccgttcacgcgccgaccggtgttagccccgcgccggttggccaccgcagggtgtggttcgaaggcagcgggctcgatacgcccgtctatcggcgcgccgacctgccctgcggtttctccttccaaggccccgcgatcatcgagcagctcgatgccacgaccgtcgtgccgcccggcgccagcgccgaggtcgacaaatatctcaacatcatcatccgcgtgaaggagtgaaccatggccacggccctcccgctcgatcccgtgaccttcgaggtcctgaagaattccttcatcaccagcgtcgaccagatgggcgagcaggtcctaaggacctgctactcgttcgtcatctacaaccgcgacttctccagcgcgctgcatgacgccaacggcgaatgcgcggcgcaaggcaaccaggatatcgctgtccacgtcggcacgctgcatttcacctgcaaggacgtgatgcgccatttcgaaggtgacatgcatgagggcgatgtctttgcgatcaacgatccctatgccggcggcacgcacttctccgacgtgcggctgatccgcccgatcttcgccgacggcaagatcatcgccttcagccagtccaacggacactggtcggacgtcggcggcagcgtgccgggatcgttcgacgtcgccgcccgcgagatgttccgcgagggcctgcgcatcacaccggtccgcctgttcgacaagaacggcctgcgcaaggacgttgcgcatctgatcgcctccaacacccgtgacccggcctcgatcatcggcgacatccaggcgcaggccgaagccactgcggtctgcgaacgcgagatcctgcgcctggtcggcaaatacggccgcgacacggtcgagaccggacttgccgccgtgcaggactatgtcgagcgctcggcccggcagcgcatcgcagcgcttcctgacggcgaatgggaaaccgtcgactatatcgaccgcgatccggccggcggcgaaggcatgatcccgatccgcatcaagatgacgatcaagggcgaccgcgcgatctacgacttcaccggcagccatccgaccatcggatcgatctacaactcggcgttcggcgccacgttctcggcggttgcggccggcatgaagaccttcttccccgacctgccgctcaattccggcttctaccgctgcttcgacatcatcgcccccgaaggctcgatcgtcgatgccaaatggccgatcgcggtgacgggcttcctgatgccgttcgagaagatcatgaactcgatctacgaaatgtggtcgaagttgatgcccgagcgcgcgctcgcctgcgccttcaacctcgaatatctgctgaccggcgggctcgacgcccgcagccccgacaagccgatcttcatgttctacgactggctgcccggcggctggggcggacgcaacggcaaggacggcagcaacgtcacgaccgcttgcttcggcaccggattgatgtcgcagccggtcgaaggccaggagcgcgccaacccgatcctgaccaccgaatgcgagattctcaccgactcgcccggtcccggcaaatggcgtggcggcgcgggcgtggtgaagacgtcgcggatgctgcaggccgagaagaccgtgatctcctacatctgcgaccgcgagcgcgccatcgtgtggggcatcgagggcggcttgccgtcgatgccgcacggcctgaccctgaagcgcgccggcagcaccgcagaggagcggctcggctcgatcttctcggacgtcccgatcggcgaaggcgacttgttttcgcgtccgaccgccggcggcggcggtttcggcgatcccttagagcgcgatccgaacctcgtgatcgaggacatcaaggacgactatatctcggtcgagcgcgccgccaaggactatggcgtcgtggttcacactatcgacgccgaactctgcaattatgaagtcgacaaggtcgcgaccgcggcgctgcgcacgaagatccgcgccgagcgcgtcgccaatgtccggctcgatccggagttggtcgcgcagcgctaccgcagcggtgagctcaacgcgttcgacgtgatccgcagccacgcggtgatcctcgactggggcaccggcgcgctgcttgccgagtccacccgccagttccgcgaagcgttcgagcggcgctcggtcgcgatgtggaaagccggctgatcgtcacggcagccgcgccgccggcgcggcccgtgcggcagaaaaggacgagaagccgtcgcccttcactttcattcaaaccatgaggattgcgctatgacgatctcgacgtgcctttcttccaaccggctgtggccaatccgctccgtgctcggcatcgccgccgccctcgcccttgccggcgccgccactccggcggcggcggggaccgagacgccgtggtttccgatgaaggtctacgatgcgtcatccggcacgccgaagcccgccgactacacaccgctgccgaaggccgagaagccctacaagctgtgcgtgctgtttccccacatgaaggacagcttctgggtcgccgtcgcctacggcatcgtgaagcaggccgaggcgatgaacgtcaacatgaacctctacgaggccggcggttacgagaacctgcccaagcagctgtcgcagttcgacgactgcatggcaagcggaccggatgcgatcatcgtcggcgccatctccggcgcgggcctcagcaagaagttcgaggaagccaaaaccaaaggcgtgccggtggtcggcgtcaccaatccgctgccgcccaacgcgctgcccgcggccaattatgtcgacttcgtcgcgatgggcgaggtcaccggcgacggtctgctggcgcaggccaagcccggcgataagctcaatatcgttacgttccccggtccggccggctcaggctgggcagagtcgttcaacgagggcttcaagaaggcgatcgccaagaacccgaacgccaagatcctggctgaaaagttcggcgactccggcgtcgccgcgcagcttcagctcatccaggacgcgctgcaggcctatcccgccatgaacgtgatctggggcaccgcccccaccgcggaagccgccatcggcgccgttgccgaggccggccgcagcgacctgaagatcgtgtcgtcctacgagaaccaggccatgctcgacgcgctgaaccgcggcgacatcctcgccttcgcaacgcaatatcccgtcggcgaaggcgcgatcgcgatcgaccaggccgtgcgtctcatcgagaagaagccggtcatgagcctggtccagccggtggccaccgtcatcgacaagaccaccgtgccgaaattgcagatggatctcgtgctggcgcccgcaagctggacgccggtctattcggtcaaggccaagtaggccgatcgatacgggcgggagccggctcccgcctgcctgctcacggccacggagacgcggatgaacgtcgagatcgatccagagccgcccgcacccctgcttcagttgcgcgggatatcgaagcgattcaccggcgtccgggcgctcgaccgcgtcgacctcgatgtccgtgccggcgagcttcacgtcctgttcggcgagaacggcgccggcaaatcgaccctgatcaatgtggtctcgggcacctttccacccgacgaaggcaccttccatttcggcggcgaggagatccaccgcctgacgccgcagcgggcgcgcgagatcggtatcagtccggtgtttcaggagttctcgctgatcccgagcctcaccgtggaagagaacctgtttctcggccgcgagatcacgcgcggcggcgtgctgcattcgcgcgagatgcgcaagcgcgctaaggcgctgatcgacgagctcggtttcgatctcgatcccgcgcggcggatcgatgacctgtcccgcgcgcatcagcagatggccgagatcgccaaggccctgctcggccgtgtccgccttttgatcctcgacgagccgaccgcgtcattgaccgagcgcgagaccggacggctgtttgagctgatcgcgcgcctgaagagccagaatgtcgggctgatctacgtctcgcatcgcatgcgcgaaatccgcgcgctggccgaccgcgtgacggtgctgcgcgacggccgtcacatccggaccctcgacgccgcgacctcaaccgatggcgagctggtggaactgatgaccggccggaccatcgacctgctcttccccgccatcgcccaccagccggaccgagtgatggtcgacgtcgaaaacctgacgctcgccgatggcagcgtgagagacgtcaatttccatgcccggtcaggcgagatcaccggcatcgcgggcctggtcggctgcggcaagtcggagctgatccgcgcgatctacggcatcgagcgcacgtcgaccggaacgattcggatcggcggtgcgccttacgaatctccaaccgcgagacacagcctgaagcgcggcgtcgcctacttccctgccaaccggatcgccgaagggctcgcgctgtcgcgtccgatccgcgagaacgcgtcgatgaccgggctcgacctgccggccttcgcccgcttcggcataatacggcaggccgccgagcgcgtgaccatcgcgggcatcatgcagcagctgcagctcaggccgccgaacatcgaacgcagcgccggcgccctgtcgggcggcaaccgccagaaggtgatgctggggcgcgcgttgacgcgcgagttgaccgtgttcctgttcgacgagccgagcgtcggcatcgacgtcggtgccaagctcgaggtctacgagttcatgaaacgcctcgtcgaggccggcgccgccgtgatcgtggtgtcttccgaattgcccgaggtgctggcgctgtcgaaccggctttacgtcatgcatcagggccgcatcgccgccgagctgaccggtactgaaaaaaccgagcagaatgtgctttcgagcttcttccgcgaacatctcaccgcggaggtcgcatgaactcggccctggtcggcacagcgccgcgggacgcgatcagcctccaatcgatcgcaggccgaatcgggctgctgccggctctgctagtgctgctggtcgccggcatgtcggccgtcgatgcgcagttctacggcatcaccaacgtcctcaacatcctgcgcaacgcttcgctgctggcaatcgtcgcctgcggccaggcccttgttatcatcgcgggcggcttcgatctttcggtcggcgcggtcgtcgctttggcaagcgtcgtcaccgcaaagaccatggcggtcaccgcggccgcctttcccggcgccaacgtcctcatcatcgccagcgggatcgtggccgggctcggttgcggcgtcgtggtcgggctcatcaatggcttctgcgtggcaaagctgaaggtctccggcttcgtggtgacgctgggcacgatgtccgcgaccgccggcgtcggcctcatgatcacaaacggcatcccggtctacggcatgcccgagatcttcgtgaaaagcttcggtcgcggccaggcgttcggcctgccgaccgccgcccatgtcgcgctgatcgtgatcctggtgatggtgtttgcacagcgacgcacgctgttcggccgttacgtctacgcgatcggcggcaatgtcgatgctgccgtggtgtcgggcgtaacgatccagcgtcatatcgtcggcacctacgtcgtctcgagcgtccttgcggcattgaccggcattctgctgacggcgcaggtcggttccggacaagccagcttcggcggcgaccgaatgatgctgcaatcgatcgccgccgctgtgatcggcggcgtcagcctgcgcggcggcgtcggacgcatcgagatcgtcgccgtcagcgcactgttcctgaccatcctcggcaacgcgctcaacctcctgcacgtcgactcgcggcttcagccggtgttcctcggcgtcatcatggttgccgccgtagcgctcgatgaactcagccgacggagcacgccgcgtgtctgacctcgaattgaccgttgccgccaaggacaccgaccgcccacagctgacgctgggccgccggctctggagcgcggtgcttccggtcgcgttggccgtgctgttgctcggcttcgccgccgtcgaccatggcgtgctgtacccagccaacctgctcaacatcgcacaacagaccagctacctggcgctgttcgcgatggcgcagacggtggtcatcctgacgcgcggcttcgatctcgcccttggcccgacggtgtcgatggtcagcgtcggcactgcgctcgcgatggcaggcgtcaccgcgtcgggccatggcacgaccgccgcgctgctcacggggctcgcggccggcttcgcgctcggcatcgcatgcggcctgttcaacggcgtggtcgtcgcgctgctcggggtcaatccgttcgtcgcgacgctgggcagttacaacatcgcgatcgggatcgcgaccacgctttcgtccggacggccggttcagggcgtgccggcgccgttctcgcagatcttctacagcggcagcatcttcggcgtgccggcggcgatcgcgatcaccttcgccgtcggcgtcgggctgcacttgctgctggcgcgcacggtgttcggccgctcgctctatctgatcggcaccaatccgcgcgctgcagcggtcgccggcctgccggtgaaacgcattctggtcgcgacctatgtgctgtgctccgcgcttgccgcgctcggcgcgatcatgatgacggcgcggaccggatcgggcgagccgaatctcggcggcgcgctgtcgctgcaggcgatcgccggcgccgtggtcggcggaaccagcctcgccggcgggcgcggcggcgtcggcaccgcggtgctcggcgccctgttcatcaccattctgtccaacggcatgaacctcacccggatcgatggatacgtccagatggtcgtgctcggcgcgatcgtcatcatcggcgtcctgctggatcgcctgcggcaggagcggcgcccatgatgtcaggcactctcatccagaacgggatcggggcgcgcgatgcgtcgacgtcgatctatgtcgcaccctcgctcgccgccgcacgcgatgcgctgagcgactatggcgccgcgggctctcccctggccggcggcacatggatcatgcgatctccgatccggcacgcgccgctcaggccccattatgtcgcgatcggaaggatcgccgagctgaccgcaatacggatcgacagcgacgcagtcgagatcggtgcggccgtcacgcacgcggcgcttgcggcagccttggccggcatgccggactttgccggcctcgccgcggccgccggccgctctgccaacccggcgatccgcacgatggcgacgatcggcggcaatctcgcggcatcggacttcgccgcggcggattgcgtgccggcgctgctctgtctcgatgccgatgtcgagatctcgggccgcgacggttgcgagcacctgagcctgacggatttcctcaagatccgctcgacgctcgtgcccggtcgcctggtgacacggatcatcctgccccgaagcgagcgtaagacggcccatgtccggctgccgctgcgcaggtcgggcgactatccggtcgccatcgtcagcctttcggtcagcctcgatgcggcgagccgtgtccgggccgcgcggatcgcggtcggctcggtcgaagcagccgcgcgacgatggccgcggctagaagcggcgctgctcggacgtccgctcgacgctttagaagcggcgcggaccgcggccgaactgactgacgaattcgccggccgcgacggcgtcgatgcgcccgcttggtatcgcgtcagcgtgctgcccggcctcgtccgccgcgctgcgatcgcggcgctcggctcctgaacttgcggggatcgacatgggattcaatttgaccgtgaacggcgatcgcctcatctccgctgcagcccctgcgacgccactggtcgatgtcctccgcgaggagatgcatctgaccggtgcgaagccggtctgtcgcgagggcttttgcggcgcctgcatggtgctggtcgatggcgagcccacgccttcgtgcctgctgcccgttgcgctggccgatggccgcgagacccgaacagtcgaaggccttacgccgcagggccagctgaaccgcatccaggccgcgctcgaggcgagcgacgccgtgcaatgcggcatgtgcttccccggcatggtggtgaccttgacgcacctcctgacgacccggccggatgcaacccgtgacgatatacgggcggcgctgaccgggaacatctgccgttgcaccggctatgaacgcatcgtcgaggcgacattgctcgccctggccacggcttgatcgggaggcgcagggatgtccgacgtttccgcaacgatggatctgcgccggcgtgatgcggccgacaagctgcgcggccgcacgcgctacaccatcgatcggtatctgccgggcatgctgcatgcggcggtgctgcgcgcctccgtgcctgcggggcggatcattcgtctcgatacctccagagcagcccgcatgccgggggtgcgcgccatcgtgacggcggccgatgcacccggcatgatcgggatcggcatcgcggatcatccgcttttcgcccgcgacgtcatccgctacgacggcgaaccgctcgccgcggtcgcagccgtcacgctggcgcaggcgcaggccgcgctcgcggcaatcgaggtggagatcgagccggtcccagccgtcctgaccatggcggatgcacttgcatcgggcgcgccgctgattcatccggactggcgcagctatgaggtcttgctcgaaggcagcgcacgcggcggcaacgtcgcctggcaagcgaccgtggttcgcggcgacgtcgatgccgcgtttgcccggcctgacgtcgagatcgtcgaaagctgctttcgggtcggccggcagaaccatgtcgccttcgagccgcgtgcggtggtcgcaagctatgaagacgggcgcttccatatcgagacctcgacacaggttccctggagtgtccgcaacgcgaccgcgcgcctgcttggcgtgccggcgtcgcatgtccgcgtcaccgtgccgccggtcggcggcggcttcggtctcaaattcgacctggcggttgaaccgttcgccgccctgctcgcccgcgccagcggccggccggtgcgtctcgtcaattcgcgcgaagaggagatgctcacctgcctgttccgcgagaacgccgatatccgcatccgctcggcggtgacgcgcgagggcgacatcgtgggtcgcgaggcggtcgtcctgatggattgcggcgcctatggcggcgagcagatcttcctgaccaccatgacttcgcacacgcttggcggcaattacaagctcggcagcgtgcgcatggtctcgcgcgcggtctacaccaacacggcgccgaacggcgcgttccgatgctgcaacggcgtctacaacacatttgcactcgagcggcacaccgacgagatcgcagcgcggatcggaatggatccgctcgccttccgccgccgcaacgtgctcggcgaccgcgatctcggcgccaccggccaaaggttcgagggcaatgtgctcggcccgatgctcgagcggatggatacgctgcgcgatgcggcagcgccgccgccggcgcgcagtgacggccggctctatggacgcgcgaccaccgtcggcacctggttcgtgttcgtcggcccgtcggccgcgacggtgaacatgaacgccgacggcacggcgacgctggtcacgtctggcgttgaaatcggctccggctcgatgatgcagagcctgccgcagatcgtcgccagcacgctcggcatcacgcccgagcatgtgatcgtccgcgcggccgataccgatgcggctggctatgacgtcggcgtcggcggcggccgcaccaccgtctcgctcggcgcggcgagcctgtcggcagcgcaggaggtgcgcaccaagctgctgaaggtcgcttccgagatgatcgaggctgcgcccgatgatctcgtcatgcgcgatgggcggatcgagatcgccggcgcgccgggctccggtcgcaccgtcacggaggtcgcgacccgcgcccaagcgctgggtggcccggtctccggcaccggcgccttcaccggcgccggcgtgccggcgatgcccggctgcgtggccggacatttcatcgacgcgatcgacatccccgtcttcgcagtccacgactgcgaggtcgccgtcgatccggaaaccggacatgtcgaggtgctcagctatcgcgtcgtccaggacgtcggccgcgcgctgaacccgcgcgcgatccacggccagatccagggcggagtcgtgcaggggctgggttatgcgttgcacgaagaagtcacgatcggcgacaacggccgggtctgccagaacggtttcgaaacctatcgcgttccgctggcgctcgatgtcgtgccggtcgaaatcagcctctacgagggcgcgccgtcaatcggaccgctcgggaccaaaggggccggcgaggtgccgatcctcaatgtcggagcggccgttgcgtgcgcggtcgcaaacgccaccggaaaacgcatccaggagctgccattgacgccgccgcgcgtcctcgagcttctgctcgagcggaagcgcgatctgtctcttccccacattgccgagacatggtcggacaatttgatccgtcctcacgggaagtccgaaggcagcaaataggaatgggccacagcaaaccgcttgaacctaagcaaaaaatgatcgccaaccggcccttgcgccaagctgatagcctggtgcaagaccccgattgccttcttcgacggatttgcagctcgacagcagcaagctgtcgttcagctcagcctttgagcgcggtcaccacgacctctatcagcgcaccgccaccgagatcggccacgccgacggtggcgcgtgccggcaggttgtcgccaaagaattcggtccagacctgatccatctccttcttcttggcaaggtcggtgacgaagatcgaggcactgacgacgcgcgtcgtgtcggttcctgcctctttcaaatagcctgcgatcttgccgaggatgctgcgggtctgctcgcccatcgagacgctggtgtcgtcggcgatggtccctcccagaaaaacgaagccgttcgcttcgaccgcgcgatgcatgatgggcgtacggatgttacgggtgatgctcatgatgtcctctcgttagagcgttgaaggatggaagcgatcgatgccgagatcgccgatccgggtctgggtgccaccgttggtgatcagctccgccatcacggcgccggcgccggggccgagctggaagccgtgcagcgagaagccgaactggtgataaagccccttgtgcagggcgctcggcccgaacaccgggaggtcgtccttcgtcctcgcctcgatgccggcccaggcccgcacgatcgacgcatcgcgcatcaccggaaacagctcgaacaccgtgcgcgcgctgatcgcgaggcccttccagtccagcaccgtctcgttgcgatcctggtcgggtgtcgccagatgtccaccgccgatcaacacggtaccgtttgaaaactgtttgaacgacagcttgcggccgcgcaggatcacgacgggatcgatgaaatgcggcacgcgcgaggtgatcatcagcatcggcgcgacggtctcgaccggcaccggctcgccaagatcagcggcgatccgccctgcccaggcgccggccgcattgaccagcacaggagcggcgtagctgtcggcaccggcatcgacatgccagaggccgtcgctctgccggatgttggtggcggctacgccttcgcgcacgatggcaccgagccgctcggccttgcggcgaaatgccgtggtcgtctgcgccgggttggccgcgccgtcgcggcgcgagaccacaccgccgggacagctgtcggcgacagccggcaccagccgccgcagctcggccacgccaatcagttcctcgtgggtgaagccgagcgcattgagctccgcaacgcgcgcgcggcaagtcgccagttcgtcgtcattctccgcaacgaggacctgaccgtggctctcgaaactgcaatcatcatcgacaagctcgctgatcctctcccagattcccatcgaacggatggaaagtggaatctcgggaatgtgccgcgcgagctggcgcacgccgccggcattgacgcccgaggcatgccggccggcatagtctttttcgatcagcaccggctttatgccggcgaggcacagatgcagcgcggtcgagcatccgtggatgccgccgccgacgacgatcgcgtccgcgcctatggtcatccgcgcaccaccgccttgacgtcggcctccgtcttcgcgacggaggcgagttcggcgagcgtgatcggcttgaccggcgcgcgcagccgataatagccgatctcctgcgggctcttgccacgcgcctgcgccatcaactcggtgacggtgaggccgcaaagccggccctgacacggccccatgccggtgcggcgataggccttgagctgattgggaccagtcgcgccgatcgctaccgcgtcgagaatgtccttcgcgctcacctcctcgcaacggcacacgatggtgtcgcccgcgggaagccggaactgcggcgccgggcgaaacagcgtgtcgaggaaggcccggccgcgttcggccttggcgagatcggcacgcaacgccgccatcggcggcaatccggcggcagcggccggcgccaacgactccacggcagcgcgcgccgcaatccggccgcgaacctcggccgctcccgcaccgccgatgccggcgccgtcacccgcgatcgcgatgccggggaccgacgacgcgccattggcatcgagcaccggcgcccagcacaattgcagctcgtcccagcgatgctcggcgccagccgccatcgcgagattgacgttgggcacgacgccctggtgcaagagcagcagatccgtggcaagggactcgcgcttgccgcccgcgacatagctcacgctcgcgagccggccatcgccggctgcagcgagttcagtgacgccggataccacccggaccttcgcccgcacctcgcgcatcatcgcgagacccttggcgaaatagggcgaggtcaggaacccgaaggcgtgcggcagggcagcaagataattgccgcgcgcagtggtgtcgagaatgcagtcgatgcggcccccgagacgcaggatctgtgctgccagcagccacagcagcggcccctgccccgcgatcacagttgggccgtccggcaccaacgccgacgatttcagcatggtctgcgccgcgccggcggtcatcacaccgggcagcgtccagccgggaattggaaacggccgctccagcgcgccggtcgcgaggatcacgcgagaagccttgacgaaggccgaggcgccgccgaccgagatgccgatctcgaggttgcgatcgaggctccagaccgtcgcgcgctggatgacctcggcgctgctcgcgcgcagtgcctgcacgagatcggcgcccgcccagtaatcggcgccgagctgaccgcgctccgtcacgggcgtcgaggcgatggcgcgatacacttggccgccggggccgatattctcgtcgagcagcagcgtcgacaggccggctccggcagacgtcacagccgcggcaagcccggcaggtccggctccgatcactacaacatcgtaggcttcgcgcttggggcccttggtcattttccgatctcccgcttgcccttctgaatctcgatctgcatgtccgctgcaaccggcacgaggcagccctgacggttgccgacgccgtcgatggtgacgaggcaatcgaagcacacgcccatcatgcagtagggcagacgtggcgtgccgttgaccgcggtcgagcggcgcacgtcgcgtccggaggccaacaaggccgcggagacggtgtcgccctggcgcgctgcgacggcaacgccgtccacgaaaatctgcaccaacggtcgctggtcctggtcggaacgtttgaacatgggatgctctttctcgaggtctctagtagccgctgtggtttgccgcgccgttgccgccgaagcggcgggccgagaaggcgccgaccagttcgggctcaagcgcgccctgggcaaccatgcgcgccacgtcgaaggcgtgattggaggcgagcgtgacgccggaatggcagcaggccacgaaggcgccgggatggctctccgactgatcgtagatcggaaagccgtcctgcggcatgacgcggatgccggcccagctcctgaccacgttgagccgcgccagatgcggaaacatgcgctgcgcgcgatcggccatcaccgcgctgatcgaatgcttgagcgtgcgatcgtcgagttcctcctccctgctgtccccgatcatcacggtgccctcgtcggtctggcggatcgtggtcagcgggtgcggcaggaacggcatggtgcgctcggtcacgacgatctgaccgcgggtcgggcccatcggcgcatggagaccgaccatcggcgcgagcgtctggttggcattgcccgcggccagcacgaccttggcggcacgcagctcgccttgcggcgtcgtcagccggaattcgccgccacgtttggagatcgccgagaccggccgctccggaaaataatcgacgccgaaggccttgaagccggtgtggaacgcacgaaacgtgcgcagcgaattgacgtggccgtcgtgtggacaatagctgccgcccgacacgtccggcccgatcagcggcagcgccttcttcacctcggacgccggcatcatctgcatcctgtagtcggcggcgcccacctggttgtgcatccgcttgacgagatcggcgcgctgcccgaactcgtcctcgccgagcgtcaggtgaaagccgccgttctgctgcaggcaaacgtcgaggccggtctgctgcctcagctccgaggcgagcctgccccacgcctccgacgcccgaaccgtccagaccgtataggccggcatgcccaagcccttgctctgcacccagaccagcgcgaagttggcgcgcgatgcgcgtttggcaatatcgccctcgtcgagcaccgcgaccgacttgccgagccggcccagtccccaggcgatggcggagccgagcagtccgccgccgacgatggcgacgtcataatctccggacatgagttctcctatcgtcccgtatcgctcttgccggcgagcacgcggtcgagcccgtagaagcggtcgagcagaatgagggcggtcatggtgattgcgatcacgcaggccgacaccgacgtcaccagcggatcgatgttgtcctggatgtagaggaacatgcgcaccggcaaggtctcggtgcccggcgcggcaagaaagacggtcatggtcaggtcgtcgaatgactggatgaaggcgagcgcccagccgctgatcacgccgggcaggatcagcggcagcgtgacgcggcggaacagcgtccaaccgccggcgccaagcgagaccgccgccatttcaaccgagagatccatgccggtggcggccgccagcgtcagccgcagcgcgaacggaaacacgatgacgacatgcgcgatgatcagcgccgcgaagctgccgcccattccgaccgaagtgaagaagcggaggaaggcgatgccgagcacgacatgcgggatcatcagcggcgacaggaacagcgccgcgagcgcatcgcggccgcggaagcgatagcgcgcgatcgcgagcgccgccggcaccgcgaacagcagcgccacgaacgaggacagtgcgccgaggccgaggctgacccagaaggcgtggatgaattccggatagttcgcgatggcgcggaaccagcgcagcgagaggccgcccgtcggcagcgacaggaagccctccggcgtgaaggcgacgaggcagacgacgaggatcggtgccaccatcacgatcacgaagatggcgtggaagatcagcgccagcgggccgttctgtctcatcggaacacctcggcatagcggcgctcgatcagcgcgttgctgccgacgacgatcagcaccaacgcgaccagcagcagcgtggcgacggcagcccccagcggccagttcagcgtgttcagaaactcgtcataggcgagcgtcgccgcgaccttgagccggcgtccgccgatgatcgccggcgttgcgaaggcgcttgccgagagcgagaacacgatgatggcgcccgacaacacgccgggcatgatctgcggcatgatgatgcggcgaacgatggtgagggaaccggcaccgagcgacatcgcggcgttttcgatctgtggatcgagccgctgcagcgcggcccacaccgagagcaccatgaatggcatcatcacatgcgcaagcgcgacgaccctgccggtttcggtgaacatgaagggaatcggtgtgctgatcagcccgagcgacatcagcagcttgttgaccaccccgttgttgccgccgaacagcagcgcccagccgagcgtgcgcgccaccacggagatcaacagcgggccgagaatgacgagcagaaagaagctcttccagcgcccactcatgcggttgaggatgtaggcctctggcgcgccgagcacggctgtgagcaaggtggtcaggatcgcgatgcgaaaggtccgccagaacatctcggcatagtacggatcgctcacgatctcgtgccagttcttcaggatgaagaccggctcgacgcccttgtactggccccagtcgtggaacgacagcagcacggtcatcgccagcggaatcaagagcacgccgacgaacagcatcagggccggcgccgtcagcgcccagggtgcgcgtgcgctgggttgctccgtagccgtcctcatgcagcagctccggcgcgcgcactcatgtcctccggccgccaggcaagacggaccgcgtcgccttcggcaggctgggtctggccgtcattctggcggatcacgatcgccgggccgcattcgctctcgcactggaacagccagtgattgccctggaaaatgcgcgtgacgatttttgcgcagaggcccgtgtcgccgaatccgatccgttcgggacgaatgctgatcgtcacgggaccgctgagcccggcaggcgccggcgcgctccacgagcccgcgagcagtcgcgcgggcgtgctggtccggtcgatcgtcgcggcaaagtcgttggtcttgccgaggaattgcgagacgaacgccgaggccggccgctcataggtctcctgcggcgtgccgatctgttcgatgcggccctggctcatcacgacgatacggtcagacagcgacatggcctcgttctggtcgtgggtgaccaggatcgtcgtggtgccgagcgtgcgctggatctggcgcagctcgatctgcatctcctcgcgcagcttggcgtcgaggttcgacagcggctcgtcgagcagcagcacgctcggccggatcaccagtgcacgcgccagcgccacgcgctgctgctggccgccggacatgcggcgcggatggcgctcttcataacccgcgaggccgaccatcgcgagcgcggcacggacccgttcggcccgctcggtccgcgccacgttccgcatctccagaccgaatccgacgttctccgccgcggtcatatgcggaaacagcgcatagctctggaacacgatgccgagccctcgcctcgccgggtgcacggcgttcaggtcgttgccctcgagccggatcgcgccgcgcgtcgggtcgaggaagcctgcgatcatctgcagggtcgtggtcttgccgcagccggaggggccaaggaaggagatgaactcccccttcgcgacggcgagactgaagtcgtcgacgacagtctgcgcgccgaactgcttggcgacacgatcgagctcgagataggccataacactgactccggtgcggcgatcagatcagcgctcgacctcgcgattccagcgcttggtccactcctcgcgcttgtcgttgatcacggtccagtccggattgtaaagcttcgccgcacgctcgccgatcggggccatcttgccgagttccggcgatatcacgagcgatttcagcaccggcccatagccgtagtccttcagcatcacgagctggatcttcggatcgagcagcaccttgacgaagctcgaggcgagcggcgaggcgttgggcttggcgatcggacaggcggtggtcagcagcgtcgccgcgccttccttcggatagacgaagtcgacggggaagccggtattggcgaagctctgcacgcgtcccgagccccatacggcgatgacggcctggccggactggaacaactcagtcatcttgcccggcgacggctcgtaggcgagcacgttcggattgatgtcgttcttgaagatcttgaaaccggcatcgacattggcctcgctgccgccgttcatcttcgcaagcatcagcaacgcctccaggccgtaggtgttgttgatcggcggaacgacgagctgcttctggtatttcggatccttcagatcattccaggaggtcggcggcgcccagcccttctccgcaaaggccttggtgttgtacatcaggccggtcgcgacgatgccgatcgccacggcgcgatcatccttgaagcgggcggtgtcgtagagatcggcgggaaggccgtcgagcttgccacagaagccgagctggatcgcctgatacatcgggccgtcgtcgacgatgacaacgtcgatctgctggttgcccttctgggcctggagctttgccagcgtgtcggtcgagttgccggcgacgtattcgaccttgacgccattctccttctcaaagcccgggatcacctgttcgcggatggtcttctcgaacgagccgccatagccggcgacgtagagcgttttctgctgggcgatggcgaccgacgggatcgcggtgagtgccgcgatgccaaccgctgtcagaaggctgagattcttcatgtgaccgatctccagttccgggatggggtgacgtgccggcgggccgcaccggccagagccatccgcattcgatcggcgccaattccgtccgaccagggctccggcccctgctccacgggtatcgtcattagcgagagggctttgaatccctcccatctgccgaaaaaacgggctgtctccagcgctgatgaaaaagatcgcaatcaacccttccatcgtccaatgaataatggcaccatctgtatgcttgaatgttatgaaagggatgcgagatgccgcggatcaacccgcgacaggtcgaggccttcagggcgacgatgctgtccggcggcgtcactgaagcggcgaagctgatggcggtgacgcagcccgcggtgagccggttgctgcgcgacttccaggcgctgttgaagatggagttgttcgagcggcgcggcaccgggctggtgccgaccgccgccgccatcgcgctctataccgaggtcgaacgctccttcgtcggcctggaacgcatcaccgcagcagccgaggagatccgcagccgtcgcaccggcacactgcggatcgccgcattgccggcgctctcgaatggttacctgccgcggctcgccggacatttcctcaagcagcgacccaacctcaaccttgccttcttcggcgtgatctcaccgatcgtcatcgattgggtgttgaacaatcagtgcgacatcggcttcgccgagcttccgatcgcccattcagccttgccaagcatgcgtctcccggccttgccacgcgtcgcggttctccctaccggtcatcacctcgcggcaaaggaggttctgcagtctcgcgatttcgagggagaaacgttcatctcactctcggccggatcggccggccggcatctgatcgaccagatctttcaacgcgacgagatccgtcgcgtgctgcgggtcgagaccgccttgtcggaaatcatgtgcggcatggtgtcgtccgggctcggcgtcgcgctttgtgatcctttcaccgcgcaggagttcgcgacacgcggcgttgtcgtgcgccgcttcctgccacggatcgacttccagtttgcagcggtttttcctgcccagcggagcccctcgccggtggctttggacctggtcgagactgtgcgacgatcgctcaacgaattggatagcctgctccactaggaggattttttattgcactcggcacttccggagtaacggcgcggtttggcgtgcaagaccgtggtctttggtagcgggtggacgcccccgcgtgcttccccctgttcgcgaggccgatcggcacggctcggctcttccagccagcgcagatcgaacacggcggcaaagcatctccaatttccgcgaaaatagtctggtcgccgcgcggcaagaagcggtatggaccatcgctgatctcccttcatccattcaagaaagcgcgatgtaagagggccaagctcggccgagggagtgatccaagccgcctcccgcacgcaaacgagatcgcgttatgcgccggcgtctctgctcacggcaaattgttttcggtggatccatagaagaaaagactacccagcggcacggaacccagcatcgggtcgtttgacacgatggagggctcgcctggccgcagacccgtcagacggttcacggcaccggcaaactcatgtgcgtagagctgctggctacccgtaacgacgtcaagttcttcgtcggtaagcaagcagaggtcatttctggtgtgtgtatccaggttcgtctcctgtttgccaagtgagggagcgcccctccaagggtggtcggcagaatgagctcctcggttcgttcttgccgtgatccgcatcactaagcagacagcaacatctcgtctccggactagccgcctgcctcttctcttccagtccggcgtatccgaacgcgaaaccgcgggtccgccaacggaaacggactcgcgctctttcttgacaggacaaaaccgctgcagaagtttgagaccgacgatggatttggcagccgcttctaccgggccgagaccgcggcccagcggatgtcagcctccgccctcaacaagtgaggacggctttcttgatgtgctccccagtggcgcacgccgatcccacgcgaccgcctgatactctcgatagttcttcttcactgaggtccgcgttgagaatatcgcgagagctttcggcgggcttgtgctgctttccaaaatcggttcgtctgctgtccatggtgtgacccttctccttcaagttgcagtaggcagtcgtaggagctcagcgctcgctcggacgtgtcccaaataacattgtcgcagccggtttccgttcccgcgcacgccacacccgtttcgctcggcgccggctgggcctgcacgctgttgggccattacgaagatgccctgcccaggctgcaaagatcgcccgcgagaacgcgagcccggcctttctcgcggctgcagaccacgtggtgcagctcatggtcgccgccgggctgcctgagggctgagcgcacctccccccgtttcaaaccacctgcccacgtcggctgcaacggggaatgattttttctcgatggcttcgtcgataaaattactgatttgcaggtacgctcaatgcgcactgttattttcaaagttgctatgaccgctgacattcgttctcgggcatggaaaagccgtgttattcttcgccgcgtactgcgcgcgaaggaggttctatgcggcgagcatcttcttggcttcagattttcggtcgcatcggtcagcggttccaagcgtggcgccggaaccatgcgagaccgaatgcaaccgagaggcgcgacgacctctacgagatcttcctgttcggtccgcacggctaactgcattctccccgtatcgaccccgctgggtgcagcgggtggctctgtcgagacttgcgcgtcagcactccacgcatcctgacgccccgtatcggcatgcgttcagatagcgtgaactgctggcattgcgcgtccggcgtgaccggctgatcgatggagcgacggcatgacgcgtaccgatggccgacatgtcatcattatcggcggcggcgccagcggcgtcctgctggcctaccagttgctgcaccaaccgatccgccgtctttgcgtcacgctgatcgagcagcgcccggacatcggccgcggcatcgcctatcacaccggaaattccgatcatttgctcaatgtgcgcgtcgcgaacatgagcgcgctgccggaccaaccggatcatttctggcgctggctcacctcgcgcgagcttgatgtatcgctgtgcccggatccctattgcttcgtgccccggcgcatctacggcgactacatagcgagcttgctcgaacagcagacatccgatccggcggatgtcgaacgcttgtcgatcgtgcgcggcatctgtgtcgatatcagcgaaggccatgccggcgtgactgtcacactcgcggatggccagtcattgatgggcgataccgtcgtcctcgcgaccgggcacgacatgcgcgccagccgtgcgggctatgccgatccgtgggcgccgccatcggccgcgccgatcgatgccgatgccaccgtcctgctgcttggcacggggttgaccatggtcgactatgtcctgtcgctgctgcgcgacgggcatcgcgggccgatcatcgcgatgtcgcggcgcggcctgctcgcaaaaccacaccggcgcgtcgacgcgcagcgcatagaggaagccgagatcccattcggcgcaagtatcagcagcctgctgcgctggcttcgcctccgcatcgaccgcagcgtagccgagggcggcgactggcgcagcgtgatcgacggcctgcgaccgtacacccagcggctctggcacgagcttccgccaccgtccaagcgccgcttcgtcgagcacgcacgcgcctggtgggatgtgcatcgccatcggatggcgccggaggtcgaagcccgcgtgattcaggcgatccatgccggacagctcgacctgatggccgccaaggtcatcagcgtcgcgccgaacgacgacggagcccgggtccactaccgccggcgcggcgatacgcggatcgtcagcacgcaggtcggcgccgtcgtcgattgcaccggtatcgtcaaggatcctcgcgcgacgcccaatccggcagtacgcgccctgttcgaccgcggcctggcgcgcgtcgacccgctctgcatcgggatcgagaccgaccgcaactgcgcgatcatcggctgcgacggcgcgccttcgcgcaccctgttcgcggtgggtccgctgacgcgcgccgcgttctgggagatcattgcgattcccgacattcgaaaccaatgtgccgcactcgccgcccggctcgccgaggcaaccggcgagcatcggactcagctggagcaggtctagctgctgaagccggccggtatgaacgccggcagcttctcctcgatgaactgcttgacctcaggcgagttgaagacctggatgaaggccctcaggcgcgggtcgtcctttttgtccggccgtgccgtgaagcgcaacaccaatccatcgtccacggtccgatcgatgatcagcgccgacttcggatcaccgcccgccgggatcagataggtgacgttgacgagcgcgaggctgacgtcgtcgagcgagcgataggtctgcgccggatcgagctcgacgatcttcagattcttcggattgtcgacgatatcgaaccggctcaccgcaaagcccttgccgggcgccagcttgatcagccccgcacgctcgagcaggatcaggccgcgcgcgccgttcagcggctcattcgggatcgcgacgctgtcgccggatttgatctcgtcgagcgacttgatcttcttcgagaacagcccgaccggcgcgatcacgccgaccttgtcgacctgcaccaggttgaatccgcgttgcttgttctgcagcgcaagataggtcgcatgctggaacagattggcgtcgacatcgccgctgttgacgacctcgttgagcgccacccaatccgacaactcgacgatcttgacgtcctgccccttgtccttggcaagcttcgccgcaaacgcggccagctgtccgaccggcccggcgctggtcgcgatcttcagtggctcgtcggccagggctactccagtcaaggctgcttcagtcaaggccgcgccggtcaaggccagcgacaggccgagcgcctgcgccagacgcaaaagtctcttcatcgtctcaagtccgtttcttgttggagtttccgatcaggccgccttgcgggtgctgcctgcatccgcctgcgccagcgcctggatgagatcggccaggatatcgtcgggatgctcgatcccgaccgacagcctgacgtagccgggcgtcacaccggcggcgagctgttcctgggcgctgagctgctgatgagtggtggacgccggatggatcgccagcgaccgcgcgtcaccgatattggcgacgtggtagaacagtttcagcgcatcgatgaagcggcgaccggcctcgacaccgcccttgagctcgaagccgaccagcgcgccgtaaccgcccttcagataggcgtcggcgcggcgccggttctctccgctctgcaggcccgggaagatcaccgtcgagatcgacgggtgcttggcgaggaagtcggcaaccttgattgcattctcgttgtgctgccgaatccgcagcggcaacgtctcgatgccctggatgaactggaaggcattttgcggcgcgatcgcggcgccgaggtcgcgcagcagcttgacccgggcgcgcagaatataggcgatcggaccgaacggcttggccgcctcggtccagaccgcgccgtgataggcctcgtccggctgggtcagcaacgggaagcgctcggcgtgagccgcccagtcgaaattgccaccgtcgatgatcgcgccgccgatcgacgtgccgtggccgccgatgtatttcgtcgtcgaatagaccacgaccgcggcgccgtgctcgaacggccgggcgatgatcggggctgccgtgttgtcgaggatcagaggcacgccgagcgagcggccgatgtcggcgacctccttgatcggaaacacgttgagcttcgggttgggcagcgtctcggcgaaataggccctggtcttcgcatcggtggcacggcggaaattctccgggtcggcaggatcgacgaagcggacttctatgccgaactgcttcagggtctgcgacagcaacgtccaggttccgccatagagatcagtcgaggacacgatgttgtcgccggcttgcgcgatgttgaaaatggcaaaggccgaggcggtctgccccgatgcgacggccagcgccgcagcaccgccctcgagcgccgccaacctctcctcgaacgcatcggcggtcggattcttgatccgcgtgtagatctggccgatcgcctcaagcgcgaacagccgcgatgcgtggtcggcattctcgaactggaatgacgtcgtctggtagatcggcacggcgaccgcgccggttgtcggatccgaacgataggaaccgccgtgcaaagcgagcgtctcgacgttcttggtttcgaccggcatttcgaaatctcctgaagttcgtgatcccagcgtgacaagtcggcaaaggatgcgcagccgctttgtcgctgtcgagatgtccggaaaaatagcgatgggcgtgctgtcacaacctgatgacgcatctggaatctttcgggcgacgtggagctcgcaatcgattttttttgtgtgcgacgcgacggcaaccgacgccggccgatcacagatcgtccctgcgggtgcattgcgaaccgcgatttccgctcggattcacgcgttgcggggcgacgcgaaccgaaccgcgaaaggaaacgttctacgtctgaccaaggcgcagcaggattttcacccgctccccaggcatttcaaaatcaagtcgcgccgccgagatgatagacctgacggacaacttcttaacgagacgaaccaggtcgatggccagatcccgcgaactccgcttcaacgccttcaacatgatggccccgagtcacaattgggccgggctgtggtcgcatccgcgcgacacatcgctcgactacaattcgttggactactgggtgaactatgcgaggacggcggagcgcggcctgctcgacggcattttcctggccgacgtgttcggcgtctatgacgtctatgacaacagccccgagaccgcgctgcgccatgcagtgcagctgccgaacgccgagccgaccctgcttgtttcggccatggcgctggtgacgaagcatctcggcttcggcatcacgtccaacctcacctacgagcatccgtaccagttcgcccggcgcttctcgacgctcgatcacctcaccggcgggcggatcgcctggaacatcgtcaccggctatctcgacagcggcgcacgcggaatggggctcgacgcgaaccgggcacatgacgagcgctacgaggcggccgaggaattcctcgcggcgacctatcaattgtgggaaggcagctgggaggacggcgccgtccgccgcgaccgtgccgcgcgcatcttcacggacccgtccaggatccaccctgtccggcatgatgggcgtcactacaaggtcgacggcattcatctggcggagccgtcgccgcagcgtacgccgctgttgtatcaggccggaacctcgaagcgcggtcgcgccttcgcggcgcgacatgcggaggcgatcttcctcaacggccaaaccaggccgatcctcgcccgcgccgttcgcgacatcagggatgcggcaaaggaattcggccgcgatccctacgatatccgcttgtttgcaggcgcgaccgtcatcgtcgccccgacgcgtgcggaggccaacgatctgctcgcggagtacgcagcgcatgtcgaccagaccggacaactcgccctgctctccggctggaccgggatcgacttctcgacctatcgccccgaccaggccgtgcaatatgtcgagagcaacgcgatccagtcgatggtcgagaatttcacggtgcggagcgatcgcccggtcagggtcggcgacctcgcgaccctcagccggatcggcgcgcgttcgcccttcgtggtcggttcaccccaggatgtcgcggacgagttgatcaactgggcggatgaaaccgacatcgacggcttcaatctgttccgtctggtcgcaccggaatcactcgatggatttgtcgatctggtggtgccggagctgcaatcgcgcggcgtctacaagaccgcataccgcgagggcacgctgcgcgagaagctattccccggacgcgggccgcggcttcacgtcacgcatccgggcgcgggctatcgccgcgcgcccgccaaggccggccacgccgacgccgccgagtaaattgcacggcagtccatcggcggctcgtcagccgcgccttaccaggtcgcgatgtaggtgcccttgaagcgcttgtcgaggaacgccttcacttcgtcggagtgataggcatcgacgagctgcttgacccagggcttgtccttgtcctcttcgcgcaccgcaatgatgttgacccacggaccgtccgccgcctcgcgcgcgatggcatccgcggcgggattgaggccggcctgaaccgcgtagttgttgttgatcgacaccaggtcgacatcctgcagcgaccgcggcagctgtgcagcgtccagctcgacgaagcgcagcttcctggggttgtcggtgatgtcagcgatcgtcgaagcgacgctactcggatccttcagcttgatgatcccgtgaagggcgaggatcatcaggccccgcgcgccgttggacggatcgttggcgatcgccacccgcgccccttccggcaggtcggtgagcttcttgtacttcagcgagtagacgccctgtggcgacgcaatcgtgttggcgaccttgacgatcttccacccggtcttggagatctggttcttcagatacggctcgtgctggaacgaattcgcctcgatatctttcagcgccaaggcctggttcggaatcacatagtcggtgaactccacgaccttgatatcgagtccatggccggcggccaccttcttcacgacgtcgaggacctcggcgtgcgggccggctgtcacgccgacccggatggtctcggccctgcccgggccgatcaagagagtcgccgcagcgattgcggccagcaagatgcgcatgaatgtctcctagccgcaggatcggccgttaccagctcggcagcaccgcgcccttgaacttggtcaggacgaactccttgacctccggcgagcggtagctgtccaccagggtcttgacccacggcttgtccttgtcggtgctgcgcaccgcgatcagattgacgtacggccccttcggatcctcacgcaggatcgggtccttcacgggatcgagtccggcctgggtcgcatagttggtgttgatcgcggcggcatcgacatcgtccagcgcgcgaggcgcctgggctgcgtcgacctcgacgaatctgagcttcttgggattttccgtgatgtcgacgaccgacggcttgaagccgaccccatccttcagcttgatcacgcccttgtcacgcagcagcaacagcacacggccgccattggtcggatcgttcgggatcgagaccttgccgccatcgggaatatcggcccaggccttgtgcttcttcgaatagacgccgatcggaaagttgaccgtcagccctaccgactcgatcttgtagccacgatcggccttctggttgtcgagataaggctggttctggaacgaattggcctggatatcgccggcatcgagcgcggcattgggcacgacatagtcggagaactcgatgagctggatgtcgagcccgccctttgcggcgatcggcttcactgcctcgagaatctgggcgtgcgggcccggcgtcacgccgatcttgatcgtttcagcggcggccgctgccgaccagacagcgagggcgctcgcgagcgtgacaacagaacgaaacgacatcttggtctccgtgagataggcaaaacaggtggcgtagtggtgatgcgtcagcgatgacgcagccggcgattgacccggcgcgccagataatcgccggcggtctgcacggtctgcaccagcgcgatcagcaccacgacgacggccagcatcatctccggcatgaagcgctgatagccgtagcggatgccgagatcgccgaggccgccgccgccgacggcaccgaccatcgcggagtagccgagcaggctgacgaccgcgagcgtcaaggccagcaccagaccgggcaacgcctccgggatcaacaccttgaacacgatctgcagcggactggcgccgaacgacgatgccgtttcgatcaggccgccatcgacttcgcggatcgcgccctcgaccaggcgcgcaatgaacggcgtcgccgcgatggtcagcggcacgatcgccgcgcccgagccgatcgaggtgcccgcgatcaggcgcgtgaacggaatgatcgcaacgaccaggatgatgaacggcgtcgagcgggtcgcgttcacaaccatcccgaggatgctgttgacggcgggcgccgcgaacagctcccccttgcggctggttgccaggaagatcccgatcggcagaccgaagacggtcgcgagcaatgcggcgaccgacaccatgaacaggctctcgccggtcgcctggatgatcagattgatgagttcacgcgacatagccgagccgctccaccgggaagttgtgctgagacagataggccacggcctgcttgaccgcggcctcgccgccgggaatgccgatcgtcaacgaaccgacgtgctggccgccgatctcgtcgatccgcgccgacagcagcgcgacgtcgatcgacagctcgcgcgccagccgcgcaacaatcgtatcgccggcatcgctgccgcggacctgcaggcggatgacggcccgtccgccggcgatcggttgtgccaccaggcggctcgccagcgataccggaacgctgtcgccgaccacttccgaaaggaaggcctgcgtgaccggatggctgggatgggtgaagatgtcggcaacatggccgcgctcgacaatctcgccggcgtcgatcaccacgacctccttggcaagctgccgcaccaccgacatttcgtgggtgatcaggacgatcgtcacgccgagctcgcgattgatgttggcaagcaggtcgaggatcgcacgggtggtctgcggatcgagcgccgaggtcgcctcatccgagagcagcacattcggccgcgtcgccagcgcacgggcgatgccgatgcgctgcttctggccgccggacagttcggacggatagcggtcgtatttgtcggcgatgccgacgagctccagcagttcctccacgcgggccgcgatctcggctctcgaccagccggcgatctcgagcggcaaggcgatattgtccgccgccgtgcgtgacgacagcaggttgaaatgctggaagatcatgccgatcgagcgctgcgccagccgcagctcgcggccggcaagccctgagatgtcgcggccgtcgacgacgacccgtccggccgacggcttctccagcccgttgatcagccgcaccaggctcgattttccggcgccggagcgaccgatcacgccggtgatcgatccgcgcggtatggcaaagtcgattccggccagcgcctgcacgctcggcttatcgcggtaggccggatagatcttcgaaacggactcgaaccgcaccatcgtatcgcgctcgatcggagcagatgcgataggcggcgtctcgacgggttgcaccgccgtcagcgattgatgcacgttcattcagtcgtccaattcgaatggctttggtcggtcggagtcgcggactcaatgaccaaagagaaggtaactgcggtcgtcgccgcggcgatcccgcgtaccgtcggtccagccgacagcccgccgatagctccccatcgcgtcggtttgcctgagcgcgacgaggtcgatcgcctgggcctgatcggcgaaaggcgatacatagagcgcatcctcgggacagtaaagctcgcagagaaagcaggtctggcaatcgctctgccgggcaatcaccggaactccgtcggtcttgtcgaacacgttggtcgggcagacgttgacgcagatgtcgcaggacgtgcaactggcggcatcgatgacttcgatcattccgcagcctccgcataggccgcgtccgcatgcggccggaccgaggtccagacctcgtcgaggccgccgctcgtcacgtaatgccgctggcgatcgtcctgctcggggaaatcgtcgcggcgatgcatgccgcggctttcctggcgcgccagcgcgctgcgatacatcagccgcgcggttgccagcatcgcggcgccttcgcgggcccgcaacagatcggccctggaggcggcgtccgcctccgagacgtcgagccaggccccatcgagccgcgccagcgccccctcaagccgcgaagcctcccggaaatagttcagctcatacgggaacacttctctctggaccgccttcgccaaggcagccggctcgaacgcccgccgcgaccggctgcgaaacgcgatcgttcccgatggcgacagcttccgccggcctgtcggaccgaattgtcgggcgtagtcggcggcaccctgccccgcccagctgcccgacgacatcgcccaggccgcgttatggctgcctccgccggtgaagccgccgcagatcagttcgcgtgtcgccgcgtccccggccgcatagagcccggccacgctggtggcgcagctgtcatccacgatgcgcagaccgccggtaccgcggaccgtcccttccaggcgcaaggtgatcggaaagcgatcgttgaatggatcgatgccggtgcggtcgaacggcaggaagaagttcggctgcgagacgcgcatctgccgctgcacatcgtcatcggccttgtcgagccgggcatagaccggcccctcaagcaacgcgcgtgcgatcgccgaccgtccgcccttcgacgccgcgccgggaacgacgctgccgtcatcatgagtgaaggtcgcccagccgtagaacagcgtcttggtgaccgagccgaacgctgccgagatcgcataggggttggaaaactccatgctgctgaactcggcaccgacctccgcggccatcaggtaaccgtcgccggtcagtacgttcgatccgagcgtcttgctcaggaatgcgcagccgccggtcgcgatcacgacggccttggcgcgaaccgtccagcgatcgtccttctgccggcgcacgccgctcgcaccggcgaccgccccggcgtcgtccaccagcaattccagcgccgggctgtgatcgaggatggtgacgccggcctgcttggtgcgcttgcgcatcaggcgcatatattccgggccctgcagcgagttgcgctgcgacttgccgctgtcgtcgaccggatagggatagccccaatcggccaggcgattgctttgctgataggtgcggtcaagcacgcgcgccatccagcggcgatcctgcagatgaccgccgagcttctcgcggttggccatcgctgcctcgcgcagcgccggatcgggatcgacataccagacgccggttccggccgcggcggtcgcgcccgatgtgccgcaaaagcccttgtcggccagcaccacgcgcgcgccgcgctcggcggcactgaccgcagcccaggtccccgccgggccgccgcccagcaccaggacgtcggcgtcgaactccaccgatccggtcggtgcatgcacccgctcggcgcggttgggctggatcgtcatgcttcatgtctccggcggactcgaacgcggcccgcatctcggcaacatcgttgcgcgagcaagcactgcaggcaattgcagatatttgtgcagagttggacgaagttttccccggcatccgcagccgaagaagatttgtattgccgcacgacggatgtttcatgtctgccgtcagctccggcacccgacgatgcgccgggaacttcaacagaggcgaatatttctttttgcacgcgggtggccgccgctcatttcctcttacgcgccagggcgatatctcgtgacggagagcatccaagcccatggccgccatgtcccatcgtcaactccacctcaatgtgaacctgctgcattccggcgtctatgcgtcggcgtggcgattgccggacagcgatccccgcgcctgctttgacgtcggccactacgtgcgcgtggcgagaatcgccgagcgcggcaagctcgacgccatcttcctcgccgacacgccggcgatcaccgaccgcatcgactatcgctcgttcatgtcgatggagccgaccatcgtgctcgccacagtcgcggcggccacgacccatatcggcctgatcgcgaccgcgtcgacgacctacaacgagccctacaacatcgcccgccgcttcgcgacgctggatctggcgagcggcggccgggccggctggaatgcggtgaccaccgccgacgccgcggcgagccgcaatttcggcctcgccaatgtgctggagcacaaggcgcgctacgaccgcgccaaggagttcgccgaggtcgtgcatgcgctgtgggacagctgggaggacgacgcctttgtcggggacaaggcgaccgcacgcttcgtcgacacttcgaaagtgcatccgatcgcgcatcgcggcgcgcattacagcgtcgccggtccgctcaacgtcccgcgttcgccgcagggacgcccggtcacggtgcaggccggcggctccagcgacggccgcgacctcgccgccgcacaggccgaagccgtgttcacgctggcgcagaccatcgacgaaggcgcggcctacgcacgcgatctgcggacgcgcgccgcagcttatggccgcagcggtgattccatcgtgatcctgccgggactcgccaccgtcatcggcagcaccgaggccgaagccaagcggcgccaggatgagctctgggagctggttccgatcgaatacagccttgcccggcttgccggcactttgcaggtcgatccggccattctcgagctcgacaagccgctgccggatctgccgctgccggccaatgccaatcacaccatgtttcagggaaccgtggcgctggcccggcgcggcaatctcacggtccgccagttgctgcgcgcactcggcggcggcgtcggccaccggatcatcgtcggcaccccggagcagatcgccgacgacatcgaggcctggttcaaggcgggcgccgccgacggattcaacctgatgccggacgtgctgccgacggggctcgaggtcttcgtcgacacagtggtgccgatcctgcaacagcgcgggctgttccgacgcgactacgccggcaccaccctgcgcgatcatctaggattgccgcgcccggtgagccgcttcgcgcgtcgggaggtggcctccgccagcgcctgacgcaatcaccgcgcaaccgcgtgggccggagcgccggcggtcgcaaccggcgcccattcgcggacgcgcgggatgacctcccttgcaaagcgctccatctcggcctcgaacggctggaactgcagcatgaacaactcgatgccggcagcgtgaaacgccttgatccgagtcgccacttcctcgtagctgccgaccagccccgcggcggtcccgccattgctgccgacccgcgccgacttctgcatggtctgcatcatcacgacctttgggtcggtgttctgcttctggatcgccttgatcggcgcatccttcttcgacagggcgagcagccgctcatacgcggcttgagcctcggcctgtgtctcgcgcgcaacgacaaaggcggacaggccgaagcgcagcggcgcgcccgctcgcgaccggctcgcaacatcggcgatcaagccggcgacatcgtcgagcggctggccgttgatgaaccagacatcgccgtgatcggcgaccagcgcccgcgccggctccgattcgccgccgacatagatcaccggccgcgaccgatagagactggagggccgcagcgcataatcctgcacgtcgaaatgctcgcccttgtaagtcagccgctcgccctgcatcaggcgtgacaccaccgtaatccactcgcgtccgtaagcgtagcgggcgtcgtgctcggcgaagccgatgccggccttgtcgagctcgggacgattccaggcattgaccagattgatcgcaaaccggccgcgactgatgttctcgatgccgagcgcgagcttggcgagcacgaccggatgatagagatagggcttgattgccgcgatgatctcgatccggctggtcagcgccgcaagcgccgctgccgcactccacgcttcgagctgatcgaggtcttcctgatgcggattgatcgtgtgctgcgcaatcagcgtcgagtcgtagccgagccgttccgccgcgagcacgaggtcacgattgcgttcccaggacgcatcatagggctcttcgggatcctgataggcggcgcgagaaccatgcaccagcgcccagatgccaaagcggagcggtcgtgtcgtcatttgctgtctctcctgcgactcttcacgtcgttgtcgcgccgggtagcacgtgagatcaagcagccgcggatcaaaagattttccttgccgtgtcctgcatgcggataaccgagaaacactccggaacgaacgacaattgaaaaaccgctctatttctgttggcaaaaaatcgtgggacagtttgagtgtatcaacgagtgcttcatgcgagacggcaacaccaggccgatcgcgtgagcgacgacatgcgccacgcacgatcacggacgatcgcgcgcagcggtgaaacaggacgaattcatcttgagcaacctcgaacaaaccgcttcgccggttgccttcgacaccacatcgcgggacgacattgtcgccgcctctgcaccggcgcgccggttcgaaatcggccgtcgcggcttgcagctcctgtcatggcttgcaccggtcgcgctgctcgtcgtctgggagctcctggcacaggccggatggctgtcgccgcaggtgctgccggccccgagcaaagtcgtgcggaccgcattcaagctggtggcctccggaagtctgctgaacgacctcggcatcagcctgttgcgggcagccgcgggtttcgcgatcggtggcaccgtcggcttcgcgctcggcaccctggtcggcttctcgcggatcgccgaggccgcgatcgaccgcagcgtccagatgatccgcgccattccattcctcgccgcgctgccgctggtcatcgtctggctcggcgttggtgaagccgaaaagatcttcctcgtcgcgctcggcgtcacctttccgatctacatcaacaccacgctgggaatccggcaggtcgatccgaagctggtcgagctcggccgggtccagggcctcggcacgctggagctgatccgccggatcgttctgccgggcgcattgccctcgatcctgaccggcgtacgctacgcgctcgccaccgcatggctggcgctggtggtggccgaaaccatcggtgcccaatccggcatcggcttccttgcgatggatgcacgtgagttcctgcgcaccgatgtgatcgtgctgacgatcgtcatctacgcgctgatcggggttgccgcggacggcatcgcgcgaactctcgagcggcggctgttggcctggcatccgaactacgggagcgcgcgatgaccctgcacgtcgtccctgcccttaccgcggcctcgccggccgtggtggtgacaaatctccgccgcgcctacggcaatcgtatcgtgatcgaaaacctcaatctgcgcatcgagcgcggcgagttcgtcgccctgctcggcgagagcggttgcggcaagaccacgctgctgcgcgcgctcgccggactcgatccggtcgacggcggacgcatcgcagcgccccggcggcccgcggtcgtgttccaggagcaccgactgctgccgtgggacagcctgtggcgcaacgttgcgctcggcttgcaggtcagcaatccgcgcgatcgcgccgcgacggcgctcgccgaagtcggcctcggcgaccggctcgacgactggccgcggaacctgtccggcgggcaggcacagcgcgtcgccctggcccgcgcgctggtgcaggagcctgaactcctgctgctcgacgaacccttcgccgcactcgatgcgctgacccgcatccgcatgcacgacctcgtccgcgagctggtcgccacccatcggcccggcgttctcctggtgactcacgatgtcgacgaggcgatcgcgctcgctgaccgcatcctggtgatgcgcgacggccggatcgcgttcgagcatcgcacggccggtcgtggccgagcatcgatcgcgcgcaccgacctgctcgctgagctcggtgtcggcgccgctcaccccatccccgcctagactttcgaaggacagctatgtctcgctcaatcacaaagccttcccgccgcggtttcctcggcggtgccgcgttcggcatcggcgccctcgccggcttcaacttcacggatgccgcgcagtcggccaccggccgcgtcaccgacaccgtccgtctcacctggggcctcagcggccttaatttgatcgccaaggaacgcggcgagttcgagaagctccttgccaaggacggcatcaaggtcgaatggctgggtccgttccccaaccatgccccgacattgcaggcggtcaccggcggcagcgcggatttcagcttcggcggcagcacgacgccggcgctcgccgccatcattgccggctccccgctcgtcttcacccagttcgtggtctacgagccacgcaccaccgcgatcattgccagggacgattccggcatcaacaagatcgaggacctggtcggcaaatcggttgcggtgaaccgatccggcctcggcgagttcctgctcgttgccgctctcgagaagcacaaggtcgatcgcgccgccgtgaagttcgtctatctcaatccgccggacgccgcgccggcgctggcctccggcaaggtcgatgcctggtcgatgtggagccccggcgtcgacattgcccggctcgaatacaaggcgcacgacatcttcctcgagggtcgcgatctggatttccagatcgattacacctcgtacctgaccaccaggaagttcgcgaccgagaaccccgcgctggtgcgcgccgtcaacgacgccttccgcgccgagggcaagtggatttccgacaacagcaaggccgccgaatacatcgcgcagaaggccggcaaatacagcgaccaggtccgcgaccagttcgtcgcgctggatcgcaagtatcgctacttcccggtcaacgacgaaaaattcctgtccgagttgcagcgggcggccgactggctggtggcacgcaaggtgttgcccgaaccggtcaaggtcaccgaccatctcgcgcagctctgatcgaaatcgtcaaccaacgtcgctttgggtgaaaccaatgaacaaacctgtccccgccgccgcgctggcgtcatccgacctgcttcacagtcattcgcctgacatcgacgcactgctcggccgcattgccgagggcgccggcgagcgcgagcgcgagcgtgtgctgcccttcgcggaggtcgacctgatccgcaaggcgcggctcggcgcgctgcggcttccgatcgaggccggcggcgcgggcgtgtcgatccgcgcgctgttcgaggtcgtgatccgcctcggcgaggccgacgccaatgtcgcgcacatcctgcgcaaccatttcagcgtggtggaacgcctggtgcgccagccgaagaacgaccagcaccggcagtggcagaaagctgtcgccgacggcgcgatcatcggcctcgcggccaccgaactcgacacgccgaaagtcggaaacgtcacgccgaacacgacgctgacggcggatggcgacgactatctgctcaacggcaccaaatattacagcaccggcacgctctactcggactacgtcctggtgcgcacggcagatgcctcagccaccaatgcggcggtgctcattcccgtcaatcgcgaaggcatcgagctggtcgacgattgggatggcctcggccagcggctgaccgcgaccggcaccagccatttccgcaatgtgcgcgtcaagcgccaggaggtggtgttcgatgcgcccgacgccggctacggcatcccctactcgaacacgttcgcgcagttgttcctgaccgccatcaatgccggcatttcgcgcgcgatcctgcgtgacgccgcggcgctggtgcgctcccgcaagcggaccttctactacgcaccgagcgaaacgccggtcgacgacccgctgctgcaacaaaccgtcggccagatcgcgagcggcgcgttcgcggccgaaaccgtcgtgctggcggcggcggaagcgctcgacgtcgcgaccgatgcgttcgacgccggcgatgccaatgccggcgatgccgcccaccgggcggcactgctgtccgccaaggccaagatcgtcgcggacgaattcgcgatccggagcggcagcctgctgttcgatgtcggcggcgcctcggccaccaagaaggcgaccaatttcgaccgacattggcgcaacgcacgcacgctcgcctcgcacaatccgaacactttcaaggcccgctcgatcggccaattcgagatcagcggcacgccactgccggcgaagggcttcttctgaacgactgtccggtgcagcgagaaagggagaaacctgatgagcaagccggatatccatctcgtcgacgccgatgacgagatcgagcgccagttccgtctgatcatgcgccgccttgccggcggcgtttgcatcatcaccgccggcctcggcgaagacatcacgggcatgaccgtcacctcgctgacctcgctcagcgcggcgccgccacggctgttggtgagcatcaaccgccaggcgtcgtcctttgccccgatcgcgcgtcaccggctgttcggcgtcaatatcctgggctccgaccagcaggtgctggcggagcgcttcagcaacggccggctgacgggccgggagcgcttcgaaggcatcgactggagtcatggctcgtcgggcgtgccgctgctcagccgctctctggcgatggtcgaatgccaggtcgaagagatcatcgagcggcattcccatggcatcatcgtgggccgcctcgccagcatggagctgtcgcaccggctgtccgggctcacctactggaacggacagtacgtccagatcgatcacgaagccgatctcgatcttctggccgaggtcagcattcccctggcgcatgtccgataggacaaggagagctcaccatgaagcgcgaaacccctccgcagtccccactctcaccgatcggtgcggcaggaacgccaccgggccgctggcagctcgaccgcatcgtggccgagttgcgggtctccagggaacagacccacagcatccggcaagacggcgaggcacggcgcgcgccatcgcgcgatacgctcgaggcgatcctcgacggtctcaccgaagctctgtttccgcggcattacggccaatcggacctcgacggcgagaacatcgactatttcgtcggcaacaagttgagcatcgcgctggattcgctcagcgcggagatccatcgcggtgcgctgttcgtcggcgacgagctcgaaccgggtttcgaacgcgaggaggccgtcgagctgacgcgtgcctttgcatcgcaactgcctgatgtccgagggcttctgatcaacgatctgcgcgcggccttcgtcggtgatcctgccgcacggaactttccggagatcctgatcggctatcccggcatgaccgcggtcatccaccatcgcctggcacatctgctgtatcgcctcggggcacggctgatcgcccgcctgatgtcggagatcgcccatgcgcgaaccgggatcgacatccatccgggcgccagcgtcggctccggcttcttcatcgatcacggcaccggggtcgtgatcggggaaaccgccatcatcggcaacaatgtccgcatctatcaggccgtcaccctcggcgcgcggcattttccaaccgacgacgaaggcagcgtcatcaagggtgacgcccgccatccgatcgtggaggatgacgtcgtcatctacgccggcgccaccatcctcggccgcatcacgatcggccggggctccaccatcggcggcaatgtctggctgaccaaggacgtgccaccgaacagcgtggtcacccaggccaccgtccgcaataggccgggctgacgcttacgccgcgggcttccaccgcatgaagcgccgttccagcgcctcgagcacggcgttgaacacgaggccgatcacggtgatcccgaggatgccgaaatacatctgcgggatcaggaagctgtattggctgttgatgatgagatagccgaggccggccttggcgccgaccatttcggacgcgacaaggacgagcatcgccgaagcgctggcgaggcggatgccgacgaagatggtgggcagcgccgccggcaggatcaccttgcggaacagctgctgcggagacgcgcccatcgttcgcgccgacttgatcaggagcggatcgacctgcttcaccgccgcgatggtgttgagcagcagcggccaggcgcagctgtagatcaccatcgtgatcttggagagctcgccgatcccgagcagcagaatgaacaccggcagcagtgccagcggcgcggtgttgcggcagatctcgatgaactggttcagcagatcgccgaggcgggtgtaccagccgaccgcaaggccaagcggcacgatcaagacaaccgagatcagaaacccgcccagggcacggagcaggctggccgatacgtcgtcatagagctcgccggtctgcgcgagctgccagccggcagagatcacctccgagaacggcggcaggaataccggatcgatcagggcgagcctcggcgccgcctcccacagcgcgagcagcatgaccagcagcaatgagcggcggccaaggccggccgatttccgtagcacggtgcggaggcccttcacgaccggtgcccgtctccgcgcagcggacagcggctcgccgcgcccgcgcgccggtccgagcaacggcgagatctcaaggctagacatgggcaacctctttcacctcgcgctcgaggcgacgcgcggcgaccccgccagccagttgttgcgccttctgcacctcttcgcggagcaggctccagacttcgtgccgcacctcaccgaattccggcaacgccctgacgtcttcggcctcgctgcgcagcacctcgggaatgtcgatgacctgcttgatccggcccgggcgcgacgtcatcaccgcgacccgctggccgagcacgacggcttcgtcgatgccgtgggtgatgaagacgatggtcttgccggtcgcgcgccagatccgcagcagttcgccctgcagcgtctcgcgggtctgggcgtctagtgccgcgaacggctcgtccatcagcagcacttccggatcgtaggcgaggctgcgtgcgatcgcgacgcgctgcttcatgccgccggagagctcgtgcggatagcggtcggcaaagccggacaggccgacgaggtcgagaaaatgctccgcaatctcgtgccgctgcctggccttgaggcccgcgatgtcgagcccgaactcgacgttctgcgcagcggtgcgccaggggaacagcgcatattgctggaacacgatgccgcgatcgcggccgggccccgtaatcgggcggccgtcgagctggatgcggccgctggtcggtgtcgtcaggccgccgagcagatcgagcaaggtcgattttccgcagccgctcgggccgaccagggccaggaattcgccggaacgaacgtcgagcgtgatgtcttccagcgcggtgaagcggcccgcggggcgaccgccctcaccgcgcgtcacgaactccttgcggacctgctcgaagcggatcttgaccgcgctcatcgtgcctccgccgtcttgccgggacggtaatagttgaactcgttggtgtaggtgtccgaggccttgatctgccccggcttgagcagaccgtccttgaccagccagtcgatccagacctgcagttcggcatccgagatcaccccgcccttagacgcgacgccggtgctcttccagtacttgatcgaggaggcatcctcgttgcgcttgcgctccgcgatgatcctctcgaagcgcgcccgcacctgctccggcggcgtggtctgcgcccactcaatggcgcgcgagatgccctcgaccagtttccgcgcggcattggggttgtctttgatgaacctgtcccgcagcacatacgcgccgccggtgaactggccgaacaggtcggtatcgttgaacagcgaacggatcccgccgcgttccagcgccttgtcgcgcagcacgccgctgagcgcgctgacctcgacctggccctgccgcaatgcctgctcgccggaaaccggcggaatcgcgaccagcgtgacctgcttcgcctcgccggcgctgagcccgttgcgcgcgagatattcgcgcagcacgaattcgagatgggcgccgagcgtgttcacggcgaccttcttgccgatcaggtcgcgcgcgcccttgatcgggctgtcgtccttcacgaagtaggcgtaataggtgttggcgtcggagccgtagtagccgaccaccgccttgatcggcgctttcgccgcgatcagcttgaggatggcgccatagaaggcgccgccgatgtcggtatcgccggtgacaacggtctggatgtcctgcggaccgctgatggtgttgccgacccatttcagcttgagcggcgcaagatagccgaggtcttccgcgagctcggtgaacgtcacctgcccggcccagccctgatagcggatctcggtcttctcgagcggcggctcggcgagggccggcgctgcgaggcccactgcgaaggcgcctgcgagcaggagccgcgcaacccggcgcgcggcggcgcgccgcgcgcgaacaaatcgaatgatggcgttcatctgctgctccaatcgatgagatgctcaggcggctttcgcggcctgcggcttcgacgacttgatgcgggtcacgctgcgacggccgtcgacgctgagcggcacgtcgccatcgatggtggcgcggcggaccacgcgatgctgatcgccgtagtcattgactgcgtagtgctgcgtcgcgcggttgtcccagatcgcgacgtccccggtctgccagttccagcgcacggtgttctcgggtgcggtaatgtgcgactggaatagatcgaacagcttctggccgtcatatttcggcaggccgacgaaccgctgcacgaaattgccgagcacgagcgtacgctcgccggtctcgggatggacccgcaccaccggatgctcggtctcgtagatcgtgccggtgaacacctcgtcgaaatgcttcctgtccgcctcggtggcacgcgacttgacggcataatcataggcattgctgtgcaccgcccagagctcgtcggcgagcttgcgcagcggcgccggcaggtccagataggccgctgccgtgttcgaccacacggtgtcgccgccatagggcgggatcacgacgccgcgcagcaccgagattttcggataggcgtcaacgaacgtcacatcggtgtgccactggtcggcgcggccgccgccacgacccgaatccagttccaggattgacgacgtaccgttgatcgcgccgaccgtcggatgcggcacgagcttgccgagccgcaccgcaaagcgctcctgctccgcgtcgtcgaggtggccttgatcccggaagaaaatcaccttgtgctcgagcagcacctggttgatcgcgcggacgacctcgtcggacaaatcgcccgacagcctgatgttcttgatctcggcgccaagccgggccgcccgcttgatgatgtcggcgcgcggaatggcgttgtcgatggtcgtggtgctgctcatgatcccgttctcaccttgcgatccccagaacaaagctccgccgtgcgccggtcgcgggagcgacggcggagactgatgacgctgtcgtgcgtcttactcggccgcgacgtgctccggcggccgccagaccgccgacgcatagagctccggcgcgaaatcctcggctatcgttccgctgatgcgggcttcatgggaggcgagatccgccaggaacagatcgcggctgatgcgggcaacgatcgccggaatatcgcgcttgaagctcggcacatcgccaaccgggaggccgaagctgacgaacgccgccggattgaagacgtggatatccctgaggtacggcgcgcgccccggcaccttctccagatattcatgcccggacccgagatagggataggccgccagcgtctcgtcgcgctggtccgcgggcggcgcaaaacgatcgcgccacaacaggatgtcgtcggcgaagtcgcgcagctcggcttgcgcgccgaggctcaccgcatagccggtgcccgcgatcgcaaagtcgaagccgaattcaccatgcggcgtttccgcgaccggacgtacgccctgcaatcgtgccgaggtccagggcgccccgaggtgcagatggaaattagggaaggacaccgcgcgcgagatcgcatccggcggcggggtcgagccggcttgccggaaccggatcgcctggtgccagcgcacggcgtccggcagcgcgccgtaattgtcataggcacctgggtagccgcggatccggatcaccggcaatgaggccaaggtctcgcgccgcgcgaacagatgcacatccctcgcgcctgcctcgagcgcaaccgccgccgcatcgaacgccgatgcggcgctgccgatcacggcgatggagcggccgcgcaggctcctgaagtcgatcgcctcggaagtatgcgcgtagaaccgtttcggcagctcttggaggacctccggcacggacgcgccgccgctaccggcgaagccggtcgcgagcaccagcttccgcgtgctctcgatcacagccgccccgttccgctccaggtgcagtcgcaaatgcccgtccgccggttcgatgcgaaccagccgcgtgccgtagcgaaccgcaccaccggtaaccttgcggtaccagtcgagataggccgcccaatcgagccgcgggatgcgatcgagcgcgtcataggcggccgctccatggcgcgcttcgtaccaggcctggaagccgagccccggcaagccgagctccggtcccggcaacgacttcggcgtccgcagcttgtgcatgcgcgcgctggtcagccagacgcctgctttggtgccgtccgccgcggcatcgatcaccgaaaccttgccgatcccggcgcgccgaagcgcaaaggcaaaggcggagccggattgcccgccgccaaccacgaccacgttgtgatcgatcccctcgcgctcgggtacccagttttgcggatcgggaccgatcaggcgaagcgcctcgcgggcaacgctgtcgggatcggattgcggcatggtgcagaacctcgctttgacgttgcaaatcgtaaaagcgatcgaggttcagtcaatgaaaggaatccagctttgttttcgacggcgagcaatgttcgcttcgtccgcgacgcgcctgcgggaatatttgcgacgatcgcgatccggtcgatcgtctcgcgcgctttgcaacgcgcaaaatcgagcaatcgacgtgcgtagcggcctcacgccgccgctttcgccgtcattgcgagcgcactcgtctccgatcggcgatctcctcgtaaggttcatgctcggcgttcgcgcaacaacgcaaattcatttcacaggcgccgacgtagagtccgcggcaacgctcgcgccgaatgtcggcgctttgccgtgaagcaaatggacggatcgaatgccgcaatccgcaggcgccatcagccttgagcacgacacaccggagctcgcccgctcctatgatgaagctggattggttcagttccgtcacggcaagttcctgatcgggccgctggcgatccggtccggcgagcatgtgctcgacatcggaaccggcaccgggcggctcgcggaattcgtcgccggactggtcggcccggacggccgcgtgatcggcatcgatccgcttgccggccgtatcgagatcgctcggctgcggcaggccgacaatctccagttcgacaccggccgtgcggaggaactctcacgcttcgctgacgcccagttcgacgcggtctatctcaacagcgtgtttcactggattgccgacaaagacgccgccctgcaggaaatccatcgcgtgctgaagccgggcggccgccttggactgaacgtgcaggatccatcccggccgcatcaatcccgcgtgctgctcagccaggccatcgccgaagcaggtcttggcgatcgccgtcaggattccaaccccgtgctcggatcgaccgacgaggagctcagcgcgctgttcgcggccaacggcttcactgactaccgcagcgaactgcgcgcgctggtcgacatccatgacaatgccgactcgctgctgcgctggtcggaagcaagcgccttcggaaactttctcgaagccttctctccggccgaacgcagcttggtgcggcaggcgttcgcccggcttgtcgaggacaagcgtacaccggaaggcctgtcgctcgagcgctaccttcgcttcgcgttcgtgcgcaaggcgccgaccgccaactgaccgatcatcccccgcgagtgccgccatgagcaaacgacagctttctctcaacttcttcatctatccggacggccaccacgaggcggcctggcggtacaaggcctcgaccccaagccgcctgctcgacgtcacctattatcaggagctcgcgcaacgcgccgaggcgcacaagttcgacgcggtgttcttcgccgacggcccggcactggccgagaatgtccggcacgccgcgcggttccggctcgagccgatcaccctgctcaccgcgatcgcatccgccaccaagcgcatcggcctgatcgcgacggcatcgacgacctataccgaaccctacaatctggcgcgcctgttcgcctcgctggatcacctcagccgcggccgcgccggctggaacatcgtcacgacgagctcgccgcaggcagcgcagaatttcgggctgcccgaacatccgccgcatcacgagcgttacgagcgggcgcgcgaatatctcgacgtcatcacgcggctgtgggacagctgggaagacgatgcgctggtcaatgatcccgcgtccggcgtcttcgccgacaccgccaggatccatgccatcaaccacgtcggaaagcactttcgcgtccgcggcccgctcaacgtttcgcgaacgccgcagggacgaccggtctatgtgcaagccggctcgtccgacgacggccgcgccttcgcggcgcgctttgcggaagcgatcttcaccgcccaccagaccctgtcgagcgcgcaggagttctacaccgacatcaagcgtcaggcccgtgcattcgaccgtggtcgcgatcagatcaagatcctgcccggcatcagcccgttcatcgccagttcacagctcgaggcagatcggctgcaggacgagttcaacgaactgatccagccggaatattcgctggcccagcttcgccagatgattggcctcgatctctccggtttcgacctcgacggccccttcccccgccatctgatcgacaccgacagcgcccgcggcgtcgccagccggttcaagctggtggtcgatatcgtcgatcgcgagaagccgacgattcgccagctggtgcagcgcctcgccggcgcgcgcggccattgggtgatcgcgggcccgccggagaagatcgccgacaacatccagacctggttcgagaacggcgcggccgacggcttcaatgtcatgccgccctggctacccggcggcttcgatctcttcgccgagcaggtcgtgccgatcctgcgcaagcggggcctgttccgccacgactacgagggcacgacgctgcgcgaccattacggcttgacccgaccggcgagcctttactccaacgccatccaggcgatcgcctgatcgcgtcccctgagccgcccgcgccgcgggcggcgatcatctccgcgccgggtccagcacccggcgtcgtagacagcgacattcgccttttattttaaacataaaacatccgtacctgccggagatcgccggagcattcatcggaatattgcggagattgccttccggcacgaaacccgccgcaaaatccctacaccccgacgccgatccgtgccccctgaacgagccttgaatttacttttggcacgaactatcttccgggcgtcatcgagaccgtcaccttcaacgggccgggtgctgcaggagatttgatttggcagtcgcgaaggagtccccgcctgtttcacccaggaacggaggtgatcaggaggccgagtacagggctcagacacggctttggcttcggctgctcgcctgcacgaccctgatcgagggcgagctgcggcgccggttccgcgaggaattcgacttcacgatgccgcgcttcgacgtcctggcccagcttgaccgcgagccgagcggattggtgctgggagagctgccgaagcggctgatggtctctgcgggaaacctgacgccgatcgttgatcggctggtcgaggacggcttcatcacccgcacgccttcaaacctcgaccggcgcgtgcagatcgtttgcatgaccgtcgaaggccgcaaagccttcaggcgcatggccaagagccatggctcgtggctggccgagctgctggcaagggttccggccgaccggctcgatggcctgacccgcgagctcgacgagctcaagggcgccgtcagggacgcgatgcagaagccgtaagccggcactgtaattcacaccacagccgaacgccctccgacacactcccgcagttcaatcagggcagcagcctgtactttccgtcctcgatctgaaccaggatccgcgcgcgagcatcgacgccgtgtcgatccgccggcgtgtaagtgtagacgccctgcgtcccggccagctccttggtggtgaacagcgcctggcgaagcgcggcgcggaattccgacgagcccggcttggcgcccgttgccatcgcgcgcttggccgcatcgacgaacaccagccagccgtcgaaggcataggacgagaacgagtcggtcggcgcctcgccattcgccttctcgaaggcggtgcggaaatccagcgcaaccttctggatcggattgccggccggaagctgctccgccgcggtcaccggcccggtcgggcagatgattccgttggcggccttgccggcgagccgcaggaagtcggcgctgatgagcccgtggttgccgtagagcggccccttgtatccgcgttcggacagagcgatcaccggcaaggcacccggcgtgcccgtgccgccgagcatgatggcgtcgggccgcgccgccaacgcgcgcagcacctgggcggtcaccgacgaatccgaccgggcgtagcgctcgttggcgatgaccttgatgtcggccgccttggcgctttgcgacagcgagtcgtacatcaggtcgccgaaggcgtcggagaagccgatgaacgcaacggtcttcaacccccgcgccttcatgtgatcgacgatgccctggaccagaagcggcgtcggttgtggcgtctgcaccacccagggcccgccttcgcctgatggcaccggcgcgatcggcgacacggcgatcatcggaatcttcagctcgatcgcggcggtcgccatcgccagcgtctgcggcgcgccggacgtgccgatcaggatgtcgaccttctcctgttcgacgagcttgcgcgcgttgcgcgccgacgccgtgggatcggaggcgtcgtcgagctgaatgacgcggagcttctcaccgccgacttcgccgacataggcctcgccggccgcgatcccctttgcattgggaatcccgatcgacgacaccggcccgctcaggccggtgacgaagccgacgaggatctcggcctgcccggcctgcggaacggcgacaagcaacgcggccaaggccagcagggtcttcatcgagatcatggcacctgtccttcttgatttgcgtttcttgtttcgggcaagcgccatccgctcgcttcagctcgcggaaaccaatgcgatcacgcgcagcgggctgccggagccgttctggatcttcaggggcgacgccacgatgacggcaccggtgggaggaagctgatcgaggttgcagaggcactgcaggccataccggccggcgccatgcaggaagtgatgcgccggataaggcggctcgaaatggccggcctgccctgcgtcggtaccgatcgtctcggtgccgaagccgatgatgccgcgctcctccaccaaccatttcatgacggccggattcggccccggcgtgtgtgcgccgtcatccctgaggttggcgtagtcgcgccagcccttcttcgaccagtcggtccgcaacagcacccagtgccgcgcgggaatccgtccgtgcttcgcctcccaggcctcgacgagcggcacggtgagcaggaaatccggatcctgcgccgcgcccgccgagcagtcgatcacgcaagccggcgcgatcatgtccttggcaggcatcgtgtcgaccgaattgttcggcaggtccttcccggtgaaccagtggatcggcgcgtcgaaatgcgtgccggtgtgctcgccgaacgtcacattgttccagtaccaggccggaccgcgaccgtcatagcgcgatatctcctggatccggaccggagccgcctggccaaattccggcggcagaacaatgaccgggaaatccggactgagcgtgaaggtcagatcgacgacccgcaccgcgcctgacgaaatcgcacctgcgagctccaggagattcttgccttgcattgtgacgtcctcccgttgaaatcctgattttatctatcgagctcgcgctcgagcgctttcggattggcggcaagacgctgcctgatctcctcggcgacgtccccgacatagatctcctcgagcccacccctgagcccggacacgatcgcctgcgcaacggcgcgcggcgcgaccttgggcggcggcacggtctggaaccactcggtatcgaccggtcccgtgaacaggttcatcaccttgacgccgccgggccgaagctccgcgcgaagacagtgcgacagcgaaaggcaggcggcttgcgacgccgagtaggcgccgaaagcgggccagttcgccagcgcatagaccgacaggatattgacccaggcggcgctgctgttgatgccatcggctccccgcatccgcatcgcgggaccgaaggcctgcgcaaggttgatgaagccgagataggcctggtcgatctcatcccgcgcgatgcccgtgcccctgcggtcgagaaggccaccgggccgcacatattccgtcgtgttgatgaggatgtcgaccttgccgccaatgtcggccgcgaggtcagtcgttgacttttcgtcggccgcgtcgagcgtcacgatctcgatccccgcctgcccgcgcaacagctgttcgcctgcgaaaggtcgccatggttcggaaacgccgacgaacaccgtcttcgcgcccgcggccttcagcgccgcaacggcctcctggccgatcagactgcggccgttggtcacgagcacgcggcggaatttcggatcggccgtcatttcccgccactgccggtcgtctgccatgttgagcgtctcctcctcgggtcgggcaaaagccactgcctggccgctcttgtcgagctgaaacgacatcagcacgggcgcgccctcggcacagtcggcatgcagatgcgccaccatggtcggaccgcaatccatcttgacgagaccgatgcgccagggcgcccgctcgcggaaatagacgtcgcttggtacccgggccgtggtttcggccagcagcacaccgcggcgcggcgcatcgacgaaggtcagatcagccgacaggcaggcgggacatgcctcgcgcgccggataggcgaaggcgccgcaagcctcgcagcgctgcagcatgaagcgtccttcggcggcagcgcgcgtgaacccgtgcgacgtccggctgcgcggccgcggcggcgacgcgggaagccgcatccgcagcagcgggttcttgcgccggggtggctcaatcggatcgatcatcgcgcaggccccgcaaagatcgcggcaccggaggccaggccacggtcatagttgatcataccgaagccggaggcgagagcgagccttgcatccttgacctgcgtcggaccggcttcgcctagcacctgacgcaagccttcgaccagcccgagataggcgccggcggcgccggcctgcccggcagagagctgaccgccggaggtgttgtgcgggaagtcgccgtcaacagtcagatcgtgctgacgcacgaaggccgcgccctcacccttgttgcagaatccgagatcctcgaactgcatcatcgtgatgaccggatagtcatcataggtctgcacgacatcgagatcgtcaggcttcacaccggccatcgcgtagagctcgctgatatccatcgcccagccgccgcgcacctgcatcggatcgtcggcgaaggcgttgtgccgttcgatggtcgacagcaatcgcgcggccggcaggccgagcgatgccgcggtctcgtcccgcatcacgaggaaggcctcggccccggcgcagggcatcacgcaatcgaacagatgaatgggatcggaaatcggacgcgccgccagatactgctcgatcgtcaacggcgtcttcatcagcgcatgcgggttgcgcagcgcattggcgcgctgagcgaccgcgatccggccgacgtcctcccgcgtaacgccataggtccgcatatagttgcgcgcgatcagcgcgaagctcgcattggcgccgcctgcgccataaggataaaccgcgtcctggttgaagcgcgagaaattctcgagcgtcaggcggaaggaatcgacgtgattggtatcgccggcgacgcaagccacgatgtcggcatcgcgcacctgcaccgcgcgcgccgccttccgcaatgccgcgatggcgctggcgccgccgagtgggatggtgtcgagccatctgacgcacagcccgaaatgctgcgtcagtccgatcccgctgtcgagccccatggtgaagctggacacacagaggccgtcgatgtcggatgtcttgatgccggccttcgcgaccagcgcactcagcgcgcgtccgatccaccattgcgcgctctcgatggaatagcgcgcataggggatcgtgacgggagccgccatcacgatgccgtcatacggtgtgcgcagcgaatttgtcaccagccgcctgccttgcctgccgtctcagatcaccgtcagcttcacgtcgatattgccacgagttgcattcgaataggggcagcgctcgtgcgcgcctgcgacgatctcctccgccaccgccttctcgacgccgggcagactgaccttcagttcgaccgagagcgcatagccgacaggaaccggtcccatcgcaaccctcgcgacgacggacgtctcggccgagggcgtgatcttcctggtgcgcgccacgagcttgaccgcgccgagaaagcacgcggcatagccagccgcaaagagctgctccgggttggtcccctcgccgccgggtccgcccagcgatttcggcacggacagcgacaccgacagcaggccgtcggcacttgcggccttgccgtcgcggccgcccatagcggtcacctcggtctcgtagaggatcttctcgggtctcatcatggctcgttctccagaactgatcggcgttagcgcttgttgcgcgcgagcatcgcccggaaatcgtcgcgggcgagcgcactggcgcgcttgaagctcggcccgcggctcggctcggtgccgttgagctgcctgagctgcacccacatctcggcgctcttcaatgccaccgcagcacagttcacgaccggtgcgtggccgaccttcaggccgcgctcccgcccgatcaatagtcctggcagcacgccggcggggatcaccacgtcggcgccgcgctccaccagcggcaaggcgcaggccagaaaatcctcgatcatccgggcatgagccgcctgatcgcccgcgaacgcagctgcgaaatcctccggcttgcaaccgaggccggtcacgtggacgacgcgatcaccgaggccgtagcgttcggcctgctcgtagtgccagacctcgaagaccggatcgagcgtcacgaggccgaggcgccggccgagttgcgaggccgcaagcaacgtcgcctcgccggtcccgaccacggggatgtcgagcgtcgagcggagctcgtaaagcccgggatcctggaagtggcccatcacgaaggcgtcgaacccgctctcttccgccgcgatgccgttgtcgatggcctggaccgcgcagcgcagttcggcgagccggccgaattcgcgatccggcggtgaaatgccctcgacctgaaccgtggtgccgggtgcggcgatgttgttgagatactccgacagccgcgccatatagggcgcgttcacgctcgcatcgacgaaactctgccagaagatgcgcatcgcccttctcctcgacggtgacaggagcatcggccgtcggcctgccgacgcagatatttcaaccataaactaattgacgcgtcaaatgcgcgcggcggagcccgccgaggcgaccgctccaccgcagccgggaggcctgtttttcgggacaaagcaatgaaggaaatggcgcgcgcggacgaaattgtatgcagcaacatttttttctgacagccccgtgacacgtgttgacgacgccactgagaatactttaggctttaagtaatcgaccatcggccgctgccggtggtcatgtcgatgatgttgcagggcaccgattttgagaaactcaatcgcgtggactagcgtcgggccgcaatggccggcagcagcatcgccggtcgcgcagcgcggctgtggcattcgtcttcctttgcttcgacagatgcccgcggactgcaatcgccccgcccgctatttgagcggcacgcctcgccatggccgctgacgcccggccgagcgaaattccctctcggcgcgcccggcgtctggcgctacagcaatgccttcaatcggttcgttcgcggctcggctacctgcccggcttgcagacattcgcacccagcatcaacggaggacaacgcaaatgcggcagaagaccctgggtttactcgcactcgtcgccggcgtcttcgcggcaccggcggcgcaggccgatatcacgatcggcttcgtcacctcgctgagcggcaacggcgcgtcgatcggcatcccctatgggcgcggcatcaatgccgcctatgaatacaagaagacgatcaacgacgagaccatccgcctgatccagctcgacgacggctccgacccgtcggccgcgacgcgcaacgcgcgcaagctggtcgaggaagagaaggtcgacctcctgatcggcaccgcaacgaccccctcgaccatcgcgatggccgccgtcgccagcgaattgaaggtgccgatgatcgcgatctcgcctctcggcaagcttccggactcgccggagcaatgggtcgtcgcggtgccgcagccggcttcgctgctcgtcaagatcgtcgcggaccggatgaagcgcgacggcatgaagaacatcggctatatcggtttctccgatgcctggggcgatctcgtctacaacggcgccaaggccgccgagcccgtcgacgacatcaaggtgcagaccaacgagcgctatgcgcgcaccgatacctcggtgaccgcgcagatcctgaaggtcatggccgcacgtcccgacgcggtgctgatcggtggctccggcacgcagggcgccctgccgctcatcacgctctccgaacgcggcttcaagggcaatacctacggcaccgtggcgctgatcaatccggacttcgtcaccgtgggcggcaaggccgccgagggcatccaggtctccgccggccccgtgatcgtggccgagcagcttccggatgagcacttcgccaagaagatcgcgctcgacttccgcgcggtctaccagaagacccacaacattccgaccaccgacgggttctccgcctactccttcgacgcctggctgatcttcgccaacgccgccgagcgggcgctgaagaccgcaaaacccggcaccgcggaattccgcaccgcgctgcgcgattccatcctcagcaccaaggagctgcccggcgtgcatgccgtctacaacttcaagcccggcgcggtgaccggcgtcgacgagcgctcgctggtcgtggtccgcctgaccggcggcgcctggaagtacgcgccgtaggcaaaaagatggccggcagccagaacgggggaacggcgtctccatgacgagcgatatcgcggccatccttgcaatcgacgggatcgccaccggtgcagtctacgcgctggtggcgatcggcactgtgctcatcttcacggtgacgcgggtcatcttcattccgttcggcgacatcgccgccttcaccgcactgacgcttgcggccctcgatgccaagcgttttccggggaccggtgcgctggtcgtggtgctggcgtgccttgcgaccctgatcgagatcatttcgctcattcggagcggcgacagccgcctgctgccgcgcgcattgctgttctatctcgccattccctcagcagtagtcggcatcgcctggctcaccatgcgcatggacccgccgctcgccgtccggctggtactcgcgttgatgctgatcacgccgatcgcccctctcctcgaccggatcgtgttccgcccgatcgccgacggcacggtgctgctgctgctgacggtctccgtggcgctgcatttcgcgctggttggtctcggcctgctgttcttcggcccggaaggcgtccggaccgagccgctgacgtcgttctccaccgagttcgccggcgtcctgatttcgggccagaccatgctgatcgtgatcgccgcgctggtgttcagcggcctgctctatctgttcttcgacttcacgctggtcggcaaatcgctgcgcgccaccgcggtgaaccgcaccggctcgcgtctgatggggatccggccggcgcgggccggcaccatcgcctatctgctgggctcgctgatggccggcgtatccgggatcctgatcgcgccggtcaataccgtgttctacgattccggcttcctgatcggcctcaaggcgttcgtcggcgccatcgtcggcggcatgaccagctatcccggcgccgcgatcggtgcggtgggggtcggcatactcgaaagcttcgcgtcgttccagagcagcgcgctgaaagacgtgatcgtgttctcgctgctgatcccgatcctgatctggcgatccctcgcctcgctgcattccgaggaggagatcgaggaatgacgcgcgttcacgttaggctcgcggcggcagcggcactggcgtgcctcgcactcgcaccctttgtcctgagcccgttcagcgtcacgctgatgaattatatcggcatctattcgctggtcgccattggccttgcgctgctcaccggcgtcggcggcatcgtgtcgttcggacaggccgcgttcgtcggcatcgcggcctatgcgacggcatgggtctcggccctgaacgggcaatcgccctggctcggcctgctgcttggcgtggtcctgacctgcggtgtcgcgaccatcctcggcgtcgtcaccttgcgcctgcagggccatttcctgtcgctgtcgaccgtggcatggggccttgcgatcggcttcctgttcggcaatgtcgatgggctcggccgcttcaacggcatctcgtcgatcccgccgatcagcctcggctcgttcgcgctggtctccagcgcacagatctattacctgatctggggcatcgtcgccctggtgctcctgctcggctacaatctcctggactcgcggctcggccgcgccatgcgggcgctgcgcggcggcaacacgctggtcgagagcctcggcatcaacgcgttccggatcaagctcgtgaccttcgtgatcgcggcattcctggcctcgctctccggctggctctacgcgcatatgagccgcttcatcagcccgggtccgttcgatgccggcatgggcatcgaatatctgatgatgacgatggtcggcggcgccggcagcctgctcggcggggtcgtcggcgccgccatcgtcacgctgctcaagaacagcgtgcaggattatctgccgctgatcgccaagggcgcgtccgggcaactcgagatcgtcgccttctcggcactgttcatcctgttcctgcaatgggcgcggcagggcatcgtgccctcgatcgcacgctatctgccgaagatcaggcgcgagcggccgcagcccgcgccgccgctgccgcgccgtccgcagccgacaccgggcgagctgcttctgaaggtcgatggcgccgagcgccggttcggcggcctcattgcggtcaacaatgtcagcttcgaggtgagatcaggcgaaatcctcgccgtgatcggcccgaacggcgccggcaagagcacgatgttcaactgcctgaccggcgcgctgcgggtcagcaagggcgagatctccttcgccggacgctcgatcgcgcgcgatccgcagtcccgcatcgccagggccggcgtcgcccggaccttccagcatgtcaagctgcggccgcgcatgagcctgctggagaacgtcatgctcggcacctacagccgaaccagcagcggcctgttcgccggcgcgtttcgtctcaatcggcgcgaggaagccagcgtccggcacgaagcgctgctgcagctcgagcgcgtcgggctcggcgacaagccattcgagctcgcgggcaatcttccgctcggcaaccagcgcatcctggagatcgcgcgcgccctcgccgccgatcccgcgctccttgtgctggacgagccggcggccggcctgcgccgccaggaaaagctgcgactggcggagctgctccgctcgctgcgggcggatcacctgaccatcctgatcgtcgagcacgacatggagttcgtgatgtcgctggtcgaccgcatcgtggtgctcgacttcggctccaagctctgcgagggcgtcccgagcgcgatccgcagcgacgagcgggtgcaagaggcctatctcggaggcgtcgcgtgagccagatgttgtccatgaccggcgtcaccgtctgctacgacaacgtcgaggccgttcgcaacgtctcgctgtcggtcgacgaaggacagatcgtcaccgtgatcggcccgaacggcgccggcaagaccacgctgctgatggccgcgatcggcctgctcgcatcgcgcggcagcatggtgttccgcggcagcgacatccggaagatgtccgtcgaggatcgcgtcgagcgccggctctgcctggttccggagaagcgcgagctgttctccgacatgtcggttgccgacaacctcctgctcggctcctacagcctgcgcgaccgctccggcgtgcagaagacgctcgacgaggtctatgatcgctttccccgcctgaaggagcgacaacgccaggccgccggcacgctctccggcggcgagcgccagatgctcgcgctgggacgcgcgctgatggcaaagcccgcgctgctgatgctcgacgagcccagcctcggcctcgcgccgctgatcgtgcgcgagatcttccgcaccatcgcctcgctccgcgacctcggcgtgtcgatcctgctggtcgagcagaacgcccgcgccgcgctcgagaccgccgattacggctacgtgctggagaccggcgagatcgtgcagtccggccctgccaaggacctgatccacgatccccggctgatcacggcctacctcggcgggcactgacacaaaaatatcgaaaacaaccccatgcacagtcgccggcgggtgccggggacgaattcgttttttacgaaatcgacttgacacgtcgggcaaatcaggggtgtactaccaccatcgcagcgcaggtccgctatccgaccagacgagggcggcggtttgcgagcggcttctcgaccagcacggcgcgcagccattcgcggaagctgacgatctcgggacaatctgcggtgccttcaggcgcaatcagccaatcacccaagccggatccctggttgagccggtcgcagcgatgacccggatggtggccaaggccgcgggcgatcagcaggtcgaccttgccctccgccaactcgtgcaagccggcgggctgcagcacctgcaagccgatgtcgagatgcgcgccgcgaaactccgccagtttgaggcggcgcaggtcgaagctgccatggacccccaattgcagcagcaccgcagctgccggtttcaattgcgaggtcgcatccgcgatatggcgaaagccgtcggagaccccgggcaaataggcctgcccggccgcggtcaggatcagctgcttgtgcaaccgctcgaacaactgcacgccgaggcgcgcctccagcgctttcacctgctgccccacggcggcaggcgtcacgtgcagctcgtgcgcggccagtttgaagctgaggtgccgcgcggcggcctcgaaggcgcggagcgcgttgaggggtggaagggcgtaggtcatcgcgcgggagtttgacaccgacaggcggtggccttgcaatagattttcttgcgctgaaccgcagcaaacatgctttgtgccgcggcgacaccgccggatacggtcacgccgcaaaccggagacgcgctatgccctcaactcacatcgtcagccacaatcccgcaacggtccaccctcccgccggcgggtactgcatgggactcgaactgacccagcaccgccgcctgctcttcatcagcggccaggtgcccgagagatcagacggcaccgtgcccgaggactttgaagcccaatgcgagcaagcctggcgcaatgtgatggaagtgctcgccgccgcaggccttggcgtcgagcatctggtcaagatcaccacgttcctgaccgatcgggatcagctcgtggccaaccgcaccattcgtcgcaaaatgctcggcgagcatcagcccgcgctgacggtcatcatcgccgagaccgtcgacagcaaatggttgctggagatcgaggcgatcgccgccgagtgaaaccagcttcctcgacgtcgcgaatatccaactatgtcaggtgtcaaatgactgagatcatccatccgttttacgagcagcatcgcggcgcgatggaggccgccatgcgccatcgcctcgaccttgccgaagcgatgttgtgcgagcgcgagcatctgaccgagatcgatcgaattcgacaggaagcgacggacgaattccagatcatgctcacccaaatgccctatgtcggcggcaccgcaagtcggatgaccgatttcttcatgcgcctcacgggcttcatggccatcagccgggtgctccgccggcacggcgtgccggtttccgtgatcggcgaaatcgaacgggagacctacaaggcgcaattgctcaccgagcctgaggcggagcgccttgcctcagggcgtcaattcatgtcgcccgagaatcaggccttgctgcgcgaacaggcgatagaaagcgcggcggaaagccaccagaaggagtttccggaagattttgtctacgatttcgtcgaaccgggcccgggcgacgagtttgaattcggcatcaattacaaggcttgcggcttttgcaaattcgcggctcgccatggagacaaggaaatcctgccgaacatttgcgggcttgatttcgacgcctatgcgacgcgcggcatccgcctggaaagaacgcagacattggccggcggcgcgagccactgcaattttcgattctcgcggcttcgcccccgtcacgacgtcgctaatgctctgaattgccttccgctttcggcggcgcagcggacgtgaccggacccgctgccggctcgccccagtcgcgaatgacccaaagcggaaatcagtcacctacaaggcggtgactgttcatcgcgcagcaacagcgacggcgacatcgcctctctcgatttgctgatgtctttctggcgtaggttgtcggggctgtatcgtagccgcgcgattgcgtgctgtttttggttacaggtatccgttcagccgcgactggcgctccgtcaggacaccgcgcttaaggatgcggggcgagacaagtcggcgccggagaccttgacgacggcttgccacgcggcttcctggctggcgcgatcgtggaggtgtggctcactctgcacctcgattggacctgagaacttccctttggctgaggcaaagaatagccccgacgcgtcggttccgaactccgatgcctggatgaagcgactggccgctgtctccggcgtctgattcatgccgggaatgaggttcacgattggaatcatcatatacttcaacaacgggccagcgtttcgcgccacgttggtggcgttcgccgcaccgggcgagacagcgtacacggccgtgccggagggtagccggcgtgccagcgcagcgacccaccaagcaacaatgagcttcgcgtcggcatacgcattgttgggcacatacctcacgttcggcccgttgcggatcagggcttcaacagctgcggttttgtcaccccggttgtactcggctgcaaaggcaggcagatcggtgtatttgaacatgggtacgcccccgcgggcaggttctgcacccgcgatgacgatccgggcgtcgggactcagcaagttggcattgagcaacccaacggtcagttgatgatggccaatgagcggggcctgagaagcctcgatgcccgccgcagtgatcacgcgcgccttgccaggaaccataccggcattgagcagtaggaaatcaaccggcctgccttgcttgactagcgcggcgaccgcggagtgaacgttgaccgggtcgttcagatcaagctccagcggcgtgaagaccggccttttggtctccaccgcgagctgagcggccgtatccttgatctgggccaggctgcgcccggtgacaatgacctcgctgtagcccttggcggcgagcaaccgggccgccgcataaccgagcccggacgtggcgccggtgacgagagcgatcgaacgtttcatgggcatctccttgaaagggttggagtcgaaggagccccgagttaaggccgccttgtcatttttgaactatttagttatatattgccgaaccaaaggtcgcagtcaaagatttttgaactatatgtttcagaataccaccaagccacggggacgtccgcgcagcttcaacgagatcgacgcgctgaaaaaggcgacgcaagtgttctggtcgaagggctatgacggcgtgaccatcgacgatctcgtcgccgggatgggcgtgggacggccgagcctgtatgccgtcttcggcgacaagcgggcgatattcttgcgtgtccttaaggcgtatgccgaggcaaagggcgctcgcgctgctaacgcgctccactcgccacagaatcttcacgactcgatcgcgggctttcttaggtatgccgtcgaaagtgcgaccgagaaggggtccgcccggggctgccttcttatttgcgtcgcgccgcttgtggatgatgatgaggtccggaagttcctgcaaaaggcggccgcgggcggcaaggcgctggtgcaagatcgtttccgggacgcgatcagcgcgggcgaaatcccgtccgactttcctgcggccgaacgcgcgatccaagtcacggatattgctcgtggccttaccatgcgtgcgctgataggcacgccgcgcaagacgctcctaaaagacgccgaggaagcagccgatcttgtcctccttgtgcggcatggaagtgcggcgcccgaacgttgaggcttgatggtgcggatatcgatcagatttcatccggcactgattgaacaatgtcggccagcgtcacagagtggattgcgtgtcacttcacttccgcttgtggcccttcgcgtcatttagctgagctgcagaatttggtctgctatcgaggcatagcggactttggcaagccgtgcgttggcagatttatggttcacggcctaagtcaaagagcgcatctccagcgcggctcgcaaccagcctcgatgccatcatgcgatgggccgcaccaccctcgtcagcatcggaaaatgcttgttgccgcccgcgaacggcggaaactggacgaagtcggcgcgcatccgcttgatcacgtcggagcccaacgcgcgcgcaagggcctgcgggctgtcgaacatcagcctgttgcgctgcatgtactcgacccgctgcgacggcaaccgatcgacccaatcgatgcgcgtgtagatctcgatctggcgcacgtccgggaaggtccgcatgatcgacggatgatgctccaaataatgcaagttccaggcattcatgtcgtcggccggcccgggataatgcaccagatagctgcacggcgtcaccgtgccgctcgcatgcgcggcgtcgtcgaccggaaaggcgcgcgtcaccatcgcctggtgcgtcacgtccaatccggcaaggctcggcaacccgcgagccgccgcaagagcagcgagcacgccgccgcgatcgatcgcggcctcgcacgcaaacaggttcggaaagcgtagcaacagcgcaaagaccggcccggccccgtcggccttgtagggatgatcgaccgattgctccagcggcgtgaacagcaggccctccgccatccccggaaccgaccccaccacggcagccgcggccgcgagatcgtccgcatcaattcgccgatcgcctgtcggatcggagaacgtcatgaacagcgagatcatgatgccgccgcctccgcgccggcctgcagatgcgacatgagcgcggcgcgaacgtcgtcgggccacggaatcgcgtgatgatcgaccagcgacgtggccgcgaggatctggcgggcgcgccagcgcaggccatctgcgcccgtgaccacatgcgacagatgcagcgacgcacggccgatcttgacgatgcgcaggccgaatgtcaggcggtcgccgaacttcgacggccgtgaaaagtcgcaagtcagatgcaccgtcggcgtcccgatcttccggatcgtgatcagctccggccagcagaacccgatggtcgaccagaactcctcgaccacgccgttgagaatgttgaggtaggacggaaaataagcgatccccgacggatcacagtcgccgaacctcaactcgcgatcgaacgagaacgacgtcatcagatcgcgacgaccgggtgccggatgacgccaacgccatcgacgccggcctcgacgacgtcgccgggccacagccattcctgcgggctcatgccggcgccgacgccttcgggcgttccggtcgcgatgatgtcgcccggctcgagcgtcatgccggacgagatgtcggcgatcaaagccggaatgtcgaagatcatgtatttggtgttggagtcctgctttatgacgccgttcttggtcagccagagcctgagatcatgcggatcgggaatctcgtccgcggtcacgatgcaggggccgaacggcgcgtaggtgtccatgcccttggagaagatccactgcccggcacggcgattgtcgcgcgcggaaatgtcgatcatgaccgaatagccgaacacgtgatccatcgccttctcgaccgggatgcgggtcgcggtcttgccgatgatgacggcgagctcgacctcccagtcgagctgctgggtcatgccggcattgtgctggatcgccgcgcccggcccgatcacggaggtcggcggcttggagaacacgaccggctgcttcggcagatccttgtcggtatcgagactcttggcggactccgcgacatgcgcccggtagttgagcccgatgccgaagatgttcttgcgcgggcgcgggatcggcgcctgcagcttcacatcctcgatcggaacggctgcaccggccggcaggctgccgttggcgttgtccaggcattgcttcaacgccggcagcagcgtgacggcgttatcgatgaaggacagcatgtcggccggccaggcaacgccgcgtgacgcgccgaggcgcgcgacatcgacgaccaatccgttgacgacgaccccgaggcgggcgccgctggagcccaaggtgtaggtgacaagacgcatgaaagcttgatccggttatgcgggttgagttctgcgcaagaatgtcaggccgcgaccggctgatggccggcattgtcgccataggcctcttcccggtagaggcctagcccctcgatcacgggcagatcgttgaagcagaacaggcaggcgtcctcgctttccgaggcgttgccgtgctcatgccaggcccaggacggaacgcagaagatgtcgcgctcctgccactcgaaccgctgaccgccgatcacggaatagccgtgccccttggcgacctggtagacgaagcttccggtgtggcgatgcgacctggacttctcgcccggccgcagcatctgcatgctggcgccgatggtctgcatcacatggccgccggtgatcggattgacgtagttcatcaggatgccgtcatagggcgatcctccggtcgcggcggcatatttcagcagcgactcgtaggtcggctcccactcatatttgaacatcggcgaatagccgttcgaccagcgcgagcccgccggccgaaggccgggattgccccaggtcttggtcatgtcgtcgaccggatagccggactcctcctgctggatcttcgggtgcacgacgaagaaattggcctccagcgcattgacgagcggaatgtcgagcccatcctgccagatgcagaccgagccgttcgcctcgacgccatgctcatgccaggtgccgttcggcgtcagcacgaaatcccgcgcgccgagcgtcatcttgtggccatcgacaatagtgtaggcgcccgctccttccatgatgaagcgcagcgcagaggccgagtgtgcatgggcggaggccacctcgccggggtgcatgacctgcaagcccgaatagagccagccgaccgcggccgacacatcgcggcgacccggattgttgaggtagatcacgcgccgtcccgccttctccggcgagaccagttccaccgagcgcagcacgtgctcacgcagatcgccgtagcgccagagcacgggaacggacgccgactgcggctgccacggctcgatcttgttggcgaccgtccacagcgcgccggcctcgaacttctcgaggtccttgtagtaggccttgagctccggagtatcctcgacattggcccggccgatgatgttctcgcccatgctgtccgactcctatctcgtgacgtcctgtctcatgcagtcccgtcgccacatccccgctgtcgtcctggcgaaagccaggacccataaccaccgcattcgattgtgaacgggatcgtggccccagcgtcgcacaacgatgagctttcgtggtaatgggtcctggccttcgccaggacgacggtgaggagggttcgcgtgtcgtggtgccgatggaccgacgcgccccatcattccaccctggctggaattgatgtgaagctcgcctggacggcggcggctctaaagcgcggcagcttcagcattggccctaccctgtcgctggctcatcatcgccgtccggagcagacgatccgcaaagtccgacggcactcgcagcgttgacttactttacatgtaaacgtatgctatcgcatatttctggagggtgcaatggctgaacggtcttttgctcgtgaagtcgaggatctccggctcggcgacggcgacaccttccgcggcgaaggcatcctcgccatcaccaaggcgctgctgcaatccggcgtcgcctatgtcggcggctatcagggctcgccgatctcgcatctgatggacgtgctggccgacgccaaggacgtgctcgacgatctcggcgtcgtgttccagagctccgccaatgaagcggcggcggcggcgatgctgtcggcctcggtgatgtatccgctgcgcggtgcggtggcgtggaaatcgacggtcggcaccaatgtcgcctccgatgccctcgccaatctcgcgtccggcggcgtcactggcggcaccatgatcatcgtcggcgaggattacggcgaaggctcctcgatcatgcaggagcgcacccatgcctttgcgatgaaatcgcagatctggctactcgatccgcgccctgaccatgaatgcatcgtcaatctgatcgagaagggctttgagctctcggaagtctcgaacacccctgtcatgctggaggtgcgcgtccgcgcctgccacatgcatggaagctttgcctgcaaggacaatgtcaagccggcccacaccatcaaggacgccctgaacaatccgaagcgcgacgtcggccgcatcgtgctgccgccggcggcctacgagcatgagcaggagaagatcaagacacggctgcccgcggccatcaacttcgtcagggacaacaagctgaatgaatggatggggccgaagcagggcaaggtcggcatcatcatgcagggcgggatgtacaacaacgtcatccgcgcgctgcaatatctcgggctgtcggatgcctatggcaacacccagattccgctttacgtcatgaacgtcacctacccggtgatcgacaccgaggtcgccgagttctgcctcgacaaggacgccgtgctgatcgtcgaggaaggccagccggaatatctggagcaggcgatcaacacggtgctgcgccgccgcgatatccaggcccgcgtccatggcaaggacgtgctgccgatgggcggcgattacaccgcgcaggtgctgctcgggggtatcagagaattcctcgagaagaccgagccgcggctgctcggcaaccggccgccggcgccggacgcgagctccgtgctcagccatcccgaggtcgagaagctgaagcaggtcgtgccggcgcggccgcccgggctttgcaccggctgtccggagcggccgatcttcgccgccatgaagctggtcgagagcgagctcggtgagcaccatgtctccgccgacatcggctgtcatttgttctcgatcctgccgcccttcaacatcggcgcgacgacgatgggcttcggcctcggcccggcctcgacctcggccttcaacgtcaaggccgacaagcgctcgatcgccgtgatgggcgacggcggcttctggcacaacgggctgaccagcggcatcggcaacgccgtgttcaacaagcatgacggcgtgttcgtcatcgtcgacaattactacacctcggcgaccggcggtcaggacatcctgtcgtcgcgcgcggtgagcaagcggcgcaacaccaacaactcgatcgtgcaggccgtgaagggcatcggcggccagtgggtgcggcagatcgatcgcacctacgatgtcggccggatgcgcgacacgctgaaggaggcgctgacgaccagggagcaagggccgaaggtcatcgtcgcctcctccgaatgcatgctgaataagcagcgccgcgtgaagccgcagatcagccaggcgatcaaggacggggttcgcaccgtcaaggaacggttcggcgtcgacgaggatgtctgcaccggcgaccacgcctgcatccgcctctccggctgcccctcgctctcggtcaagcaactcgacgatcccctgcgcgacgatcccgttgcggcaatcgacaattcctgcgtcggctgcggcaattgcggcgaggtcgcggacgcggccgtgctgtgtccctcgttctatcgcgccgacgtcattcacaatccgaccggctgggacaggttcaaatcaaaggtcgcgatggccgtgatcggctggctgcaacggcggcgcgatcgccggcggccggagttcgaggccttggcatgagattttgggcatgagagactgggcatgagagacgaaacggtccagttggcgcttcctgccgcgggtgatgcgaccgagcggccgatctcgatcgcgatcgtcgcgatgggcggccagggcggcggcgtcctcaccgactggatcgtccagctcgccgagaaccatggctgggtcgcgcaatcgacctcggtgcccggcgtcgcccagcgcaccggcgccacgatctactacatcgaggcgatgccgccgctcgacggccgcaagccgatcctgtcgctgatgccgacgcccggcgacgtcgacgtggtgatggcggcggagttcatggaggccggccgctcgatcctgcgcggcctggtgacgccggaccgcaccacgctgatcgcctccaatcaccggacctttgcgatcggcgagaagatcgcgccgggcaacggcatcgccgaccagggcgcagtgatcggcgccatcgggattgccgccaagaccgagatcatcttcgacatgaatgcgctggcgatcgccaacggcagcgtgatctcggccgccatgttcggcgcgcttgcaggcgccggcgtgctgagcttcagccgcgagagctatctcgacgtgatccgcgccggtgagaaaggcgcgcaggccagcatccgcgcgttcgacgcggcctttgaccgggtacagtcgaagtctccggagccgacggcacccccacaatcggaggctgccaagacgccctcctctccggctgctctggatccccgtcttgccggcctcgccgcccggctgacgcaggaactgcccgcggccgcacacgccatcggccgcgccgggctgaagaaagtcgtcgatttccaggacgtcgcctatggcggcgaatatctcgacatcctcggcacgctgcacgccgccgatcgcaacgccggcggcgccgggcgaaattttgccttcacccaggccgccgcaaaatatctcgccaacgccatgacctatgacgacgtcatccgcgtggccgacctcaagacccgatcggcccgccgcgcgcggatcgagggcgagctcgacttgtccggggaccaggtgctgcagaccaccgagttcatgcacccccgcatggaagaggtgatgggcatgctgccggcgggatttggccgctggctcagcgccaggccgcgtctgctcggctggctcgaccgccgcgtcaacaagggacgccgggtcaagacctactcgctgccctggttcgtcgcgctctatgtcgtcggcggactgcgcggcatgcgccgccgctcgctgcgccacgccgtcgagacggcgcaccgggacgaatggctcaaggccgcgacagaggccgtgcaagcgaactatcaattgggcgtcgagatcctgcaatgccggcgcctggtcaagggctattccgacacccacagccgcggcctgtcgaaattcgacaagacgctggccgcgatcaagctggtcgcgccgcgcgacgatgccgccgactgggcgcgccggctgcgcgaagccgcgctgaaggacagcgccggcaaggaactcgacggcgtgatccagaccatcaagagcttcgcatgacgtcgtcggccctcaaggagagcacggctcccatcttcggccaggtcgaaacccggctttggctgcaactgctgtcgctgcatggcgagctgttttcgtcgctgaattccatgctgagctcggagttcggcttgtcgctggcaaaattcgacgtgctggcgcaactcgatcgttacccagatggcctcgcgcttgggcaattgtcgcagaacctgaaagtgtccggtggcaacgtctcgggcctggtgcagcgcctgctggctgatgacctgatcagcaaggaaatgtcgagcgaggaccgccgctcgttcatcgtgcgcctgacgccgaagggcgcggccctgttcaggaaggccgccgacgtgcataagaggcacctgagcgaacggctcgaaggcatcccagcgcgggagctggaggcggcactgtcgatgctgcggtcgctctcctcgaaactcggcagcgaaggcaagaagcagggtcgcaagacataatggccaaagactccaggagcagatggaaatccggtccaccgcggacgcgggaccagctgcaaagctacattccctatctgttcaaccggctcgccaatcgctggaacctggatcagaaccgcgatctcagcgagcacaacatcaacaacgtcgtgttccgcacgctgtcggtgctgttcatctacaagaccctgaccgtcaacgagatcgccgtgctggccgtgaccgagcagtcgaccgcgagccgcatggtcgagtcgatggtgacatcgggcctcgtcaagcgcgagatcgcggaagaagaccagcgccgccgcgtcgtcggattgacggcggacggcgaggccctgctgcgcaagatctggccgatcatggagaacaattacgaccgcctgaccgtcggtatcgaccccgacgagatcgaggtctgcgcccgcgtgctggccaagatggtcgagaacatccgccagaaccagatctgattcaggggccgaggccgacgaggctggtgccgccgcagacatagagcacctggccggtgacgaagtccgagcgctcgtcgaggaagaagctgatcgcatgcgcgacgtcctcgcgggtgccgagccgcccgaccggaacgttgtgcgccatcctgtcctgctgctcggagcctttcgggacgatgccccagaaattgtcggtcaggatcgggcccggcgcgaccacgttgaccgtgatcccactcgacgccagctccagcgcccaggtccgcgccatgccgtgcacgccggccttggtcgccgaataggccgagcgcgtaaccgcgcccatcgcggcgcgcgagctcacgaacacgatccggccgaaccgccgcgaccgcatcccctccatcgccgcctgggtcagtagcatcggtgcgcccaggtgcaactgcgccagcgtcaggatgtcctccggcttcgcatcgggcaaaaggttcggcaggatgatgccggcattgtgcacgaggcagtcgaccgcatgatcccggcagatctcctcggcgatggcccgcgtctccgccaggctggcgaggtccgcgcgataggcggtgagcagaccgtgcgtccacgcgggcttctcgagcccgaccgagaccacccgctgtccttcgccgacgagcttcttcgccagtgcctccccgatcccggaattgcctccggtgatcaatgtggtgcgggtctggctcatgatcggctccctgccatgcgtcattcctgccgccgcttgaggtcgcgaaggtcgaagaacgcgccctcgcgcatcagcttcgcgacgacatccttcaatccgccgcgctggatcttctcggtcgcggtcagcggcagttcttcgacgaaacagatccagcccggcgccttgtaataggccatctgctccaggctccagcgcacgatctcctcggcgagtgcgcggtccgcgcccggctgctccgcgatgatgaccgccgcgacctcgtcgccgcgcacctggtcgggcgtcgcggcgaccgcggcctgtcggatcgcgggaagacggttgagaacggattcgacctcgaccgcggcaatgttctcgccggagcggcggatcacgttcttcttgcgatcgacgaaatgcagatcgccatccgcatcgcgcgacacgatatcgccggtatgcagccagccgccctgccaggcctcggcggtggcctccgggttcttcaggtactccctgaagaagccgtagcggggatcggcccctgcccgccgcaccaggagctcgcccggcgctcccaccgccgcatcgttgtcgccgtcgtcgacgatccgcacctcgacctcgggcgccggccggccgaaacagctggtgccgaccttgcgcggctcggcattggcggcgatcacgccgccgcttccggtctcggtcatcgcccaggcctcgagcagcgggaagccgaagcgttcctcgaacggcgcgtgcagcagcttgtcgacgccggcgccgaagccgaaccgtacggtgtgcgcgcgatcttcattgctcggcggcgcgctcatcagcatcgagggcatgacgccgagataatgcaggcaggtcgcccggctgtcgcgcaccgattgccaccagctgcgtggatggaagcggtcgagcatcgtcaggctgccgccgaccgacagcatcgccatgaccgacaccgccatcgcattcatgtggaacagcggcaacggcgtgatcatgcgctcgccgtcgcgcccgagatcgatcagcccaccgacgtcgcgataccagtctccggaatacaggaaataggtgttggtgagcacgcagcccttgggctggcccgtcgtccccgacgtatagagcagcgcgcattggctcgcgccgtcgccggcgttcgccggccgcgcgccgccgaacggggccggaacatcgccgtcatccgtcacaaccggaatcggccggccggcctggcgcgccgcggtctcgacctcctcgcgccgtttggcgaggacgaaggcggcattcatctcggaatgcgcgatgatgtattcgagctcgctgacccgcagatcggggttgatcggcaccacggagacgccgagcgcgttcaacgcgaaccacagctcgatgaagaccggccggttctgcagcagaagcccgacccgatggcccgcaccatagccgcggctcgcaaacgccgcgcgccagcgctcgacccgctcgagcatggcgccatacgaaatctcttcggccgcgatgccgtagatgtccgcggtctcgggcagcacgttgagaaaaccggcttcgccgcggcggagcgcggtctcgcggaagcgggcatagactgtggtcgctgtggtcaagacgcactcacatgaaaagctggatattgccgaacggcgcgtcgaaattcacgagatcgatgcgcttgagcctgatcttgaggccgtcgccgatttgcacgagatcgtgcgacgcccatcccgaaaagcgttccagcgcgtcgccgcgcgtctcagtgtagagaaaggacgtccgtgccttgaacaagccggccgccggatcgcaggccacgatctgcggcgcctgcagcagatgatggcagcggctcttcggcttctgactgaaggtgcgctcgccggccagccgctcgatacgcactttcatcagcagcaggtcttcgtacatcagcgagggctgcaacacaggatcctgctgctgccattccagcggcatccagtagcgcccctcggggtgaaacaggtcgagccaggcctgccactgcatcgtgtcgagcagctcggcttcccgatagatgaaatcggtgatggtctgttcgctgatcattccgcggcctcaacgggctcgaccatgtccatggtcatgaacttggcccaggcatgaaactggttccgcatctggcgctccgacgtgccgttgatgaccgcggtgacatcagcctcctcgccgctctcgtagagccggcgcagattgacccactgattgccgttggttttcaacccttcctgcgcgcgctcatacatttcgagatcgtcgtgcccgacgatcgaggtcggcgcgttgatgaagcggttgtacatcagcgcgcgctcgtagagcttgtcgggcgcgccgaccaggcgatagacccagctctcgaccagcgtccggtccactgcgatcgggatgaagttgcgcaggatttgcaccgcgcccttgaccatgatgttcgggaaatagaccgtgttgtgccggacctcgccgagaatctcgtgggcccgcttctcgccataggccgcgaccatctgtccgagatagccctcgatgtcagaatagttcgaatggatggagttggcgacgccggtatggccatggccgttgggccagatccggatgccgctctgctcgtagaactcgtacgggctcatgaacggcccatagagctgcaccgccatcggcgtttccttggagtcgccttgctcgcgctgccagaccttgatggcggtgccggccgaactctcatgcgccaccatcggatggcaggtgtcggtctggttctcgaccagcatcttccaattgcaggtgtgcatgtagcggatcggcgcggcctcgacggcgagcttcccctccggcgagcggtcgaccatgttgtcgatggtcgagaggctttcgccgaaatagtcttcgaaggcgacgccggtttcgctcaggcgtgcgaaaatgaaatcgcggtagacgacgacattcctgatccgcgacagcccgtcattcgcctttgtgtcggtgaagccggtgccctcgtagcccttcttcagcgggatcgccagcagcgagccgtcggtcttgaacgaccaggcatgataggggcagcggaagaactttccggtgttgccgcacggctcggaggcgatcttgacgcccttgtgcggacagcgattgtagaacaggtggatcgagccgtcggtatggcggctcgccaccaccggctgccggccgacattggcggtgatgaaatcgcccgccttcgaaagctggctgccatgcccgacatagatccagctgttgggaaacagatgctccatctcgagatcgaagatctcgggatcgacatagacgtcgcgatgcacctcggcctcgcgcaccagcccgccgatcgcgcgggcattctttccgtatttcgtcatggcgccccttgcctccgctcagagatccaacaccagccgttccgatttcgcacgcgacacgcaaatctgcatgaccttgttggacgctttctcgtcgtcgctgagaatgacgtcgcgatgatcgggcacgcccgcgatcacgccgcactggcagatgccgcaatcaccgcgctggcagtcgtagagcacgtcgaacccggccgcttccagcgcctggatgatgctctgatcggccgcgaccgtcacgacctgcccggtcgacctgagctcgacctcgaacggtgcgttcgggatgccgggctgctgcgccttgaacagctcgaaatggatgcggtctgccggaatgcccctggcgagggccgccgccttcaccgcgtcaatcaggccggccggtccgcagacatagacatgagcgtccgccggcgcatcgccaagcgctgccgggatatcgagacgggactcgtcgctgtcgtagtgaaccgccaaaccgtctgaacacatcgcctgcaattgcggcaggaacgccagcaaccccggcattcgcccagcataatgcaggcgatagcgcgttccctgcgccttcagctcggccgccatcgataggatcggcgtgatgccgatgccgccggcaaacagcaacgccggtgcggttccctcatgaagcgcgaaattgttgaccggcgcggtcgcgctgacgacgtcgccgacctgaagggcatgcatgaactgcgacccaccggtcgacgcctcttcgcgcagcacccccagcgcaacggcgcccgtgggcaagtccggcagcgccatcagcgaatacggccggtctcctccgcccggcagcaacacgcggatgtgggcgcccgcttgccattgcggcacggcaccgccctccacgccgaacacaacgctgcgaatgaccggcgtctccgcaacgaccgactgcactctgagcttcagcggatgcgcgtccattcgggcatctcatattatatgaatttgcatatttttatacatgtaataattggctgtcaatcgtcagaatcccgatcttgccgtaggggcgcgcggcttgagggcgtgatccgccacggacggcaagccggccgccgaccgtgcgggttatcgcaccgcgggccggcaaaccggccgagttggagactgtcgaagtcgaggccggtcgtccaccaaggcgatcgaccatgcgtgccggcacgtcgtggacgccgccgactttgtaatttggagaatgggagtggacgcgcgaattccggatgaatatcgcttccgcttttccgacaagcacgcttcgaaaggctgacattcattgcattgacgtgtcagcagtcagcgcaccgccgatcacccagaaccgaggcagcgctcggaccatccacccagcagtacgacaaaggaggccatcggcgtggaggctgtagtcagtcggacctcacatcatcttgcaccggacgacctgaaacctactgctcagaagaattacttagaaagacccttagggacacctcggacggaagccgtattttcctcccctgtccgcgaacccggcctccggctcgcttaggttggcacagcttgttttcgcacccagactctatctggaggtcgccacatgacgcaagaccacgtctggtatgtctccttcgttgatcaacgcgacgctccacccgacaggaatgcgcgcaggactgcgactttcaaatccgaacaggaagcaaagcagttcaccaggacgttggcgcaggaccaccgtgtcaagagcctttcggccggaacaatcaacccgcaccagccaaaacgcgtcgtcggatcaagagaaatcggccggtggctcggcgacatctaggaccgccacgccgcagacgtcacctgggatgtcaggttgattgatcagctaatttagacacctgttgggtcagaagccctgctgtaggcagtgcgaacccgcgtcaggctcacgacatggaggcgaccacctccagcatcacctccgtcgcgcccccggcaatggagaggacgcgggcgtcgcgcgatatgcgctcaatcgcactctcccgcatgacgcccatggctccgtggaactggacgcacgcatacgccacctcgttgacgagctcgccgcagatggccttcaacatcgatatctcacgcaggcaatcgtcgtccgccgccatgcgccaagcggtggcatagagaaacgcgcgacttgcctctaccttcgcagaaagcatcgcaagacgatgacggatcgcctgcatgtcccaaaggacactcccgaacgcgcggcgcgttttcaggtatgtgagggtcatgtcgatcgccgcctcggccatcccgatcgccagtgcggcaaggacaaggcgctcgttctgcaagttgcgcatgatggagtagaagccttgtccctccgcgccgagcacgttctcggcaggaatgcggcaaccgtcgaagacgagctcggccgtatcggaggagcgccagccgagcttgtccagctcgcgagctacgctgaagcctggcgtgcccttctcgacgaggaacatcgtgatcccgttgctacctgccgagggatcagtcgtggcggcaacacagtagaggtccgcatagacgccgttcgtgatgtacagctttgtgccatcgagcacgtaggagtcgccgtctcggcgcgcgcgggtgcggatggccttcacgtccgagcctgcgtccggctccgtgattgcaatcgcggtgatgacctcaccgctcacaatgcccggcatccagcgagcccgttgggattttgtcccatcgtgaaagacgtaactggaagccatatcggcatggaccagcattgcgtctgcggcgccgccaaaggtcgagcgcccaagttcctctgcgaagaccgtcgatgcgaccgcgtccatctcggcgccaccgtactcggcgggatagcggataccaaagaagccaagttcgcccatgcggcgcaggaccggacgcggaacgccgccctcctcttcccagcgatctgcacagggcttgatttcctcctcgacaaagcgccggacctggtcccgtaagagctcatattccgccgccgcccaaggcagctccggtccttgcgccgctacccaagctttgtccatcatcttagcccgctccgctatcagtccaacgctcgaggtccgagccgcatcggcgcgcttaagaccattgcggcccatccaatcgatcaaagcgcgatgagatcaggttgaaccgtcatcgcgctttggattcttgcttaggcatgatcttttcggaaaaccgcttcgcacttttccggatcatgccttagagttcgatttcctcgcgcggcccgcccgaaagtgaagaagccctggaatcggccacccagcgcatcccgtcgatcacttccgccagttcggccacggtcgggcgctcgaacaggttgcgaagctgcacgtcgacgccgaacatctttcgcatgcgcgccaccgctctcacgaccaggagggactccccgcccaggtcgaagaagttgtcgtgacgtccaatcgacttgaccttgagcagactgcaccacagggcggcgagagtcttctcggtctctgttgacggggcagcgaactcgtgtgccggctgaatgctgtccgccgtcggctcgggaagcgaggagcggtcgatcttgccgttggacgtgagcggcatccgctcgaggcagacaaagtgcgtcggaatcatggactccaggagttcttcggcaaggtaggcgcgcagctccgccaccgtcagaggcttcgaggagacatagtaggctacaagtcgggtgattgcgccttcttcggtattttccaccggagtggagatggcaacgacggcacaatcctgaacgtgaggctgcttgagaagccgcgcttcgatctcgcccagctcgatccgcgtgccaccgaccttcacctgatgatccgcgcggccgagaaattccaagcgcccttccgcgttccagcgggcaagatcgccggtcttgtacagccgtagcctcgaaaagccatctctgggatctgtagccgtgcggaaacgctcctcggtcagatccgggcgattaaagtaacctctcgcgagaccatcaccggcgatgaacatctcaccgacgacgttggggccggtcggctgatattccttgttgaggacgtaaattcccgcattggcggccggaacgccaatcggcaccgatgcggagcgatcccggtccacgtcaaaccgatgaatcatgcagcccactgtggcttcggttggtccgtactcgttgtagatctcaacgggatgagggatcgctttcgtgatatcgcgagccaactcggtcttgaagtcctcgccgcctacgatgaacttgcgtagtctcgtggcctcaagattgcgatcgcggatcatggcgagatgcgccggtgtcagcttgatgatatcgacggcattgtcgtcgaccaccttgagcacgaccatgttcttcacgcccggatcgccaagatagaccacgatccggccgcccgtgatgagcggcgcaaagagggtcgtgacggtcagatcgaaagcaagagatgagaaaagtggccaagcgagcggttggcctgaactgtacacccgcgcggcccaccagatgtagttcacgaggctgcggtgctcgatttcgacgcccttgggagtgccggtcgagcctgaggtgaagatgatgtaggcgacgccgtccgacgtggcggcggacggccgggccgaggccggctgattcaaaatcgagccgaaatcggcatcgagcacgaaaacatcggcaagattcggcgagatggcagattgcagatgcgcctgagtgatcgccaccggcgtctgcccgccggtcccgctggaaatgtccttcaggattgtagctatacgcccgttcggcgtcgctgcatcaatcggcacataggctgcacccgccttgagaacgcccaggatcgcgacaacgacttcgatggagtgttccatgaagacaacaatgatccgacccggccccgcaccctttgaggccagatgcgcggccatctggttggagcgttcgtcgagctgccggtatgtcagcattgcatcgccgaagcggatcgcttcggcatcgggactgagcgtcacttgatcatggaagagatcgatgattgtcctgtccgatgggtagcgcgccgaggtggcgttgtactcgacgaccagcgcccgatgatcggcatcttggagaggaggaagcgccacgctctccgccacgatcggtaggacttcattcatgaaatgtgctcccatcccgcaagtttggaaaacggatcacgtcaatctccgagcttccgagttgcccggcgatagagctctgcgacggcaggagcgtcaggctcttccagcatggagacttcgtcgcagtcgtcggggccgaaataaaattcggcatcgggcgccacgagccgccatcgatgaggcgctgcgcccgatcgcaaccaggccttgttcggaaggaatatgcagactcgacctgagtacggtgtgggagtgtatcgccgaaatgccgccatcgccgtggatttgagcagagctctgctggccagcaccggatccgtcgtgacaggctccttgcgaaccaggggcacgagggcgcgctcgcgaaggcgactgccgaaatatcggagacgagcgccaaatgtcggcaacttcgcactcgatctccggaccgatcggatcgtcccccaggcagtgaagtacagcaagcgcagccattcctgatgggtgacggggtgaagaggaccaaagagagcgacccacgaaacttccgctccgcgttctgcgaggattttggccaactcgaaggctgttggaccgccggagcagtatccagcgatgatgtacggaccgaccggctgatgctgaacgatctggcgagcgaagtactcggcaatatcttcgacgcggtccatcggctcgctctgcccgtcgaagccaggcggttgaagtgcgtagaacggttgatcgccgcccaggtgcttcgacaggtccgagaacgagaagggtgcgccgacatgccccggcacagcgtagatcggtgtgcgtgttccgcgcggctgcaagggaatgattgcaggctgttgcgtggccgcggcggtggccatgttcagaaaggcgataatctcacccttgcgccccttcaattgatcgcgaagctccgccgtcatcgcgccagccggggcgctgcaccgcagccgatcgccctcgacccagaccttgatgtccttgaccgcgaggtctgcgagcagttccgaaaactgcgtcacgtgcgcttgcataggctattcccgtgttctcgactgggaccgcgaggtatctcgaacaatcgtggttgggttgagctggcgtactctccaacaattggtcgagccgctcgctatcctcggtgaatgattacatcgcggaaactccggtccgaacgaccattcatttccggacaaccacacacccgagataccccgttttaggtacgaagcttcggacaacccaatcctcctcgtccgaagagccggggtatcccaagccgaatcccaggcccttggagatagcctccagccgggtccagcgccggaagaagccttccagccggtcgtccgggccgagggcggcataagactcgtagtcggaggcggaaaagcacagcgcggctatatcgtccgcttcggggatggggagaactgcctcgatgtccactccgacctcctgcccggtcgagagggcgatcaccgccacgtcttgggatcgagagacgctgaagcgcaggttgcgagaaggcatgcggtgtgagaggtgaggcttaccctgctgtccatattccagttcgacatcggacggcgagattcccagtctggaagcgaggatccggcgcagctgtccgcgggaagcaacaaatcggcggcgctgccggtccgacttcaatcgctccgcgcgccgacgttccgcttcgctgaggaagacgtccatgtcgtcaatgacagcctgctccacatcgagctcgtatgcgacaacctccaaaccatcatcttcgagaaccgggatcgtgatctcggccttcggctcgactgccctatcgaaaagggtcggaaagaacggtgcttgctcaacacgggcctgactggcgccgaatccggcgagctgcagcgatcgagaccccgaccgaggaccaccgtccctgcccgcgcgagaaaatcggatgaggtcgagctcgggacagcagtcagacgtcatacgtggattccgatcggaggagcgctcatgcgcatcggagcattcattctggagcagcgcccattgacgcggatttcctcgattaagcaatcacgtaagcgcgaaaacaaggaggcgtgttggctatttagatgtatgaatgggctacatcaaaagacctaggcacgctgacattcgtcagctttagcttcccgcctgactgttccgctgatcgagttcgcgcactgtctcgccagggcaaatcaccctcgagacgcttcccgtcacggcgcgaccaatacactgcgcacccgagcgtcgcgtcggttgatattgtcctcggtccaaggcttgcgcgttaatcggttggggggccgcctggcgcagcggatgagacagcgagcgccgcgagagttgtcctgttaccgatctcaagcttgcgaaaaatgtggtggagatgaaccttgattgtgccgtcagttaccttcaaacgacggccaatctccttgtttgataatccctccgataccaggcgcatgatctgacgctcgcggtccgtcagcgcggcaaggtgcctttccgcgatcgcgggctgcccggaagggatggctaccttgctcgagggtgcacgcagcattctctggccgtccgcgacctgccgcaatgtctgcagaagagcttgaggctcctcgtcatgccggatcacgccaaaggcgcccacttccgccatcatggtgaggtcgcgatcctcaacggacgttgcgaggaacacgagccgaacagctggggtccgggaatttgcgatatcgagcaaagcctgcccaaaaatgtcaggcatcgatatgtccaaaatggcaatgtcgggtacaagggcccgaattgccttgaaacagctcgcgctatcggtgcatcgagctgcaaccccgaagtcacgttctgcttctagcaggcagttcagacccaacaaaaaaactggatatctgctagcaattaccacacgactgaaatgcatttttggccaatcctcagtccctccagttcggctcggcgcgcccggcaatatcactcgcaggctattttgatcggggctttgcagcaggatcttgttgtcgcgagcacgccgaatttacgatccggagttccatgcaatcttaaatcgtatcaaaatctatctcactcaaagcgaatgccgttcgacgagtgtgcgaaaaatcacgcccgtcaaaatacgggcttcaatacgccggacgacataacatctataaccaatagtatatagggatattggggattagcatttaatattagtcaatcttttgacgcatgctcagggcttttttcgccccagattttggtcgagcgaccggaacctgaagaagcaatttcaatgcgtcgccgttttggcttggcaagccaatgaagaagcgagtcgggttaaccgacgagcctattgtgtatttttttgcgtccaggagagttccatgagacgacaatattcttttcctattgttcttggtggtgaaaatagtcttcggaaggaaggtctcgctagaattctgaattccgaaaattttcaagtgtttccctcaatagccgatgtgggcgatttgcctggcaaagagaatgtcggggatgctccggtctgtccggcgctgttcctgcttgttcacagcggcggcgatttcggcgctgcgatcgagcaaatcgagtgtttcaagcgcagtcacgcggacggacgcgttgccgttgtcacagatcactattgtctgagcgacttgacggctgcattccgggccggcgccaccggctatttcatcgatgtgatgaactgcgatgcattcatcaagtccatcgagctggtcatgatgggcgggacagtgtttccgaccgacttcctggcgtcggctctcgatgtcgaaaggcgcgatgcggacgatgcctttgcacgcgtcgacgatagtgatgccgtcgcaaactccgatagcaggctcgcacaacagctttcgccgcgagaaatctcaattctccagtgcctgatcgagggcgattccaacaagtgcatcgcacgcaagatcaatatcgctgaagccacggtgaaggttcacatcaaggcgatccttcgcaagattcgtgttcaaaacagaacacaggcggcgatctgggggttgaaccatcgacccgcaacctggccaaccaacaggacggcgcacccgaccgccgacgcaaccgagcgcctcctcccaccgaagagagagcttcctaaaatcgcgaggacaggccggcgcgggccgctcggtgcaatcgaccatacggtaaactacttcgaagtgcctctcacaaacggtcacgtccgcaacgatattggctcgaaggccgatggcgcgatccgactgcgaaaatagccgttaatctggttgctcagcgggacgctcggccggatctcgagctggaagctgtgccatcttgacgggtgcggtgccatcacacacggcggtcagtgccatcggtgctggccgcacgacttgcggccattgcgaaggcttgccggaatgattttcgcccgcggtgcgaattgaccgcgcagatgcggaatggaatcagaatgatcctgttgaccggaggtgccggctatatcgggtcccatatcgcggtcgccctgctcgattccgggctggatgtcgttgcggtcgacaatctctgcaacagcaatcgcgcatctctcgatcgagtacagaccatctgcgggcgatcgctcgtgttccggcatgtcgatatctgcaatgaggaggcgatctacgagatcctgcgcacgcacggcgtgaccgcggtcattcacctcgccgggctcaaggcggtcggcgagtccagcactcaacccatgacgtattacgaaaacaacgtcgtcgggacgatgcggctggtgtcggcgatgtcgcgcgccgatgtgaaaacgctggtcttcagttcgtccgcaacggtttacggcacgcccgcgtacctgccgctggacgagaagcatcctgtaggagccataaatccgtacggccgcaccaagtattttgtcgaagagatattgagagatctccatggatccgacggcgactggcggatcgccatcctgcgctacttcaatccggttggcgcgcacgaaagcggacttatcggagaagatcctctcggcgtacccaacaacttgttgccacttgtggcgcaagtggccatcgggcgacgtgagaagctgcacgtttggggaaatgactacgatactccggatggcaccggcatccgcgacttcattcatgtcgtcgatcttgcatccggacatctgagcgccttgagcgagctgaaacagcccggcgttctgaccgtcaatctcggaacaggaaacggcagcagtgtcctggaggtcgtcaaaacctttgaggccgtgagcggccgtccggttccgtatgtgattgaccaacgcagggtcggtgatgtcgcaacctgctacgcggacccgacgctcgcaaagaatctgctgggttggacatccaagcgatcgctcacccaaatgtgtgcagatcattggcgctggcaagcgcagaatccgagtggctatcgcagcagctagacggcgagagccaaccagcgggtcagccagagttcggtaggtctccgcctcctcctggcgcgttgcagcgactggtaggccgcgggtcccgtgcgagccgcggcgcgcggtcagcggccctggttggggaaacccggtcaccggtcctgtcgaaggactgaccggccgtcgccggccccttacggaggtcgccagtggccgcaaacaaagtgttcgggaagtgcccgtccggtagcaaaatgagccagcgaccgccgcaggcgcggctatgcccttctgacgatcggcccgagccataacctgcttcttgatcgggctaagaatgagctttttcgcaaacgcgaaatcaatcccgcatgtttggcgacgcaaaccatgagcgcgtcaagggaaagtgagtcattttgaattccgccgtgtctcgatgggttcgcaagtgacgctgcaagaccacgccgcaccggtgaagcgattgatgacgattgcggtgctgaggcccgaactcgacaccgaatagatgccgccgctcagaagccccgcgatggcgagcgcaagcgcgatgatagtcaaccgacccacagggctctccagcaatgctcacaggtctcaaggtcaacagcgaggtttgaccgctttcgggaagttttgctggacctaatatgcggtactcattttggtaatcgaagatctgcgctgaacacgtccaacaacgcggcacgacggcgctcgaaaaagttgccggcaaacgttgtgctcccagccctcggcgagcacgctcgcctctctatagctgcgtcgagcatcagatcgccggactcgatatcgcaatatactcgaagcggtctcccggatgaccggagctacgtcgagaagatcaacgaccaatgctttgccaggacaacgtgcgaccggccgactatcgcggcggctcgcagttcgcggaagatcacgcctggctccaaagccatgagcgcggattttgcatgcgaatccgtcacaccgaataccgcctgctcgcccaggctgtcgtgcagggaggccaggcctgacgaggacaggcctgacgaggacaggcctggcccggacgaaccccgcgcggcccgggagcgctttagctctgaggcttggtcaggaccgggttctgcgtccaagccgagccactcatggcaactgcaatcatgccgccatcgcccccaccggagctaccggccagatactggttcagcagcgcaaagctgttgtctgcctgagacgcggcggccgtgccctgatctccccaccaagtgggcacctgcggcgcggcggtggccagcgtgctggtgtcaaatccaaaacgcgaaaaatccagccctgcccaacttcctgtgtctggggcagccgcttgcggcgaccaactggacggcgatgtcggcgccagtcccatggcgagtcccatggcgcctcccatggcgcccaggacactcgggtcggtcgttgtggcggtcgccgccggggcgactgtcgcggccgccggcgaagtggtgtcctgtgtacccgtctgcgagacgatggtcgggctggtgaccgtagttggggtggtgaccgtggtcgtggtggtcgtggtggtcgggtcagtcggcgtggtcggcagcgtcggcggcgacgacgacgaggcagtggccgccgcccccgtcactagcgtcatgtttcggtaatcgacggcaacggtctcgggtgccgtcaaatacccgccaccggtgttcgagacatcggcctggatctgaatgttgttatacacgcccgcctgaatcggattggggtcggtccagagcgtgagcatctgcacgttgccggcgccattgctgggatcgagaccaggggcgacatatctggcgacaacctgtagatgattgccatccagctggatcgcgaacggcggcgaggtgcccacaccactggcattgtcatcattgtgcatttgccnnnnnnnnnnnnnnnntgtaatccacgacctgggtcccgttgatcgagaccttcaaatacccgccaccggtgttcgagacatcggcctggatctgaacgttgttatacacgcccgcctgaatcggattggggtcggtccagagcgtgagcatctgcactccgtagctgtcaccaccgatattgaaccttgtcatcggtgcggaagaaaacgatgtgattgtcccggtcgtatccaattcaggcctccatcggtcgcagagattgcttctctttgacgcttacaagggaatttacggccgcggcgcgaaggcgcgcgacataccacgcactcgcaacgccttgcgccacgagcggatttcgatgcctcacaggatctactgcgtgcacattccgatgcagtgcgaatcgcccatccccaactgcagagcccgctggttaatcagggagtatggcaaaaaagagttacccagcttggctgtagtttgaagcgtccaaacaacagcgcctggagcatatgcttgccgtcgctgtcgaattcagcgccgtcgccgtaggggcgcaaaaaagttttcaaccgatagcgtcaatgttggcgctcgccatcacgaatgatcgaggtcgcgcggcaagcaacgcagcgatcgagtacggagaattacggataacggagcggtcgcgaactgcgcccattgaggcaatcaactcgatcgctgccgtggacaggttctcctacgtcaagatcatcctcgacacccatgagcgccgcgcgaggattcttgaatggccgcggacaccgattgggcatgcaccgatctcatacggcgcactgacgctttcggtgggcacattttcaacgggccaccaagctgtctgcaccatcagctgctgaaccgaacaagcttcagccgtcggcgcccgaccgcacagcgacccctggcaatttcacccagggcgcgcgcacgcctctcgaggaagtcgagaggacacgatgacgcaaccctggaaggattaatccgccttcctccttgatggtcgtccgtggctccagcactgtcagcacggaagaaactggcaggagtcatgtgcgggatttttggctgggtactccggggagagcaccggcaagactacgacactcttgtccgcctcaccaacctgatgaagcataggggccctgacggcgcgggttaccggcagagcgacactgccgaccagcgctatcaagtcagcttggggcacaggcgtctctcgatcatcgatctcgagggcggagcccagccgatgtggagcgccgacggctcgatcgggctcgtcttcaacggagagctctataactacatcgagctgcgcgaggagcttaactcgctcggtcacacctttcgcacatcctccgataccgaagttctgatcgaagcctaccgcgcttggggggtcgattcgatcaaacgcttccgcggcatgttcgctttcggattgtgggatgcgagggcccaacagctcgtcctggcgcgcgacccgttcggcaagaagccgctgttcatagccgagaacgcaggcctattgttcgcatcggagatcgagccgctcctccaattcccgggcatgaatacctcgatcgacccgcatgccgtcgagcattatctcctcaatcgatatgtgcccggccccaggacattctttcaagccgtgcgcaagcttccccccggctgccacctggtatggcgcgaaggccggacaaacatcacccggtatttcataccaccgctagcgtcggcagagcccgacatcacggacttcaacgaggcagtccggatgttcaaggcgacgttcgacgatgccgtgcgcattcgcatgcgcagtgacgttgcgttcggagcctacttgtccggcggcatcgactcatctgcggttgtcgcggccatggtccgccatagctctgagcgcgtgcgcaccttctcagtcggctttcgtgaagccagctactcggagcttgatcacgcccgtaccatcgcccgtcaatttgacaccgatcacgaggaaatcgtgctggagccgcacgacttcttgaagagctggccgaccgcaattctgcgtcgcggcgcacctgcggccgaaccggccgatattccggttatgatgctgtcgcatatggcggcgagcaaggtgaaaatggtccttaccggagaaggcgcagacgaacttctgggcggctatcccaagcaccgtgccgaacaatggatcgagctctaccagcgactggttccccaggcgattcatgaccgcatcatatcgcccgcaatgcgcgcgctgccgtacgatatgcgccgcgccaagatcgtgacgaccgcggcgggcgagcgggattggccgagccggatgcaactctggttcggcggagtttcccttggcgaaaggaaccggattatcggacgtcccctgcccgtagcgctgccggattcccatccgttttcgatcggcatcgggtcgaatgtgcggcgcacgctgttcttcgatcagacgtcgtggttacccgacaacctcctcgaacgcgctgaccgaatgatgatggcaggttcaattgagggcaggatgccgttcatggacaccagtctcgccaaacttgtcgcgcggtttccggacaatttcctggtcggtcgcagcggcggcaagtcagtcctgcgagcagcgatgcagcacactcttccaccggggattctgacgcgcaagaagatcggctttcgcgtgccaattgaggagtggtttcgcggtccctatcgcgaatttatctccgatctgctggtcagtgatggcgcgcgtgtggcatcgttctgcaacagggatgtcttgcggcagctggtcaacgagcatctcgcccgccgtcaaaaccacgaaaaggtgctttggtctctggcaaacctggagctattcctgcgagccttcaggccgtcaagtctggaaactcgagcgaggcattccgttcgggagccgatttgaacgcccccggaaaaccggtccaaacgatcaatcgactacatcgctcgtagtcccaccttgccatgtcgcgcgcgctctcctgcccgccagtttccggtaaaggcagagatacgcgctacacatcgcgtccagcgagaattccgtctcgacgcgccggcgtcctgcggcacccaattgatcggcgagttcagcgttgccgaggagttcgagcacgcgatcggtcaaggcgccgacgtcatggctcggcacaagatatccggtctgaccgtccaggaccaattcagaagtgcccccatcgtttgttgccacaaccggcttacccaacgccatgcattcggttatcgcgttggaaattccctctccgtgtaaacggctattggtggtgagaacaccaacagtgaagagattggcaatgctctcgacgtcgttccgccgccccagaagcttgatgcgcagcgaatgttcagtcgggatgctatcgcgcacccgctgcagcgtttcaccgctaccgatggccaagaaggtgacgtcgtcccttagatcgcagacccggcgtgccatctcgacgaaggtttcatagtcctttctgggcgtgaagttggcgaccatcccgacaatgtggggcgtcacaatctccagagtgctgcgaagctcggtcttatcctttaggccggacaccctttcaggactgaatccgttgtagatgcagagacctttgcgctcgggaataccgtaggcagccagccccgcacgagaattggcaacaacgacgtccgaaaacgggatcgtcagcttgactctcaggtagccttttctccacagcgacatatgcgagggcgcgtctcgcacaaacccatttacgaaggccgtaccgcacaccttggcaaccggcgtcgcatagacggagctcatcgagccccacgagtggatgatatctatcttcaggtcggagacgagctcgtacaacgtcttgaaaaggcgccaatccttcttgcctctccgattgagctgaatgacttccgcgtgttcgcggtcaatctcgaggttaacctcgtcctggtccacaacagctacgaatgaccttacgtcacggtgagcggcaagccccttcagcagttctacgacttgtcgttctttccctcccggggcaagacgttcgataacatgcagtatgcgcatctcagcgccctctcgagtgaactgcttcagtccacctcgcggtgagtgattcagcgctacattcaacgttgggaccccagcagcatgtgagcggccgactggacgccgctgatccgcgcctcgaacctggccgtcgtatcgaattgccccccgacgccgagacgaggaagcgcaaaatgatctgacttgagaccagacaactgcccgtgccgggttgtcactgcggttgaaaacccgatgtcccttgcaagctgcgcttccctggggccacatgctttggagtcaccgtagggataagcaaagtgccgcaccggacgctgcagcaatcgctccagataggagcggttatctgccatttcggcccgtgcggactgaatatccaggcacgatagggcggcatgcgagtcagtgtgcccgccaatcgacacgagaggatgccgcgccaggctttgaagctcgcgctcatccagaaagtacgcctcattcagggccgacaatgacaagcccgccttgctgaacgtcggggcaagcattgcgatccggcgataatcttgatgaatccaatccgtaacctcattcagacccgacatcttttcgcgcaaccgggggcaatggaatcgcatgtccatcgcgtcgatcgtcactgtgtctccagaacgaaacatttcgcgcaaacccagccaccacgcctgcaacgtccgtttcagagcgccagtgggaacgtagatcgtgaacggagcgttgtatcgctccagaattggaagcgcggtcacgacattgtctcgatagccatcgtcaaaggtaagcaccgcatagcggcccgtcccggcattcgtagccaaccgctcgatgcatgcttcaagactgacaatctcccatccttcttgccgcagccaattgagcgaatattcaaagaggccgactgacgtccctgtcatcaattccgagcggctatcttgctggatctcgtggaacatgacgatagccgcccggcccgcaaagatcttgcggaaggccggcaacaggccggaccgacgggccatttcgatcatgctgtccgcaagagcctgcttcactctaactcaccgtaaaagcgggactggcgcctctccgctagccgaaaccatgccgcttgcgacggcgctttctccacgacgcccattgctatcctccgctccgcagcaaacgccggcctacccctcttgccctgaagttcgagaggacgtcggtgtataccccgacaattcgttccacggtcagcgcctggtcgtatttcgccaccgccgcacgcccctgaaactcgccgttctgcgaccagtcaaacgccgctcgaaggctgcgcgctatcgtggcggcatccggtggacatatccacgttcccgcgatgccatttaactgttcgtggacgtcaccgaccctggtcgacaccaccggaagattgcacgcaagagcttccttgattgaagtcggtgacccttcatagtctgagctcagaagcagggcgtttgccccgctgtagtaccagggcatctcttcgttcggcacgttgatgaccgtcatcaactccgcgtcgacgccattctgcaccagccggtcgaccgacgcccgcgccagatcatatctcttctcagggcgtgtcggatcaaacggaaacaggacgataaatttgtctttaggccatcgcagccgcgcgcgcgcttcgtcgcgatcgtacggcttgaatgcgccaaggttgaccccgcagggaatcacgattccgggaatccgcttccgcatctcctcagacacgacgataatggcatcggcgaaatgcgacacgacccgcgtggccagccgctcgaagatattcccgagcacgtcggtcccgtgcagcgtgatgacgagtggcgcccgcaaccgaaacattgcgggataggccgagtaaccatagtgcgcgtggacgatgtcgtatcgcgtcgcactcgtccttcggatgacgtcaaagatgcccttcagatagttcagcttggactgcgaaccgacgatattgacaacgtcgaccgagtgcccgaaccggcgcagctgctgtacttgctgatacacgaaagcgccggatcccggcctctccgggctcggatacatgttggtgacacagaggatcctcacgattgctccctcgacgctttggcacgaaccgtcatcgagtcacttggtctttgctgccacccccgttgagctttcgtcggatctccgcagggacgcccgtcacgagcacaccgtcaggaacgtcctttgtcactacggcgccggcgccgaccatagcgccgatcccgactctgacgcccggcaggagattggcacccacgccgatcgccgcgccacgcgcgatagtgggcccaagcatcggcgaaccgtcgtaaccgttcctgccgatcgcgttgtcgttcgaagtgccgacgcagcccgatatgaacacgtcgtcttcaatcgtcatattgccggccagccaggtatgatcctgcacccgtacgcgatcgccgatctgcgtgttgtaattgaccgtaacgtaacgcccgacaatcgtcttcgagcctatgcgcgactgttcacggatcgaggcaccgtcaccgatcagggtccccgcgccgagcgagacgtcgtagaagataactgcgtgcggtccaatcgaacaatcggcgccgatatcgatccatgcttcaaactgcggggcccgcgacaacgcgccggcccccttgggtacttttccgatataggcacccgggaaaatctcgacgttgtcccctactctcaccccactctcgatcacgacatgcggatgaatgacaaccctattgccgatcgtaacatcagaccgcaccacggcgaactctgcgatcgtcacgtccgcaccgatcgcctcggtctcgaccaccgcccgtgcactaattcggttcatcgtcacaccttcccgccatccgcgtgcatcgcgacgggcttccgctgcggttccctatggcttttccgatcggcaacagcacgcacaatcgcagtgatatcgcgcacctggtcgcgcgtgagctccgggaacatgggaagagacaatgattgcgcagccatcgcttcgcagcacggcaaatcgccctgcttgtagccgagataagcaaacgcaggctgtaggtggagcggcaacggatagtggattccgctcgccacgccgacctcgtcgagcctattgcgcattgcgtcccgctcgttggtcgtgatcacgtacaaatggtagacgtgggtggatccctttcggacgaacggcgtcccgacgctcgcgtgcgtcaactccgcagtgtaccattccgcagcacgccgccggtggtcgttccactcatccagacgccggagcttgacttgcagaactgcggcctgaagagcatcgagccggctgttgaacccgacctcggcgtggttgtagtgcgtggttcgaccatggtcgcgcaatcgttcgatccgctcggcgatcgctgcgctgttggtggtgaccgctcctccatcaccgtatgctccgagattcttccccgggtaaaacgaaaaacaggcgacatcgccgagcgccccggttcggatcccctgatactcggctccatgcgcctgggcagcgtcttcaattacaaacagaccgcgccgtcgtgcgaggtccttgatcggacccatgtccgcgggctggccaaagaggtgaactgcaacgatcgccttcgtgcggcttgtcagggcccgctcgatcatcctcggatcgatcgtgtgggtatcgggatcgatatcgacgaaaaccggctgcgctcccgtcgctacgatggcggcggcggtggcgatgaaagtatgagcggtcgtaatcacctcgtcaccatggccaacacccaaggcccgcagcgccagatgaatcgcgtccgttccgcttgccacgccgcgcgcatagggcacctggcaatacgcggcaaagtctctttcgaacgaagcaactgcctcgccaccgatgaattgcgcggactcgagcacgccccgaattgcgtcggctacctcatccttcagcgtcgcatattgtgccttgagatctacgaacggaattttcattattcgcacctcaccagattccatctctgttacttgagaacctatcgagcgccgtggccccgcagcaccgcgggaactgtcagagcaattaacttcaggtcggtccacagggtccagttcatcgcatattcgacatccatctcgagcatcgcctccgggcagagtcgaccgcggccacgaacctgacaaagtccggtgatgccgggcttcacgagatgacgtctgtgatgccattcgcggaagtactcaagttcatagggaatcgctggccgtggaccgacaatgctcatttcgcctcgcagtacgttgaggagttgcggtagctcgtcgatactggttcgcctcagcaaccgccccacacgcgtcactcggggatcatctgtcagcttgtagggggcattggggtcgttcgagagaacctccttcgcccaagcccgccgaatggcgtcgcgatggacgttctcgtcggcctcatgacgtagcgtccggaacttgaagcaattgaaccgcttctcgcccagcccgacccggcgttggcaaaagaacgccggcccgggactgtcgaggcggatcgccacccagaccgcgacaagtacaggggcgagtatcaggatcgcggtgatgctgaccgcaatgtccagcacccgcttaacgaattcccgcgggatcgccttccatcgcacggcttcatccaacgacaatttcggcggcccccgccgacgcgttccgccgcaaaaacgccggttgatgtgtcgcgccgacacggtgctcctggttgagccgtagacactccgatgcagcttcgagcgcttcgacaacccgcaggccatgtgcaccgctcgcaacgggctgtgcgccagtcttgatcgcgttgacaaaatcgagcaactcgagctttagcggctcgctgctcgatatcgcggggatatgtacgtcgccatgatgataggctgactggaagtcggcgtacgagtcgccgttgatccgcggcctgaagcgcttctgatagacgcgcaccttctccgacggctccacgtcgtcgaacaccagcatcgcatcgcttccgacgaccgtgacctggcgcaccttgacggggtccaaccacgaaacgtgcacatgggcggtcggtccgctcttgaagcccaactttgcgtaaacaacatcctcaacttccggcaagacgtgcgcgcagccccaggcgccgatgttctgcgcggcttcctcgagcaggaagaagatgatggaaaggtcgtgtggcgccaagtcccacaggacgttggcatcgggccggtagagaccgagattcaggcgccgcgagtcgatgtagtagagttcgccgagagagccgctccggatcatttgacgcatgacactcaccgccgggtgatactcgaacgtgtgcccaaccatcagcacacgctcccgctcctcggctatcgcaatcagttcgcgacaatgcgcgctcgtcatggccaacggcttctcgacgagcacgtgctttccggcctggagcgcggcccgcgccatctcaaagtgcgtcacggcgggggtggcgataatcacgccgtcgatggaagagttattcaggatcgcgtcgatatcacgcgcaacagcgacagagggatactgtgacttgatgtattccagcctgtcagagcccatgtcgacggccatcgacactcttgcgccgatatcgtggccaacgcggatgtgctttgcgccccagtagccgcaaccgatgactgcgagcgatggctcggcttttgcggtcaaaatttccgcgccggcggcctggttgtgagtatgaacgagtttggaaaataattgtttcgacatgttttgccacgatcacgccagaggaaagcaatggtgaacgtcagtatccttacgagcacggttatctcgccatgatggctccctgtttgaaggccttagcgtgcgttcgagcaggatagccggttgagcgcgcgcgccgctgtagaacacggattatgacccacgcccatcgggggtacccccgcccttgcagcgggagccggagagcttcgcacgttgcgcaatggccggaccgggtgcgtcaaagagttggcgcaccgcgttgtaatgcatcgccttttcggctttcaatgccggctggcgagttcggacagagatcaacagcacctggccgtcctcgcatcaggcctgcgggaatgcctgacgtcctgattcgtctgcggcaccccgggggatcgtcttgtgcccgaggcagggctcgcgccaaatgtcagcgctgcgaatgaaaatccacgctcacgtcgggattcacaaatcgccccaccacgaggggccagatcggatcatgacaaggtcgtcctatcgcctaccgcggattagttggccggagcgaccattgcgcatctgtccttcggtggaaacgtggcgccccttcgtataggactcctcaaaactgctgcagaagcgcgggggcacgaatgatctccggaaggcctgacggccttaccaagagatgaggccccccggatgaacattgacgctatggacaaaggctcctcgatcgcactcctgctccgcggcgacgtaccatcgcccaatgattgcaacctggcggcaattctcgatttctttgaaattccatggacggcgctgacagtcgccgaagcggacggtaaccatgcagccgcgctgacagcaggccatccgcagttctctatcctcgcttccgcgccctgtctcgcccaagtcctgcagcgctgcaagacagaggcgcttccggcctggctggcagcggccagttcgatcttcgtttatggatttcaagccgcagatccctgcagggctctgttgcgccagatcactggagaccccgaggcggagatccgcggctctggccagtccccaatgaccgtatcggtcaccgatgctcttcccgaaatctgcggcccaatgtcgggactacagatccaagtggagcgcgccgccgccgataccgcgctcgtcattcataatggcaacgtgcagagcatcgtgggtgctcccgagggcgacctgtttgtcgggttcacatattccggtgtccgcttctttgccggctcttccccggcgatggtggacattcacgaacgcaccgcaacgtattttgatgtgaagaaatgcttcgccggcgcggtaccaattgtcatgtatctgaagtgggcgttccgcggcgtttgcgcgacgaccgcagagacaagcgcttgcctgatcattgacgatccgcctctgtggccacggtacggtctcctcgattttagcgaactgctgcagctggctgacaaactgacattcgcaacgaccatcgcctttattccatggaactggcgacgaacaaatcgcgacactgttgccgccttccagaaaagcagtgggaaactgtccgtctgcgtgcacggctgcgatcacacacgtggtgaatttgcagcccgctcacctgaggagctcgaccgaaagctgaagaccgcgcgacttcggatgcaggcccttcgcgacaggactgcgctcgaccacgaaaacgtgatggttttcccgcaaggggcattctcgcctgaggcggcctcggcgctcaagcgaaatggcttcgtcgcggccgttaacacagaggtcgcaccagccgatgacgcgctgaacgaaacgacactcgcagatctctggagtgttgccatcgtcaggtatgggagcttcccaatttatacccgacgatacatgcaccacggcgtcgaaaacttcgcgtttgacggactcctgggcaagccgtgctttattgccgggcatcacgaccttctccgcggccacggtagcgaactggcggcatttctccggcagctcgcatccttgcgatggaaactccgctggcgcccgctcgaggatgccgtttgccacagctacagcattcaatccaacggcaacgcaaccgtcgtaaagatgctggccgaacgactcctcttcgagaacagcggggcgatgacgcgacgggtctggatcatgaaacaagaaccgcaggccgcttacttgaagggcgtccaagtcaaccaaggcatggtcgcgtacgaatacatcgatggacatgttcgactgatgattgatgtccctcccggcggctctgcggacatacggtgcgtttatcacgaacagctggatgcctcgccggcttcagaaccgatccgataccggttcggggtggccattcggcgatatctatccgaacttcgtgacaattacggctacctgcttcgcattcgcgcctagccggagacgaaccaaagagacctatccagccgctccgggccggctgatcgctcagcgatgctcacaatcaatcaacttccatcgcaatcatgacgaagcctttccggtccgccttctcctgccgcaatcggaataggtagcccgaaaaagtaggcgctccgccggcctaaacgcatacaattgggcacaggtttgaagtcctcgttattgtgatcccaagttagagacctcgcgcactttggagggaattgcggatgcctgacacccatccagggcgcgggttcgcagaccacccctgaacgaaaccgtcgaccttgcagccaacccctaagcagccgccggtgttgccaacgcaacctggtcagcgtgatggataaaaatgaaaatagccgtgttcggactgggttacgtgggcatgacgacagccgcctgcctcgccaggcaaggccacgaagtcatcggcgtcgacatcagcgatgaaaaggtcgcgatcgtcaactcggggaaatcgccaatcacggaacccggcctcgatcaacttgtggagtccgccgtcagaaagcgcttgctgagtgcaacgaaggacgcgagcgggcagctcgacagctgcacattggcaatagtgtgcgtgggaacgccaagcgcgccggacggatcccacaacatgagctttgtcgctgaagtctcccatcagatcgcggacctcatcgggcccacgcgcacgacgacgttaaccgtcgtatttcgttccaccatgcggcccggcacaatcgaggatctggtccttccgatcttcgagagcacgttgaacggcaggatcgacctcatcgaggtcgtctacaatcccgaattcttgcgcgagtcggtggcgatagaggatttcttcaatccaccgaagatcgtgatcggaacgagagacggggaacggtgcacggtcctcgacgaattgaacgcgaacatcgcggtgccggtgttctacacgacctatcgtacggcggagatgaccaaattcgtcgacaattcgtttcacgcagtcaagattgcctttgccaacgaagtcggtcgcgtttgcgacaagctcggcattagcgcgaccaccgttcacaagattttcgtttctgacaccaagctcaacatctcaccctactatttgaggccgggcggcgcattcggcggttcatgcttgccaaaggacgttcgcgcgctccagtacatcgcaagcgacgttggcgcgcatacctggctcgtggactcggtactcaggtcgaacgatgagcacaagaatttcctgtttgagaattgcctaaaggcggttcaacccggcggacgggtgcttatgctggggctcgcgttcaaggagaacagcgacgatcttcgcgagagccccaatatcgacctggctcgcaaattcctccgcttgcatatcggcctgtcgatctacgatccacatgtcgagccatcgaaactgctggggcagaaccttggctacgcgttctccaatttgcccgcgctccgcaaactgctgatcccgaaatcgaccgctgaatcggagctgttcgaccttgtcattgataccagagggtgggcgaaacaaatggcgctgaatgcaaagcgggtaattgatgtcaacactctctcgtgacgacgccgttacgcgcgaatccgaattggcgagcgttggctcggtttgtggccgagtgctgattatcgtcgaaaatcttccagtaccgttcgacggccgggtatggtcggaagcgagcacgttggcgcggcatggctacgaggtgtccgtgatctgtcccaagggaccgggcgcaacggcctcgttcgagatgctcgagggaatcgcagtctatcgccactggatgcctgaagaaggccgtggggtgctgggttatgcggtcgagtacagcgtggcgctgttctgggaattcgtgttgagcgtgagaattctggccacgcgcggatttgatgtgatccatgcgtgcaatccgcccgatctcatcttcctggttggtgcatttcataagtttctgttcggaaagtcctttgttttcgatcagcacgacgtcaatcctgagctctacgaggcgaaatttggacgtcgtggttttctttggcgcgtcatggttctgcttgaacgcgttacgttcgcattggcggacgtatcgatcgcgaccaaccaatcgtatcgctcgattgcgatcgagcggggccgaatgagccccgatcgcgtgttcgttgtccgctccgctccgaatgtttcccgcgttcgctcgcttccacccgaccccgcctggaagaaggggcgcaagtatctcgtcggatatgtcggtgttatcgcgagacaggaggggctcgacctgctgctggattcaatcaagcacatccgcagcattcggaaccgcgatgatatccagttcgtgatcgtcggaggcggacgcgaattggaggagctcaagaagctcgcagtggcgctagaactggacgatgtggtcacgttcacgggccgggtcgatgacgatacgctattcacaattctgtcgacggcggacgtctgtgtaaatccggaccgccccagttcgatgaacgacaaatcgacgatgcacaaaatcatggagtacatgacgttgggcaagcccatcgtccagtttgatctcacggaaggccgcttttccgcaggagaggcatcgttgtatgtccagaatgcggacaccgccgagttcggcgataaaatactggagcttttggaagatccggcgcggcgcgaagccatgggcgcattcggtcagagcagaattaatggcgaactcgcctggcatcacgcatcgacgaagcttctggccgcttatgaaaaggtattcaagctgaggggcaaatagggaaacttgttctctccgcgcttcagctgacgcgtgatccccgtcgcagaatgcccatagttcagaccacctgagtatcgccgaagtggccgctttgcgcgggtacgccaaggcgactggcagaccggctccgctcggcaggccacatcggtccgggctcgggagctgagccgcagtgacgctgcgcagcgcgggtcatggctgccctgacgatatgggcgttaacgagccgctcgttatcgtcaaacgccgataattgacggcagcaatctcgggcgccgacgaccgataaattccgtatccccaattggtgccgaccccatagcctagcggtccgctgtagttcacgaccggtgccgcatcgatccagactttcaggtaaccagtggcatcattcgagaatcgggcctgcactttcacgtcgtgatactggccggtcacgaccggggtcgggtcggtccagagcgtcttggtgacgacgaagcccgcaccgttgctcgggctcttgccgggcggacagtagcgtacgagcacctgcaggtgatcgccttgcatattcagcgcgaccggaggtgaggttcccacacccgaggcgtcgtcgtcgttgtgccactgtccgacgatgaaccagccggtcgcgctgttcacgaacgctccgttgctgccgttcgcctccaccatgaactggtaggtaagcgtgatgggcgtgccggcaggataggtcaccgcggaattgatctcggcacgatcgacagacgcgctgtcgtaccaggcatagtcgcccttgtggacctcgaagcgcagggtttgaggagcaggattggtcagactgtagctctggtcagcaacgtgaacgccgtaggcatcctcgccgatctgaaagcgggttcgcggcttgccggagaacgacgtgatcgacggagcagctgttcttgtactagccgtactcccgttggcgccagcaacagtgtcaatagcggcggacggcccctcagccaacagcttcctctgatcactagcatcggcgccaagcgccgtcgatccaccagcgatatttgccacactcccagtcagcgcaaagatgaagggcaagactatcttcattgctatccctattcgaccagctactgtcataaaatgcacgtcgtcacatccaaaggtaacctattcaattctcgacgcaatttttcaccggattcaatcgacggaaaataaggactaccgccgggcgcgagttccaaagaaatgatcgctgcgcccagaagcgcagctaagcgcacatgcctgctagcggaccatgccaccagagcgttcgatggctgttgtgccgataaggcccctgtggcgcttgttgacgccggacgcagaaccgccggccggattcagctgaacggctcaccgcacggcgtcctggtttactcgtccccaatctggatgcgcaacgagcgagccgctcagttcagaacagtcgcgcccgagccttttgacccggcgacaagaggcgtcaaagccgccatcaactcgtgcgtctttaccgccggggagtgattggccttgacgtagatctgacatcgccggctgagtgcgtcgtattcacccgcgtccatattccaaatcgcactcacggaattggaaagctccaactcgtcttcgaccgatgcacccagcatatgacgctcgacaatcgagtccggatcaacatgccgacgcgtcacgatgggggcacctacggcgagcgcctccagaaacgcgttcgagaatccctcgaaatccgacgtacagaggagcatcgttgcttctgacagaaagcgctggacgtccgctcgcctgacatagccaaccaattcaacgttcggcagctgacgcaaaccattcacggcgtccagcgtcgattgatcagtgttcggtgacgtcatccccgccacgcggaagttgacggccggcagggcctgagcaatccggaacagcagaggcaagttcttcggatagcggaagacaccgagccaggcaacgtatccacgcttcgtgcgcggcagaggggcagccgcatcctctgctacagcaaacggattgtggagaacgtgcactggcttgcccggaaagagcgctgccaactttccgcgctgatactcattctgacagagaaacccggcggtgcgatgcctggcccacgaataggatatccattcataggatggaaggagagccttacatcgctcgtcgacatctatgtcgcttacaacgcgataaacgaacggcacccttagttggtccgccacgaacgccatcatggcagtatgtatcccacatacgccttgcaccagaacatccgggcgatagctgcgggcagccgccaatactttcggaatatatgaatagaaatacttcgcgacccgaatgccgcgggcgggatcgtaagtttcgataagcttgatttgctgtcccgaacccacgtgctccagcgcgcccttccaggtgagcacagcagtgtcatggccggcgttctcaagcgcgcgaagccacactgcgagctcgatcgcccacccgccaatcggatagttctcatctctcatcagataaggaatggaaaagtccatcgagagaatacgcactcaacaccccgttcttaatgggcccgttccatgaaaagaagctcggcgacatgaacgcggcattgcccgtgaacgcaaggtgtatggcttctcagtttgtgcagccaaagagcgagccttgccttcatcaagaagttcgatcgtctcgcgtcaagctgccaacacgatactttcaatctcactcccctcccgtagcctggccaccgcctcgaattcgttcgcgtcgttgagccggaagagcgtgccgtgattggtgccgtctgcgagtgttcgattcacgatgaggaacgagccggcaccgactaggcgatccctgagattgccgacagcgccgagcaactgcgcatcgttgaaataaccatgattgagcagatttgacacgcggatcgcgttgaaccggcggcgcagttgcgccgggttcggcgccagaatgtcatcgtcggcaaagctcagacgtgcgtcgtcgcgggcatgcgggttcaccaggagtatgtccttcgcctcccccctcgcgttggcgagaggcaggagcgcgcctgcaagtgcgttgagcgcggcaaccacgaatccggtgcccttcagaaagtcccgcggaccattcagataccagcgcaccggacgattggcgacgatgtgctgaagcaccctgccatcacgatcgagaagaacatcatatcccggcaacaggcgcaaaaggctcccgcgcatgcacagatcgctcgccaggatcttcgcctcgacgccggcacgcgtcagagcatccgcccattcgagcgacgaaatccccgacgatacgcctacgtccatgatctggctcggcttgctgccgagtttcttccactcaccgataaccatctcattgagatcatcgaggcgatgatgatcggtggtcttgtaggtgccattgcgcagacgaattgaggcgaagaacgctgcttcctgtgtctgcgtaaagacatcaccttccgtcagaaagtcccttgcattcaaagtcacgccgcccccaagatctccggagaagcgcatcagaaccgccatgtattgtaccctccgcccggctcgcttctctcagggtcgctcgaattctatcgattgaacgtccacttctcctggtcgtcaacaatccgcaagagctcgagtttcgccgcgtcgccatgcccacaagcataatcttttgcatcgatacgcggctcgaccctttcggattacccattctcgatcgctgctggaatccagaccggccggctccaaatgtgccccgaccaggggagctttgggagctcagcaatcgtctggaggagatcttggcttggcacggattgtaggcgcgcacgggcagcagagtgcgccggcagcggcggcggtttcaacggttgacgccatccctacccggggtaccgtgttcttgctagatatgctcgcctggcccaatccattggccgcccgtggagctccacgtcgatgattcccaacgtcggccgcatcgccttgctcgtcatcgcagcaagcatcgcaaccctcccggcttcgctcgcacgagacggcgcactcccagggcgcaccggcgacttcgagcagcgcctgcagcgtatcgtgaatggactgcgggctgccaccgcaagcgagtctccgatgaaacttgcagatcggatggacgaactgcacgttcccggcgtcagcatcgccgtggttcatgacggcgtcatcgaggcccgcgggttcggggttgccaccattggtggtccgcctgtgcttcctgaaacgctgttccaggcagcctcaatcagcaaagtcgttaccgctgtagcagcgctcgcgttagctcaggccggaactctcgatctcgatggcgacgtcaatcgctcccttaaaagctggaagattcccgttaactcgttcactgatcgaacccaggtcacacttcgaagactgctgaaccattcggctggcataactgtcccctactttccgggatatcccgtaggcgcaccaattccatcgctcgtcgacgttctcaatggcgcgtcgtactatgagcgcgaaccaaacttccttgcgcgacggacgggccagcccacagcgacgctgacgagcggcggaacggcgcctgtaaacaccgcccccattgtcgtggatcacgagcccggaacaaaattcgagtactccagcggcgggtacacgatcgtgcaacaactgctcatcgacgtaaccgggacaccgttcccaaaactacttgacgagcttgtcctcaagccgttcggaatgacgcacagcagctttctccaaccgctacccataaatgacgctccactggccgcaacgccctaccgagcggcgggagcgccggtgccgggaggcccgcatatctatcccgaactggctgccgcagggttgtggacgacgccaacggacgttgcgcaattcgcgctgggcgtggtccgcgcctggagcggccgagatacgtccgtgctgtcccaggccatgactctccaaatgctcacgcccggccttggcaactatggacttggtcccatcgttgttggggtcgcaccgcatcgacggttcctgcatgcgggcgtcaacgatgggttcgtcagtttgatgaccatgttcgaaaacggagatggcgctgttatcatgacgaacggagatcaaggcggccagctggctaacgaaatcatgcggagcattgcagccgaatacgattggccgatggcgcactgacgaatgaccatcgtcccgccatggagctctaccaactcgcgccggcttcttccgcgatcgcgttgcgtcacgcgccgagaactccccattctcgccgaacctccgccagggtccgatagtatccggtcacaaacaacatagccgcataacacaccagaaccgcggccggcccaaccagcgcagcaaccggaaccggcggctgcagcaaatcaaccgaaagccgcaccagcattgccgccaacaccgatgcaaccaaaatcagcccaaggttcttccaatcctgcaactttgcgatcggaatgctcatcacctgggaaagtcttctcagaaagaacacatacacaacgaaggttgttagtaccgacccgatcgccgcccccggcaaaccgtaataccagacgccggccaggctcgttaacagggcaaagggcaggatcgcagcttcataacgcatgttggccgagccctgtccgaacacgttgagcagcgtggtgatctcagtcgagatcaacgtttgaatcagatagatccgcagcacgggagagccactcacgtactccttcgtaaacagcaactgaatgacttcgtcggcaaagacgaacaatgccgcgatggcggggaacatgaccgcactgatgataacgttgccttggttgttcaggcgcaacagctcttcgtggcgacccaatgaatggaaatgactcatctttggcaggagcagattccccagcccacctctcaacacttcgaacggcatgagcaacgtcgtcgctattgaaaagatgccgaacatgcctgatgaaaacatcgctgcgacaatccatagttccgcctgcttccgtacgctccacagcagaccggccacaccgaacgggagggcgtagcgaagctgtacgcgcaactgctctttctcgatcggaaacagtcggataccgcaatgccgtacgataaagacagccagaagccctacgcgcacggcagcggcaatcaaggctgcgatgagcacctcttcaaatcgatggaacacgacggccgctgaaatgatcagcgcggccctcagcacggatgaagccaggatggcttgcgcctgccagcggatctgccctacggcgttgggcaacacgtccaacaataagcccagattccagacgaatagaaaaatcgctagtagcgctccgtgagcctgcagcagatctctcatacccgatggaagggcaaaaccgaaggcaaaaaccagtagcaccgcaatcatcgttgtggccagcaggaacaagaccgtctgcccgacgtaaacccgccgcgcctccggacccagccgaacaaagaagaaaagcaggctgcggggcatgttgaaggagaacaacagggccaccgtcgttacgagtagccagaacagccggtattcaccgaacgctgttggaccaatcgttcgcaccagaacgaccggcgtcaatagcatgatcacctgttcggtgtattgcgcagccgagagtgcaattccttgacgcagtatcgatgccatggatcagcgacctcgcgatagcatcgaccgccgaacgctcgaacggcggcccgcatagcttgcaaaaaagcgatcataactcaccgacgaactccggaaccgcaggactgaaaaacaacggatcaagcgaacaaggacttgatgacaatgagcttgctcacagtgcacctctctcgaaccacttctcatcagtctcgcaagaccagtttgagtgcacctcgtcagacggcagcgccaaccgacatcaaatcatggacgaacctgtaaatcatggacgaacctgtcgcggcactcacaatgagcccacgagcgcatcgaggtcacgagcgaccctgctccaggtataatgctccagcatcacctttcgggcgctctggatcatggagtgtcgacggccttcgtcttcaatgagcaacttgatcgcagtcgcgactttctcgggatcgtcggcgcgcacgtagtcgacgccttcgcgcgccttgccaagcgcctcgatgcctactcccgttgaaaccacggccaaccccatggcaaatgcctcaagtaccttgttcttcaatccactgccaattcgcattggatttaccattatcggatactcagcgagcactgaacagatatcgtcgacaaacccagtgaggcgaataccgtcgtctcgccttgcagcctccagaagccacccttccgcatctttgcccactacgcaccactcaattccagctggagccaggtacggtcgatagacgtcctggtagaaaaaacgaaccgcgtcgcggttcggcttgaaggcaagattgccccagaatgccactcccctccgcttggcgacacgcgcatttgactcaaatgtctctgccaggtcgggcgagaccccgttcggcacggtgctgacgttcgcagatctgccagacagcctgcatacggtatcggaatctgcttcattgaccgttgtgacatgattgaaccaatggggcaaacaggcctccgcccttgcacggcgcgcgcgcatcacgtgcgcgtccaggcgcgatcgcagttgcgcgggccacggcggaaagaactgtatctgtctggtcagcgttagaacttcactgtcgatgagatcaaagagtatcttcttatcgctcgagaacggacggacgaactccgcaagcaccaggcagaagacgatcatatgagtgatactgtgctcttcgcagaagtcagcgatggatttggtgatcgctgaaaggtgatggggataggaaagcgagtaatagtccgagtcatttcgacggaagtgccgcttcagcgagggcctgtgagtcggaaacttcggcgtttcaacgatctcttggaacacatcggacaagccgaccagaccgccgctcgattcatccgtcgaaccaaggttcaccgtcaaaaggtagagttcatgctgcttcgccagttcgcgacacaagtgccacacgcggaggtcatggccattggttaggcttgcgagcggcttatgcgttacgaccaggatgcgcgtcacgacaattcattgactttcgactgcagtagagcggactcaggcgcagcatgatgcgaccagaccattggctcggccccttcatccatccagtggagccgagcttttcaagccgatttgagctcatttggcagtccggcgcaacggcgggtgacgctcccaatggaaacgttccgcctcgctccgttgctcttcgtgagtagtactttggcatcgacggccggcgcacgccagaacaggctgcaaccggcggctcacgcatagccggcacagtacatgccgggcatcggaacggtggcgcgacctctattggggcagcggacattcgtcggggataatgaagaaatttcccgtgaagttcttgataccagagcctgcaggcttgagcacgccgtgctcataaccgtacatccgatagcgctcgccttcgaacagcgtacgaatctcatcgcggttcttgggcttccatatctcgcagaagatcagcggccggcagcgccgtatcagctccatgcctcctttcaggacctcggcctcgaactcctcgacatcgatcttgatcgcgtgcacgtccgtgcgcgtcttgaggtccggaacgccatccagcgcctctatcttgatccggaagcggatgccatccttgtattcggaatgcccgtcgtcgacctgacatagtgcgtgacgtttaataccgccgatcacgggcatgatcatgggaagctccgcagcctgacggcccaggccgcactcgtgaactgtcacgttcgcgagcgtgtgccgcgcgaccacgcgcgtcagactcttgaagttctcaggccccggctcgaacgcatgaacgcgggagccaggcttcgcggccgccaggaagtaagccgtcactccgatattggcgccgatatcaaggatcacgccgtcgtccggcaccatgctaagaaagtacaggaagtcggcttcataacggaacgccttgatcgtggcgatgcgcatttgggcaacgaagaagagatagttttcaaacccgagcgcgccgatgagcaggcgctgcgtgatacgcttgagcgagcccatcatcggagcgctccctgctcgcccggcttgatcaagcgacggtgcattccatcgaagcccttctgcccgcactcggacggaactccatccgaagcgtaggacctatcgccgtgcgcgatgaattcgtgagacggcgacgtttggcggatcgcattgggcttacaaccggggcgaccgacgaagcgggtcggcacggtctcctcgtcacgggcacgctggctccagacttcgatcgagctgttgcgaaccgctatctcccgcccgaacatagtcatttggaatccatcaaaacacgagaactcaacacggtgaaatatccccattaagcgggctcaatcgctccgtttcaagaacgccacttcgttcaggtatggggaactggagttacccccactggcttgcggccgcgtttgcggcacgagccacggcaacaatcgcgcagatggtccacgcccccgctattgcatcagcgtcggcgtggtaacagtagagattgcgatggtcagcagctcatgccgaggtatggcctgcgcgcgaggataagcgtgccagattgaccatcatcgcgatgagaaggaacaggtacatgttctcgaacgatggaaatacctcccgctcagtgaacatgcttattccatagccgacgatgcacgcaaacaaggcccaatacaggtcgttatgcaaccgtcggccgacgcgccaagcggtcgatatcccgacgcacataagaaccagaagaatgccggtagcgatcgctccgcagtcgagaaagaaatcgataatcgcgttgtgcgcatgagtagcctgtatcagcgtccccgagtaccaagcttcgctggttattattccggaccgtcccgcgccgaacagaaacaggccgagatcactcgtccactcattgagcagcggtatccaaatgaaatctacgcggccagtgagcaattcatcagccgacacctccgaggacccgtcgaaaccaatggaaaagatggcgaccacagttggcgcgatccagagcacggatgcgatggcaaccatcgccgcgccgaccgccaggacggcgaatttgcgcttgtaaagcaggatcagaacataagtgccgacaacggtcagaagcgcgctacgcgacgagagcagaaggagccccaaaagcgacaaggcgacgggcactatccagagtgagctgcgagtaagcgctttgtacagcaacaaaggcgccgtgcagatgtatatcgtgcccatcgtattgtagtggatgccgaagtaggattcgcatagcgcgttgacggaggcgcgccctgaaagtgcggcagatggattcatgagagcgacgaggatgaaactagccgacaagagcagaattgaaacgcagattgcgtcgacgactgtctcaatctcagaaaatgaacgacatcgcttcaaaatgaacagaaacggcaaaatgtagaacgccggaaccatgccataggacatgatgtaatccagataggactctggaaacacgtccgggaggcgatcatgaagcagaggggcatttgggattgatctagcgaaagcgatggcaaaggtgacgaagtatagcaaaagaacgcgaatggacgtccgctcgatcctgtcgctcgctgacaggagcgggacttggaatagcagatagaccaagactcccgccgacagcaggttgaagggcttgcagccttgtatgccgagcaggttcgtattgacgaacggcacgcgttgaaacggcaatatgaaaacgatcgccagaaagagccattttgcactttggccgagcgaatccgcctgcgcccgatggtagggcgttcggccgccatatcttaccgcaacgttggtcacgggccggctccttgccctccggcgcaaccgaactcgagcgcgcgactgctgatcgcccgatggcgcctacccgaccgccgtcgaaaccaaattgtcccgagcgttgaaaacggcaactccacgctcaccccgaaccggtaagacgtaccggcctggtctttgccgatgtttcagattgatgatccggtcgaactgtgtccgagacaggccactcggctctatcatcgtgtgcgcgcaagaggtcccacgcaccgaagcgcatgtggccatcgatcagatcctgcgccacggcgaaggcgaggccaagaagcagcccgccaacgatcgctattccaagcacactcttaggctttggcgaagcggccctcaggggaggcaaagcctgcgtaatgagactcgcggcaaacactggcgttgactgttgtcgcgtagcctccagcctgcgcagcatgtggcgaaaactatcataagcgcttttggatgattccgcagcagcgaccagtctgtccatactgacagcggaatccgaagcatcttttctgcttctgaagtcctcgagtgccttttgcgcagctgacgcttgtatgctcaatccgttcagtcgatcccggacccacgtctcgtcttgcaacgagccgccctggtccatttgatgagtaatatacttttccgcgacggcgttcaggatctgcgctgcccgatcaggatctctggaatcgaaggtgagttcgacgagataggtagggcccacgcgcttggcggaaagcctttgtccgaacgattcaacggcgtagcgcatcgcgctacctgagccttccggtctggtccagccgagcagacgcgatacggatagaatgctgttaccctgaccgcccgcaaattccgggctctctgcgagaccgagcttctcgatcacggcgctcgcaatgctctcagactttatgattccgatctgactttcaacgatcgttgcgactgccgctacgtctccgggcgtcgccttcgagtctacgataagttgcgccttggcagtaaacgtgggtaccgccatgacgaggtagagcatggcaacgccaagcgctgcgcaacatcccagccctatggtcaacaggcgtcgccgtacgaaggttaccaccgccagcagggaaatgaccggcgtaggacgaaattccggcggcggcggattctcccgattcacccaattatccgttgtattctgcaacatcttcgtaccagcgttgataatttgaattctgctgcagaggtgaggtcaaatggcccaagggcactcaccgaaggacgcacggtcagcggaaagcacagcagattgacgtgtggtcgccgcaccaacttttgacagatggtggccgcgaaatgtgccggtatccgctgaattcgccaaacggccatagaccggacacgccggagggttggcggaggccggcaaattgatcaagaacgcttcgttcatggacgctacgatccaaccgctcatttcccactgaatcagtacattccgggtcacaggttgggaaaggcaataaatgggtaattacgatggtccattgagccgcggcactaccggactaaattcgagcggcaatccactcgttcgcacatcccagtgggtccgatgcaacttcaaattgtcgatcaacagggccgatcaatcgagaaatgggcgggtagccctgtttcccagcaattgagggaaagaacctccgttttgccgatccggccgtctcgatggtgacccgagcgtcagcgatgttgacatgttggtacgccgcggattccgagcgtttcaccctgatgaccaggtcgtagagaaagttgccgtcatgccgaactacgcaccgcgcaagtgtttcagagccagtatcatcggcaacggcctcggcggttacatcaaatggggcttggcggtcctcggcttgacgatttcggtggcacaagcaaaggccgagtatctcgtcaatgtcggagacgtcctggaggtcgcggcggctggcgtgccggagttgcgatcccgtgcagctgtccagacggacgggaatattgcactgccgctcgtcggtgtgcttcaggtagcgggcctgagcttgccgcagatccgaaccaagatcggcgccgcactggcgaacaaggtgtttcggcagagaagtcctgaagggcgcgaaagtgtcatcgtgatcgatgcagatgaaatcacggcgaccgtagcggactacaggccgatatacatcaatggcgacgtatcgaagcctggccagtacccttaccttccggccatcaccgcacgccaactcatagctgtggcgagcggttacgacatcatgcatgtcagaatgaacaatccgtatcttgatctggcggacctgagggccgagtacgggtcgctttggactgaactcgccaaagagcaggcgcgcctgtggcgtatcaagacggaactcggagaggcgccccagatcgttccaaatgctgcgaaggactcgccgatagctcgatcggcgatttcagaaatcttcaatgccgaaactgagtatttgaaggttaagcagagtgactatcagcaggagaaggacttcatccagcgcggtgttcggcagggagacgatgaagtacgcgtgctgtccgagcaacagaaaagggaagaagaaggatttcagtcggaccaggacgaactgcaaaaagcgcaagacatgttcgccagaggaaccttgaccagcccgcgcgtcacggatgcacgtcgggcggtcttactgtcgtcaaccaggaagttgcagacttcagcacagctgctgcaagtcaagaagcagcaggatgatctggtcagaaggctgacaaagctcgatgatcagcggcgacttgacctgctacgtgagctgcaggacacgagcttgaggcttaaccaggttcgcgagagactgcaggccgtgggtgagaagattcagtacactgcgatggttcgatcgcagctcgtgcgaggcgcgggcagcaagccggacattaccattttcagaaagggtgagaacgggccggaacagattgccgcgagcgaggacaccgagttgcaaccaggcgacaccgtcgaggtttccttgcgataccaggaccttccggacgtcccttcccgaaagctaagcggtttgagtccctcatcggcgacgggccgaactgccgtgaccgaagctgatgcggcttcggccggcaccaggtgatgaggtcggcccggtcggtcaagcccgcgagactaaagcgcgatgagattgggttgaatcgccatcgcgctgtagttcatcgtttgagcatgatcttttcggaaaaccgcttcgcacgtttccggatcatgctttaattggcgtgtgtctgtaagcgatgcagtgcgtccagccgagttttcgcttccttgattcctgcggcatctgccttggcgtacaaggttctcgctttgctcgcatcgccgcgcgtgccgtaggttccccatttcgcgagaaccagcggatcgtaggtttccgccagcgcgaagctcgcctgggcgctgcccatctcgacggcgcgctcaagcacaagccgcgccgcaccgacatcgccctgccggagtaggaaactcgcgcgcgcgaccaaccctgcagcgtccgccacttgctcggaagcaggctgagcgacggcgcgtgcaggcgccaggggtgccggctctgctaccggagtggcggccgctccgatcgaggtggacttgtccgggccgggcgagccggtcgtcaagacgtctggcgcagcgccaagtcctttgcgcccctgcgcctcatacgcctggatcgcgctccgcgacaggaagaggttctgcgcctttacgtcagcgctttcggcgcgcaactgcctcaactcggcagcaccggcttctactatctgtttctgctgcaagacttcctggcttgcctttgcggccctcgccgtctgggcttcactctcgcgacgcgctgccgcgaggtcctgttccagccgctcggaccgctcacgctccttttgcagatccgccaggccgctcttccctgccgatgtcagccgggacagatcctcggctgctttggttaccagcgcagtcttggactcgacgtcgcgccgcgctgccgccagatcctgctccagccgcgcggatcgctcgcgctccttttgcaggtcagcagcggcgctcttgcctgctgcttgcagtcgggatgtttgctcgcctgcttgcgtcaccagcgcggtcttactctcgacatcgcgtcgtgccgtcgccaaatcctgctccagccgtgcggatcgctcgcgctctttttgcaggtctgcggcagtgctcttgcctgcgacttgcagccgggtggcttcctggcttgcctgcgtcaccagcgcggtcttgctctcggcatcacgtcgcgcggccaccagatcctgctccagccggtcagcgcgctgacgtgccgcttgcagcaggttctgcgcctctgccgcgccgttctccctctcccgtttcaatcgagctgcttcgtcgcttgccttcgccgccagtgcggcctgggcctcgacatcattgcgggccgctgcaagatcctgctccagccgagccaattggctgagctcgtccggcgaggctttgtgagctgaggtcgcgctgccttcagccgcccgcctcagctccgccacttcttcgccagccttgagggcctgcgcctcgtgtgcgtagatcgaactacgcgcctgagagagctcctgtgcgagcgcgtcggcctttgcgcgcgattgcctcagatcgacagccacagcttccatcgacagcttctgacgcgagacttcctcgcccgcccttgccgccaacgcagtctgggtcgccagatcacgccgtgtcgcagcgagatcctgctccagctgggcggacctctcttcctcctttcgcaggtccggcgttccgctctcacccgcggctttcgtcgcaagcgcagtctgaatctccagatcacgccgcgtcgccgcgagatcctgatctagccgcgcagaccggtcgcgttcccgctgcagggatacctccagctgtgctgcgccgctctctcccgctgccttcagccgggacgcttcctcgctcgctttcgttgccagtgctgtctggatctccagatcacgccgcgccgtcgctatatcccgctgcagccgcgcagattgctcgcgttcctgctgcaagtcggctgcgtctctctcccccgattgcctgaggcgggacgcctcctcgctcgctttagccgcaactgtggtctgtgtctcgagttcacctcgcgcgaccgcgagatcctgctcgagacttgcgaaccgctccgggtagcgaggcaacccggtatcgctcgcagcagcttgtccgagttcgacaagctctcctccaaacgcgcgggcttgggcctcgtaggccaggattgcactgcgcgtcaacgaaaagccgcctgccggcatgccggccattgcgggcggttgtcttgtctcggctgcgccgccctccctggctggctccggccgcgattcttcctctcctgtttgtgccgccggcgcagtccggatcttgagatcgcgccgcgccgccgcgagatcctgttccagcgttcctgccctctcacgcgcgcgttgcagcgcatcctgcagctccgcgataccctgtacgtcctgcttcactagggcagcattttcgacggccttcgtggccaaggcagtctggacttcgaggtcgtgacgagccgcggcaagaccctgctccaacatctccgcccgcccgcgctccagctcgatccgctgcaacaggccgatatcgagccttgcagttgagagatcgcaggacaggctctcaccccaattgggttcctccgaggcaagcccactctgggcgctcgctccctgcacgatcagcaccgaccgtttgttatcgcctccgtcccgcggcgcggctttggactcgccgtcctccgccgctgcagcagaattgagatcgcgaagagccacggcttgccgcgtatccgccgcaagacgcacgggatcggtctccgccagtgtcgcaacgggtgcccacgcggttgcgaacacggcgacggtcgtcgtccacaagagcacgggccgtgctcccctgagcaggcgtcgcggcgacgcgcccgcggtttcgcagggagggcctacttcattgtcgaggagaaccgtccgatccatccgcaatcacctttcgtatggcgacgcgatctggcgaggtgcgacattgggtgccctacctcggcgcgccctcgagtaagcctccgcggggccgatcgtgctggcattcatcgtcacttgcggctccggctgtcgctctcgccgtaactgacgagacgccgcagcttgcgccagcgcatccacgctaaaccgcggtatgttcgtgagcaccggcgccgccattacaacgtgacgggcgtaacccgccctttgcggtccgtgccactgctacgatcactttacccatcgggctctgccttcgccgatccgaaatttcgtcgtagtttcgtgcagttcgcccgcgcgcgctatttccccccatggaggagcccacctactccttccggagtatgcctgcctgccgcgacctgacgccgcaatagccggagcatcacctcacgcgagaagcgccgcgcagcgcaccggctcgaaaatcccggcaagatccaactcgaactgatcgaggtgaagaccggcatctatctcgccgaggacgacatcatccgcatcgaggacgactaccggcgcagctgatcagatgggcattcagtgccggcttgccgccggccaatccgtatctgagccgcgatgccgcgatcggccttaatggcgtgagcttctacaggaagggatgcgcatgagatggtatccagaacggcatgttaggaaggcaaatggtggttgctggagttcatcgcgatgtcgggcggctctgccatagccttaaccaaactccgtgttcgacagcgtacctcggaatttctggccggcctcttgcaaagcagagtaattattcggtgctcgcttcattgcagcggaagtaaattgttcattgcccgactttgatcgtaccgcaagaagcggaccaagacgtccacttgatattgcgggaaccctttcggttttagaatcacgaccgaaaggctctcacctatttccggtcccgcatggagatcaagatgaccgacgagcagttgatgcgcctgaaagtctacggcaacaacgtccagcgctatcgccgattgctcaatggcaacctgaccgaagaggagcggcagttcgtcgaaaggcgcctcacggaagaacagacggcgatccagaggctgagggcggatgccctcgtacttggcacctcaaaggcgatctgaagaggctgcttcctgcgccagaccgccattcccgggtcgttccgtcgcagccgccaagcgatgcctcgctcaatgccctgctaccgaagttgaattccgctgcggccgaagttttccctcaccgatgcgccgttacttcgccgcaccttgttcacgttgcccaactctgttcctataccttattaggtaacacggatgtcatttgttccttctttgttcaacaatggtccatcaccggcgaggattgggcgcattggtcgggagcgcgtccgtcaatgattgcttcacgagttccgcccgctccttggtcagcttctcagcgaagctgccgtatttttcgagctgcgctggccccttgagttctctgtcgtaaaccatccagtcagtggttcctcttcgaacgaggaatctggccgttagcggcggcgtgtggttcaaagattatctcctaattgatcgagccaccggtctcaaaaaaatgcacaccgggtgacggcctattcctgaactgggacactgaaaatcccagtagcgctcacactgcaaggcgcgtgcccataagctactcctgcggctgatcgcgacgcgccgccatggcggccaaggcaacgacacgccagcaaaatagcattgccggctacgactctggatgacgtcagggagacaattccttgacgcacaatcgagcagcgcggcccaggacgagatgtatggcggcgttggcaaagattggaccaggaagcaatgccgcatctcccgcagagatggcattcaggcggttcagaactggaattcagttaaccgatatcgtgctgctttccggcagcggcttccgcttgttctccgacgggctattcgcactcccaccagaacggagcttacttcgcgatccaggtcgacggcgacacggcagtctggtgcttcatgaagcggcggcggcggcgcagatcagcgcgctgaccacggccatgccgcaggttgtggtttgttcgcatgcggccgcgccggggagcgtattggcttgtgcgtctgggcaacattggtcggccgcggacgcggcacgggtacgtcgaaggttacgtttggttggtctgacgtctgcccaggctcttcgggcgccaccattggcgctgaagcgttcgcgatcagacgggccagttgttcctggcttgcgctgagccgctcggtgacggtcttgctttcctgcgccatctgaatttggacagtcttgatctggtcgatagcattgttgttgcgcgctatttccgctcgccctgccgcgagttgtcttgccaggctatcattgtcgcgggccagttgttcttgcctcagctgtagctgttcaaccgcttgcctcaaggaggcaagatcgcgctccatcggttggagctgctgtgccagatcgggggaaaccacgacggcagttggcgcaacgtctttcggcgggacctgtgtgagaggtgtggggtttgaggagggtacgactgctgtaccaaccgaggaccaccaccaaattccgcccgcaatggatgccagcaacaccaaaccgactgagaccgggtaccgccgatctctcaatcgatgaatcattgcccgcagcgcgcgaggctctttcacactggtcgttggactcgaggggctgactcccgcttcgcgcgcgaggttcgaaagctgctcctccaagctcgcgagcggcgcttccgcaaccttgttatccagcgtggagtccatttggtgctccgaaacaaacacaatatgatccgactaagaacagagccaagggcatcaacagccccgactgagcagtccattaaaatgcgcaaatgagagggcggatagcctactgcagcttaggcaagcagggaagcggtccgatgcgcttgagcccgcgtggactgcaaggggcattagtccgacactgaacggctctgccggctcggtcatcatcgcctggaagagttccttaacttggtccgctccaacttcgtgcaagtctgcttgtgctccaagagcatgcgccaggcatcgactgcgatccggtcgcatgggtcgttacttcgccgagcatgataggcctgcgctttgccgcaggcggtaggtcaggttctctggctgaacgggcgcgccccggtgcaagatcgcgtcgtccccgcgtgcatgcctccgccttcgagagcgcttcatcgagcgaggcaaacgggctgagtcacctatgaaaagcgatagatccgtttaacggcccggaacggaaactctcggtccgtacctcgcactcgcgggcggccgcgccggcgacaggctcacccggcacacgacatcctgagccttctgtagtcgtgtcctacgggatcgtcgcgtgtcaacacaccgcgcaatcaaatgacccggaagcccgtagccataaccgtcttcatcccatcctaacaaacgtccactcggggacttcaaacggcaggccgcgagtcgccggataatgggaataacctccgaggaggccttcgagcgcagccaccgccgagtgataggacccgaaatcctcctcctcaaagaagaagtgaaatcggccattgagcggcacgatccgaaacgtgccgcccttggagcggaattcccaatagcccgacgtcattgtcgccaccagccgcgccgacgagcggccgttgcggcctcgagcttgtaggcgtcatggccaatgtggagggctcggaatgtcatatgaagaccgctttcgaatcagcatgattctacagcggaaggacattgtcagccaaagcggctgatcgacttatccatcgactttcaacgcgggcgcctagagcatgatccggaaaagtgcgaagcggttttccgaaaagatcatgctcaaacaaggagctaaagcccgatgacgattcaacccaatttcatcgcgctttagcggcgcggcaaaccattgatcggctaaggcccggagtatagcgagcaatgctcgtcgtggcgacacgggcgggctcaggttcggtcaagactcaaatagcagttcgaacgggtcgaccgcctcatcaaatcgcgcctcaatcgggcatccatttgatcgaagccggatcggcgggccgcgtggtcgtgtaagtcacgaggtcgtagcctcgctcgacgacgagatcggcaacttcgatgaagccttcgtcgttctcgtcccccgagctatgatgcgtgacatcgctcatgggaacattctggcttgtcagggacaacctcaccatgccttgatggtcccgaattggccggcaaatcggaatgagccgcgcctcaaaattggtcggatgatagggcttgagacgcaagttcttgtagaaggttctgtctccgtcgatcgacagcacgcttttgcaggctgctgagttcaccatcaggccgcggaccgatgagtccgacccgatgtagatcggatacgtctctccgcgtcccagcctaacacccgaaaacgagatcagccgcgaggaatactcaaccggcgcgccggcggcgcagccgagaatattggatcggtcaattccgaactaagccgaagaagccgggaactcggaatcaggacgatcgatgcctccaacatcgcatgcgggcggaccacgccgtgtgccaactacaagagcgacctcctgcacctgacgccgtccggatacgaagctctcaccaggatcgccagggacggcatcggttcatcgtaggcgcttcgcaaatcgacctgtccccgacgggaagagatgaagcgaacacgtggccaccacagcgattcgatccaagattcatcatgccctaggtcagcatcgcaatgatcgactgaagtcgatcggatgctgacgtcacgagcccgtcgaacgatgtctggccgtgagccgccgtccgcaagatgcactcggcgacggccgccttgagaccgaacacagattgatcggccggcacgcttgccatcaccgtgtctagcgcatcgcgcatcgtctggatcagttcggcgctgaacttcatggctgtcctccgcatcccgaggataggccgggcgcgcccggccgccactcacaagcccgcgattccaaattgccgtttcttaatgcgatgacgaaccggtgattcgacggagagctaaagatccttctcggccagcttgcgaaagtcgtcgggcaccgagcgaacgacctccagcgctgccgaaccgtatccgatcacatcccagccaaagcggtcgcggaccttgtcgatggcacggtccgccgcccagcgcgccatccctgccgggcttccagggcgcagcgcttcatcggccaatccgagcggcagctcgagcgcaaggtcccaatgctcctcgagatgcgacaccgaaatcgccagcagcgaaatgaacttctcgccggggtgatcggcaagcgctgtgcgcaccagcctctctgcaagccgggccaggatcactgtcgtgcacaccggcgcatcgagcgtcatcgagcgcgtcaccgacttcaggtcggcgaaacgcacgcgcaccgtcacggttcgtccgggccgggattttgcccgcagccgcgtggcgacgcggtcggcgagatgaagcagcgtcggccggatgacgtgttcgctcgcgggcttgcggccaagcgccgattgtgctcctgccgagcgtgcgcgccgatgcggtttgagttgtcgcggatcgcgattccaggccagcgcagccagcttctcgcccgccgcaggacccagcagccgggtcagcgtccgctccgacaattcggcgagctggccgatcgtcgcgacgccgatcgcgtccagccgcgtcctggtgacgggccctactccccacatcaattcgaccggcaattcatgcaggaagccgagctcggcgtcgggatcaacgacgacaagtccatcgggcttggcgacctgggaggcgatcttcgcgaggtgcttggtgcgggcgacgccgaccgagatcgcaaggccgagctcggtgcgcacgcgccgccggatcgccgcggctatttcggcgggcgctccgaacagatgcgtgcagccggcaacgtcggcaaacgcctcgtcgatcgagatgcgctcgacaagcggcgtgaagtcgccgatcaccttgatggccgcgtcacccagccgttggtaatcgctgaagtggccaccgacgaaaatgagctgcgggcagagccggcgagcttcccgtcccgacatgccgccgtgcaccccgaaagccttggcctcataggatgctgcaagcacaactccgccaccgaccgcgatcggcttgccttgcagcgacggttcgagcagctgctcgaccgacgcgtaaaacgcgtccaggtcggcgtgaaggatggtggccgcttctgccatctcgatccgtcaaccctgacccgagcaagattgccggtccctggactctacgacagctgtaagaacaaaacaagaacatacttaaagcccgatcaagccggaatttatcgcgggcgctcgcgtcccaagcgaagccgtttcgtcagcgggtgtcggcgcacgctccatttcgacacgtctcggctcgcgcgatgtcgaaggagttgcctgctgcagatcgcgcggcgtccaagcgcgacgacgcacggctcgcgcatcgcgtcgcacccaacggccgggcttgctttgacgaacgcgctttttcgggtagatatcctgtcatgaccgaccactctcatcaggtggacttccaggccgcggcctacctctacaaatggccttctctcggcaattccaggcgagaggatcgcgcgccctatatgatcgtcaacggaacgctcgaccaatgcatccgggacttcatgggcaaaccggagaagacccgacacctctacgagatccggaccaggtcgcagcctcccctcgtgcccgatgtgctatcgcccgagcatgtgatcgagctctccaggcttcgggaatttctctaagccgcgcgggcggacgataggcagtggcagcgagcaggagcggcagccagggccgaaggtaatcgctgcgcctggcattcacgcctggccccgtctcgttgctcacctgaagcgagttgccgcttgactgcatgctttctgaccctcgctgtcgatcatcatcgactcggaccgatgggtgccacccggcaatcgccgaaaatcgcacttttcaataacaggtcgcggcgtcgcctccgagccggccacacccctccgggttgaattgtcgccattgcgtgaccgccgccggcggcttgctcgcgtcggccggcgcagttgataacctgctgcgctcttcgtcgaggaactgcgaatgaagcttctggatctggacgtttcgctcgagcagggacatcgttcttgcttgaacctgctcggccaacgacttgcgcagcgcgtcttcccgatcgagccattcgggaaactgcaacagcggccggacgcggccgatcgccttgatcatgcacgaggcccgcgccaccgcttgcgcgatctgatccggaaagccgctgcggcattccgcgagcgcgccgttcaggctgaccgtttcggacgccgttgccgttgcctgttccgcctccccttcaacggcttggcgagcggcctcacaacaagacagcaggccgcagagcgcaagggcgacccggcatcgcgcgcacgtcggtcaccgcaagcctgccgtcgcgcgcgcaccccgcccccacagccgtcgccatgagcgcggcgtgatcaccgcgccatcggctcctgttgctgtcggtggccgtccaagacgagcgatccgaagctcgcatccgcaaaaatcgtgtgtgcaaaaaagtggtatctcgaaatattgcatcggcgcgaaatagcgccggtacgcggcaatcaatttagatgtagtcttgttcgtggcgcaatgatcaccttgtgggcagcggctcgacagttcgtcagccgcccgccgcaccgttgcgtgcgctatccgagccacgcggatgtagtcggtgcagccgtgccgaccgaggcgatagcaggaaattcctcgtcgcaagccgtcgtgcttttgcaggtggcgtgcggccccgccgcatcgaccggcgtcttatcaacacgcgcacgatcgggttgcccttagtgaaaatcggcccgccgccatcggatcgacatgtgccgggacagaacgtatcggcgctgtcaaaaatttccgcttcgtccccacgggttccatgttctaggatcggccatttcgatgagagcgctcccccatcatgcgctcgaggaattttagaaccaaaacgtacaacagctgatccgggcctcatggggacttgagatgaccgatcgtattgcactcttcatcgacggtgcgaatctccacaccaccgtcaagagcctcggcttcgaggtcgacttccgacgactgctcgtggagttcggcaggcatggccaaatcgtccgcgcctatttctacactgtcgtgagggacgacgacgagttcagcagccttcggccgctggtggattggctcgactacaacggatacgcggtccgacgaaagtcggccaagcagcatgacgacggcgacgggcggcggcgtatgaagcgcagcatcggtatcgagctcgcgatcgacgcgttggaaatcgcgcaccgcatcgaccatgcgttcctgttctccggcgatggtgacttgcgagccgtcgtcgaggccgtcaggcggatgggcgtacgcgtcaccgtcgtttccagcattcgaacgaaacctcccatgatcgccgatgagcttcgcaggcacgctgacgtgttcgtcgatctcgacagcctcaggccgtcgatcgagcgaccggctcatccgattgcgccggagtgaggtcgccagcgccttccggcgtcgcccgcggggctcgcgctggcagagcgcgcgacgcggccggccgcgtccgtagatcaccgagttgcgcaggccgcgcggagacatcggtattctcgggcgacgcaactgcggccgcccgccgtactgctgcatcgatctttgcgaccaggttggacgagtccacgggccgagatcttccggttctatttttccagcaagtcgctctacgggttgaccagccacctcgcaggcgcgcaacccgatgccgaggcgacgcccttcgttgcaacctacctggcaacctgccgccagcaggaggtggtggctggccgttagggcgaatttaaccgatcttgattgttccgaccgacgttgtcgctcgccggcaccaaccgaaacgatccctggagcgcgaataaaccgttgaattttaataaaaatgctcggtgttccggtcaccggcgcccgatcgctctgccccacttaaggcgacggtgtggccgaaatatcataggttgcggaaccgtccgctgttagcgtcatccagattatacgtaatattttttttgagtagggacggaattatgaggtcggcgtacacggtgattgcgtgcctctgcctggcggcgacgccagcaaatgccgagcttttctccatcaacgatgcgttgcgccaggcaatgctgaccaatcccggcgtgggtgaagcgtctgccaaccggcgcgcgacggaaagcgagctgagacagactcagagcacgctgctgccgcaggtgcgcatcgacgccagctatggaccggaaaaattcgatcaaccgccgggcttcatcaccccgtccattcagtcggcaccgacggtgggttcgggaccgtggcgcaatggcagccaggaatcggtggtcgtgcgtcagctgctctgggacggcttctcctcgatctatgacgtctggcgccagaccgcgcgggtgaatgctgcggcctcccgcgtcaaggaaagaaccgagctgctggccctcgacgccgccgaaggttacatggacgtcgtgcgctacatgcggctcgtgagcctcgcccagcagaacgtcgccaaccacgaaaaaatcttcgcgaacgtcaactcccgcttctcgggcggccggtccggcgaaggcgacctcgagcaggcccgcgagcgcgtcgagagcgcccgcgcggccctcgccgaattccagcgcagcctcgatgacgcgagggcgaagtaccgcaaggtcgtcggtctcgagccgaccaaccttcgcttccccgccccgctcggcggcttgccacacagccgcgacgaagcgctggcgaccacgctgcggttcaattcgacgattgcagcggcgcagtccgacgccgacgccgccaagcacgcattcaaggcgaccgacggaacgtttggcccgaaattctatctcgagggacgggcgacccactacgacaactccttcccctacgtggcggccaccggaactcccgccattacgcacgaggactatagtggcaaggtggtgatgtcctgggacatcttccgcggcggccaggatgcctggaacaggtcggagaaggccgagcgctataccgaagccaccatgcgccacgcgcgcttgcagcgtgatgcctatgaatcgatcgacaaggcgtggaatgcccgtacgattacggccacgcgcatcgcggccctgacgcggcagctcgaagcggaccgcaagaccatcgcggccttccagaaggaatacgagctcggccagcgctccctgatcgatctcttgaacgcgcagaaccagttcttcaacgcgtcggtctcgctcacctccgcgcgcagcgtcgtcgttttcgccgactaccagctgctcgccgcgatgggcaccttgatcgagtatctgaaggctccgccgccggtcgacgcggcacccaccgacatgctgtcgatcggcctgccgcgctactcgttcccgacccttcgcgtgaacctgccgcaaaccggccctgagccggtgcatgtcgccgttccggcgccggccggctcggttcgccctgccaggggctacaaggagggctatgcggcggcccagccgaaggatgtcggtttcgctgaccggttcaccggctcgaccacgatcgcttccgtgcccggctcctcggaatggatgcagcagcaaaagagcgctgcggacggcccgaatgtcatttacgcggacccgtcggacgcggcgaatgcgagttcctatgcgtcgacgaagccccactggctgctgtcggccttcccgagttcggtgcaatagatccgccaaccaggatcaggacgaagggccccgaacggggccctttcgattcccgtattaatacttaaagcatgtttcgctgattttgttcgccatttgttgtagcctacccccgaaatcatcgaatgcgattgctgcatttccattttggttgtcgaggtttcagttgtcatttcgaatccccagcgcggcggcagacgccgtccgcccctcgccggatgacccaatttcaaaacctgccgcgacaagtcgacggcccgcaatgggcgacgatcccctcaccgcatcgttgacttatcttgcggctcatcatggccgcgccgtgagccgcgaggcgctgctcggcggacttccgatcacggacgggcgtctgtccgtttcgctctacgatcgcgcggcaagacgcgcgggtctggagaccgaggccatcaagcgcgacatttccgacattcccgccctggtcctgccggccgtcctgattctaaagaacggctccgcgcttatccttctcggcgtggacgcagcgggcaagacgatcaggatcgtcgatccgacgacgccgaacgccccacgcgccaccgacatcgcttcgcttgccgccgactacaccggctacgcgttcctggtgagaagcgcagcacaggccgatgcgcgcaccgccgccgcaggcgacattcccaggaaccattggttctggtcggtggtgaaggcgcattggcgcagctatgggcacatcgcgatcgccgcccttctgaccaacgtcctcgctctggcgatgccgctgtttacgatgagcgtctacgaccgcgtcatccccaacggggcaatcccctccctgatcgccctctcgatcggcatggggctcggcatcgtgttcgatttcatcttccgcatggtccgcagccgcatgatagacgtgaccggcaagaccatcgacgtcgtgctcgctgccaacatcttcgagcatgtgatgtcggtgaagatggcgcagcggccgagctcggtcggcatcgtggccaaccagctccgcgacttcgactcggtgcgcgaattcttcacgtccggaagcgtggtttcggcgactgacctgctgtttgccatcctgttcgtcggggtgctgttcatgatcgccggaccgctggcctggatcccgctgatcatgctcccgctcgtcatgctggtcggcttcctgctgcagcgcccgctcgatcgcgcgatgaagcgcctgcaggccgaatccgccgcccggcacggcgtgctcgtcgagtcgctgtccagcctggaaaccgtccgcgcaaccggcgccgaggcgcggatgcagaccttgtgggagcgttcggtcgcggcgaccgccagatccggagaggacgttcacttctggtcgtcgatgtcgctgaccagcgcgagcaccgcccagcagatcacgagcctgctgctcgtcgtcgtcggcatcttcctgatcctcgacggcaagctgagcgtcggcgcgctggtcgccgcaaacatgctggccggccgcgtcctggcgccgatcgccggcatcgcgtccgtgatcaccaagggaacgcagacgctgacgtcgctcaaggcaatcgaccgcatcatgtcgatcgagcgggaacgatcgccgacccgatcctatgtcgctagacggatcgacgacggcaacgtcgcgttcgagaacgtgacgttcgcctaccccaaagcgccgggcaacgcgctcgaaaaggtcagcttcaagatccaggccggagaaagagtcggcatcatcggccggattgggtccggcaagaccacggtcggcaggttgctgctcggattctacgagccgaaggaaggccgcatcctggtcgacggcgtcgactcgcgccaatacgatcctgcggacctgcgcgccggcatcggctttgcgatgcaggacaccgacctgttctacggcaagctgcgcgacaacatcgccctcggcaagccggaagcgaccgacgaggaaatcctgctcgccgcgcggctctcgggtgtcgagagcttcatcgccggccatccgatgggctacgacatgccgatctcggaaggcggccgcagtctgtcgggcggccagaagcaggcgatcggactggcgcgcgtgctgatccgaaagccgcgcgtgctcttcctcgacgagccgaccgcccacttcgatattcgcagcgagcaggaattcctcgagcgactcaaagggctgcgcgacgagcgcatgaccatcatcatctcgacccatcgtctgtcattgctgaatatggtcgatcgactgctgctgttcgacaacggccgcctggtggccgacggtccgcgcgacaaggtgctcgcccttctccagggcaagccggcgtcgacggctccggcgccggagaacacgatccagccgaaatccgcatagcgagcgagtattatgccgtcttccgattttgcgtttgcaaatgatatccggtctgcggcgctgctgcgcacgccccgcacctcccgcttgctgttgtggacgtcctgcgcgctgctcgcgacgttcctgatctgggctcattttgccgtgctggacgaggtcaagcgcggcaacggccgcgtcgtgccgtcgcggcaaatgcaggtcgtccaatcgctcgaaggtggcatcgtcggcgacatcctgatccgggagggtgacatcgtccagcagggccagtccctgatgcgcatcgacgacacgaaattcgcctccgagttcggcgaaatccgcgaacgccgtgcggcgatggcggcgcgggtggcccgcctcgaggccgaggcacgcggacggaccgagatcgcctttccggacgatctcgacaaaatggttcctgccgcggtcgcgaccgaggccagcgtgttcaaaatgcggtctcagaaggtcgcgcaggacatcgacgtcctcaatcaacaggtcactcgcctcaccggctcccttaagctgcttgaacgcgagcagaccctgacgcggaagctttacgagcagaaggtggtgcccgagatcgagatgctgcggcttgaccggcaggcgaccgagatgaagggccagttggccgaggcgcagtcgaagatcgcgaccatcaccacgtcgttccgttcccaggccgacgaggatctcgccaaatcgcgcggcgacctcgccgtgctcgacgagaacatcaagtccgcccaggacagggtgcgccgcaccgacctgaaggcgccggtccacggcatcgtcaacaagctgaacgtcagcaccatcggcgccgtcgtggcgcccggcgccaatctcatggatatcgtgccgctggacgacacgctgctggtcgaaggccggattcgtccgcaggacatcgcctttatccgtccgaaccaggacgcggtggtgaagatcagcgcctatgattcctcggtctatggatcgctgaagggcaaggtcgagcgcatcagcgccgacaccatcgtcgacgacaaggcggagcagagcgaacgtcacgagaccttctatcgggtcatggtgcgcaccgagaagaaccacctcggcaccgagcagcatccgctgccgatcattccgggcatggtgaccacggtcgaagtgctgaccggcgagaaatccgtgctggactacatcatgaagcccgcccgcctgctgcgtgatgaagccctgcgcgaacgctgatcggagcctcaaggtacgtggttaaccgatcgtgacatcaggtcgttcaagttcgaacgaaccggcaaaccccggattgaccgccttcccgacaatccagggtacggcccgctccacttaactcagcttaagccgccaaagcgccagtctgcgtcccgataacagcggggacgcagatcgacgcacggacgttgacggtccccgacatttggggcgtcatatgaagtcgctgaagtttgcttcgtcagcggtcatggccgtggctgcattttcattgagcctttgcgtcgtaccgtccgcatttgctgcggacgagctttctctcggcacccccgccagcgagctcgcgccggcctcggatgccgcatcgaaccgcccgcccgccaccttcttcaccatcaccgacgtcctggccaagctcgacctgcagcgcggccgtggcccgaacgccattcgcaccgcctcgctcacgcccctcaacacggcgagtgacgcgttgccggcggcgaatccacctgcgcctgatggcaccgagccgttcggcctgttcagctttcgcgcaccggagaacggcgtgtggcgcaaatggcgcggcctcgaggccgacctcgccagggagcagaccgtccgcgagcaatgccgcgagaacgcgaccacctgtccgcccaatgccgcgcaattccttcgcctgatcaaggcggtcaaggccaagtccggacgcgagcggctggacgaggccaaccgcgcggtcaaccaggcgatccgctatgtgagcgactttgcacagtttggcgaagccgatcgctggaccgcgccgctcgccacctttgccaccggcaagggcgattgcgaagactacgcgatcgcgaaatacatcgcgctgatcgaagccggcgttccgcgcgaagagctgcgcctggtgctgggccgcgatcgtgccatccgccaggatcatgccgtgctggcggcgcgcctggacggccattggctgatcctggacagccgccgctccgaactggtcgacaacggcgaggtcgccaacttcacgccgatgtttgcgatcaacgagcgcggcgtccagctgcttgcggcgccctacgccaagcggctcccgctcaacgacgagttcgatgccgcgccggcggccgccaacgcggctgacggcgaatggagcggtgcggagccgatcgaggccgcagacccgctcccgggcttcctgcccgtgctgatgtagcggcgcgcgagcaacgcaaatccgatcgcgaaaaaaatccgcggagtagtctccgcggattttcgcttttgctgcaggcctcgcctagaaaatgtgaatgttcgcggccgccggcacgcccgtgctcagatgtgcgaggtccaccttgtcggagcccgtgccatttgccgagtaccagagctcatgcgtcgcattgttgaagaagaacttgttcgcgcttccactctcgttccaggcggtcgcgttgttctcggtcccgcccgtggctgccgatgtcgtgaactggctcgccgtaagaggatttgaggcgcccgccgggaggcttagaccgctcacgtcgaggaggaccaagtcgccgctgttgaaatcactaatggtaaagtgggcggcgagattgagaacgaacttgtcgttgccaccgttaccagtaagcgtttcattggtcgctccggcgacgatgacatcgttgccggcggtccccgaaagagtcgttccgccgttcacgttcacatcgaaggaccccgaagcgatatctccgtcgccgtctttgacgcccacagtgaagggaacgtcggtttgaccattgttgacgagctccgtaattccagccaacagaatcttggacttgccgcaaacttcatacatttccacgtagtcgatatttccgtgtccgttcgccgtaaagccggccccatcggtcgacgaattgtaaacgccgtgagtcaccgtgccatcgatgctgtgcacgacataatcgataatggacggaccaccgccaagggttttgacggagaatgagatctgatttcccgttgcaacggccggagcaccaaatgctgtaccgtagatccaggtatcgccatggctgttgtcaccgacacttccaaaatcgaagcgcatgaagtcgccggcgtcgaagacgttgctgtggacaccctcgcctgtcgaacttgccttgacggtgtcctggctcagctggaaaaaattcagcgtgtcgtgggtttcgttgaaccagctattgacgtcgaaaaatggggttgtgtggtagcccgtcaatatggtgacgggattgccgctcgtgtctgccaatgtggcataccaaaccggcccggaaccacctagcttggccggattgacggccagcggcgtatatgaatcgagcgcatgctccaggtagaacgtgtaagtcgacgttgtcggatcgagcacgaccttgaagacttccgccccattggcgacaccgtgaaggacgccatttgcgtcaacatactccgagaccgcaaatccccccgattggatcgtcgtcgcagtaggatgtagcggatccgtggatacgcccgtgaaatagatcaatcccagaccatccgcgccagttacgaattgcagacctcccgttacgctgatgcccgccacattggcgatcactccgtggtctgccgacgtccagatcggcttgtcgtcgaccacattggcggtgatgtggtcggtcaccgagccgccgttcagcgtgtcggtcgccaccacgttcagcgtgccgaggtccggcgacttcgagccttcgccctggatcccagcgtctccgtcaccgtcacctggccggtggtgccgtccgcgttcagcgtcagcttgccgaactcg

SEQ ID NO: 9 - DNA, 193244 bp, Bradyrhizobium enterica
aggctcgcaagcgctcgcacctccagcgacaaaggcgaagcctttgcgcggggatgacggtagagctacgcgaaccgcaccgacaccttcccgatcgcgccgaaatcggccgcgaagacgtcacccgcggcgatcggcagcggcggatggcaggtgcctgtggtgacgacctcccctgcccgcaacgtcagcccgagcgcgcgcaattcgttggcgcaccaggcgagcgccacgcggggatcgccgagcacgttcttgccgtggccgatgtaacgctcgccgcgcagcgtgatggtcgggcgatgctcgacgaggtcgatggcgcgccagtcggctgacgtcgcgggtccgagcacgaacagatgcgcgcatgcattgtcggcgatcagctgcgcctcgccggcggacgtgaaatcggtgaaacgcgaatccgggatctcgatcgcgggatgcaacgtgccggccgcctccagcacttcccttacgctgtacggcgttgcgcgtggcgcgaggtcgcgtgccatgcggaaggcgaattccggttcggcgacgcgcatctcgatgcccttcatcgaggcggtgccgccatctgcgatcaccgtttcggcgaggatgcgtccggccagcggcccggcaacgttgatgtgcttctggccggcctcgctggtcgccgcgatcttccagccgaacagtttttcgcgcgaggtcttttccagcccggcctgcaccgcgtaaccctcggcgcgatcgcgcggccgcatggcgctatcgagtgcaccgagtttcgttcccgcgcgccagtgctcgctcaggacgttcgaggcagcggcgatctggttgttgtcgggcatgttgttcgctcccgcgggaattattctttgttgcacgcgatctcagcacaaacgcatcgcgcttgtcgcgtgggaaaaccgatgcccagctatctactctatgatgatctttgtctttggcgacatccgccgcaacagccgcagcatcgacgctttcgtcatcgagacgcagcctgcggtcggtccgaaattcggccgcgccagatgcaggaacacggcgctgccgcggccggcgacgcgcggtgcggcgttgtggtcgatctcgacgatgaagtcgtagagatgatcctcgcgggtcagccggtcaccgccctgttcgcggtcgagccggatcggccggttgtaatggcggtcggcgggattctcgcaccaggcatcctcgcggcggatcggccgggtcggcagcaaggtcaccggacgccggtggcggtcggcgcgccaccagagttgccgcggatggaagatgccgcgcggcgtgccgccgtcgccctcgcgcttgttggcgaggattccgccgcgcccgagtgccacgggaacggtccagccatcggccgtcagccagccgcggcgcggatcgccggcggcggcgcggacctcgatggcggagagcgggcgatcacgtttcattgtcggataagtgattgaaatggctgatcttcccttaagaatcgttccaaactgaacttgccctggttggccctgttattctattccccggcattacaggacattcacgtcctgccccgccggatttgaggtagactgcgctgccttgtgaatcggtaacaatcgcctacctgagcacatacctagccgatgctacggccttaagcgccctccgcttctgaccgccccgcccccgaaggattgtacctatggccaatgcccgcaagatcttgatcgtggatgacgataccgatctgcgcgatacgctggtcgagcagctgtccctgcacgaggaattcgaagcctccgcagtcgataccggcgccaagggcgccactgccgccaaagccaattcccccgatctggtcctgatggatgtcggcctgcccgacaccgacggccgcgaagtggtccgcagcctgcgcaagggcggcttcaaggcgccgatcatcatgctgaccggccacgacaccgattccgacaccatcctcggcctggagagcggcgccaacgactatgtggccaagccgttccgcttcgcggtgctgctggcccgcatccgggcgcagctgcgccagcacgaggccagtgaagacgcggtgttctcggtcggcccctattcattccggcccggctcgaagatgctcaccggtgccaatgccaggaaggtgcggttgaccgagaaggaaaccgcgatcttgcgcttcctctatcgtgccggccagatgccggtgtcgcgcgagaccctgctccaggaagtctggggctacaattccggtgtcaccacccacacgctcgaaacccacatctaccgcctccgccagaagatcgagaaggacgccgccaacccggaaatcctggtcacggaagccggtggctacaagctggtgccgtgatacgcttcgcgctcaacgattcgtgaaatcgaggcgcaccgcggttaccggccctgaatgtcgatcgatgatgacgtagccctgctcgagcgggtcccgacgatgcgtctgttgggcgatagctccttgcgcatgctggcgatcggctccgagcaacgcgacttcaacgcaggcgaggtgctgttcaagacaggcgacactgcggacgccggctatgtcgtgcagcgcggcaccttccgcgtcgaggaaggcggcgccgagatcatcgccggccccggcgcgctgatcggcgaactcgcattgatcgtcgcgatgaagcggccgtcgaccgccatcgcattggagcgcggctcggtgatccgtgtcgcgcgcagcctgttccagcgcgtgctggagagcgaccccgccgctgctcgccgcctgcgcgacgaactcgcgctgcgcaccagccagctcgcgagcgatatcctgatcgcgggcggcaagttgagcacttgagctgccgagatttggccgacagccgcgccgcttactccacctctccccttgtgggagaggtcggattgcatcgtgagatgcaatccgggtgaggggtgaggtctgtccaccagtgcagtccctcgagggaccgcgacccctcacccggatcacattacgcttcgcttcatgcgatccggcctctcccacaaggggagaggcgaggtgaagcaagcggctacgctgccgtctaaacctccatcacggccgtcaccggcacatgatccgacggccgctcccagctgcgggcgtcgcgggtgatcttgaagtcgctgacctggtccttcagcgcgcgcgagacccagatgtggtcgagccggcggccgcggtcgccgacggtccagtccgcggagcgatagctccaccaagtgtagaccttttccgacatcgggatccgctcgcgcgcgatgtcgaaccattcgccatgcgcctgcgccgcgagcagcttctcggtctcgatcggggtgtgcgagaccaccttcaacagctgcctgtgcgaccacacgtcgttctcgtgcggcgcgacgttgaggtcgccgaccaggatgtggcggtcgtcgccgcgcggatgcagcggttcgcagctcttcatctcgtcgaggaattgcagcttgtgctcgaacttcggattgagcgcgggatctggaatgtcgccgccggccggcacgtagaaattatgcagcaccagcggcttcgaaagctgcgctttttccccgaacgataccgagatgtgccgcgagtcgatcttgtcgcagaacgtccggatgtcggtcgtctcgaacggcaggcgcgagacgatggcgacgccgtgatagcccttctgcccgttcagcgcgacatgctcatagccgagccgcttgaagcgcttcaacggaaacgcatcgtcgatgcatttggtctcctgcaggcacagcacatccggccgcgcgctcttcaggaatttggcgacgatgtcgatgcgcaggcgcaccgaattgatgttccaggtggtgacggagaaccgcatgagagctgcgtcttagcacggttctcggtgcgggtcggtgctttgtccacaatgtcgtaggcgtaggatggggagagcgaagcgaaacccatcatcctcccgcgcggaccgaagttgatgggtttcgctgcgctctacccatcctacgccatctcgattagcccggcgacgagcccggataggtcgtgaagtcgatcttgaacaggcccggatcgggcttctgcgtggcatcgagattgtagaccgcaaccgtggtgtcgtagccctgcggatcggtgacggtccattgcttgagcttgccgtccttggcgccgatcatcagcaggaagcggctggtaccgaccagcgcctgcttctcctcgatcgtgatgctgacgaacacgtcgtcggcggtgacgctgacgacgttggtgtccttcatcaggtcgatgcggtccgacagcagatagcgcagcggggtctgcgacagcggatagatatcctgggtggccagcctgcggtcgcgcaccgcgaccgacgagccgtcggcgatcacttcgatggtgctcggattttcgtattcgaaacgcagcttgccgggcttctggatgtagaaatcgcccttggtcttggtgccgtcggggccgacctggacgaagtttccaaccagcgtctgcagcgacgacagataggccgagaccttggcagcctgtgccttctggttggcgtcaaaggtctggaagatgttggcgggcacgttgcggcgcggatcgggaatcaccgggtccggcggtgcctgggtggcgcccgtcgtggtcgggcccttgtcggcattgctctgcgcgccggggtccttggctttcggtgcagccttcggtgcgggttttggcgtagccggcgcattctgcgcagtcgcgccgccggcgatcgcggcggtgacgagaagagccagcgcaatgcgcgtgccgcggtcaatgaggtgatttgccatcagatatgtcaggtctctgttcgacgctcgtcccgcttcgccggattttatcccgcctcttccgagggagatatggtttttccgtgatgatcgcccccgatcagaactggccttcttcctccccgaccaggatttcgcgctttccggcgtgattcgccgggcccacgatgccctcaagttccatccgctccatcagcgaggcggcgcggttatagccgatctgcaaccggcgctggatgtaggaggtcgacgccttgcggtcgcgcttgacgatcgcaaccgcctgcgtgaacaggtcgccgccgccgtcgccgcccatgccggtggcgtcgaacacggcgccgtcctcgtcggtcggctcttccgcggtgaccgcttcgagatattccggagcgccctgcgtcttcagatgacgcaccaccttctcgacttcctcgtccgatgcgaacgggccgtgcacgcggctgatgcggccgccgcccgccatgtagagcatgtcgccctggccgagcaactgctcggcgcccatctcgccgaggatggtgcggctgtcgatcttcgacgtcacctggaaggcgatgcgggtcgggaagttcgccttgatcgtgccggtgatgacgtcgaccgagggacgctgtgtggcgaggatcacatgcaggcccgcggcgcgcgccatctgcgcgaggcgctgcacggcgccttcgatgtccttgccggcgaccatcatcaggtcggccatctcgtcgacgatgatgacgatgtagggcagcggctcgaggtcgagcttctcttcctcgtagatcgccttgccgctctccttgtcgaagccggtgtgcacggtgcgcgtcagctcttcgcccttgcccttggcttcgacgaggcgcgcattgtagccgtcgatgttgcggacgccgagcttggccatccgcttgtagcgctcttccatctcgcgcacggcccatttcagggcgacaaccgccttcttcgggtcggtgacgacaggcgtcagcagatgcgggatgccgtcatagaccgaaagttcgagcatcttcggatcgaccatgatcaggcggcactgatccggccgcagccggtagaccaggctcaggatcatggtgttgatcgcgaccgatttgccggagccggtggtgccggcgatcagcatgtgcggcgtgcgcgcgaggtcgatgatgacgggatcgccgccgatggtcttgccgaggcacagcggcagcttggcaaccgaatcgacgctttccttggcgaccagcagctcgcgcaggtagaccttctcgcgatgcgcgttcggcagctcgatgccgatcgcattgcggccggcgaccacggcaacgcgggccgacagcgcgctcatcgagcgcgcgatgtcgtcggacaggccgatcacgcgcgatgacttgatgccgggcgcgggctccagctcgtacagcgtgacgaccgggcccggattggccttgacgatctcgccgcgcacgccgaaatcctgcagcacgccttccagcgcgcgcgaattgttttccagctcggccttgctcagcggctggcgatcgctcgccttcggcgcgctgagcaccgagaccgacggcagctcgaacttgtcggaattcctcttcttcggcttcggctcggccttcttgcgcggcgcgcgggcgacgggagtttcctcctcctcgtcctctgcttcctcgtcgtcgaaagcctcggcttcgtcttcgtcctcgtcgtgatcgtcatgcgcgggcgcgatcgagggcgccgcgcggccgccgccgatattgggctcctggcgctcgaacgccgcgctgcggccctgcgatccgctcgacaccagtgatttataggctgtcgtgaacagccagccgagccgcgctttcgcgctcatcgccgcgtggaacagccagcccagcgagaccgagctgcggtcgttgtcgtcttcctcgacgaacggctcgtcatcgtcggagatcggcgtcagctcgtcgtcctgctccttggcgccccagccgcaggcaaacaggaagcacgccgccatcgcgacaaacaggatcaggccgagcacgacacggtagatgaagccgggcggcccgaacaccacggcaggcgcgcgcagcaaggcatcgccgaccacgccgccgagcccggtcggcagcggccacgctgtgttgtgcggccagcagctggcaaagcccgccgcgatcaccgtgcacaggatccagcagccgagccgcagcgcctcgcggtcgaacggacgatgcgtcagcatccgccagccccacaccgcgaccggcagcagcagcatgatcgcgccgagcccgaggatctgcatcaacaggtcggcgccgatcgcgccgggatagccgagcacgttgcggatcgcgcgcgaggtggcgtggctcagcgacgggtcctgcaccgaccaggtcatcagcgcggcggtgatcgcgcccgacagcgcgatcaggcccagcccggtcagttcgcgcagccgccgcgccagcgcctcgcgcagcgagagcggcaggtggccgaccagggggatgacacgttcgatcgctggcatactcaatcttcgcgcttggcgattaacccagggtttcgaccaggcgatgcatcgcctcggccgtcgattcactatcggagaccagcgcgaggcggatatagcccgcacccggattggaaccgtcgttctgctcgcgcgccagatagctgccggggatcacgcgaacgccggcgtcgcgatacagcctcaccgtcgtcgcctcgtcaccgccgcgatcggagacgtcgagccagacgcagaagccgccggcgggccgcttgtagccgtagcggctgccgaggatctggtcggcaagatcgaacttgatgcgatagagcctgcggttctcctcgacatgcgcctcgtcgccataggcggcgaccgcgacatgctgcagcggcaccggcacctgcggcgcggcgacattgcgcagctcgaggaaggcggccatgaacttgcgatcgccggccgcgaaaccgacgcgcatgcccggcaggttcgagcgcttcgacagcgattggaacgcaaccacgttggtgaagtcgggtccggcgcattccagcatgctgcccggggcttcgcgggtgtagatctccgaatagcactcgtcgctcaggatcatgaagccatggcgatcggcgagctgcttcagccgcgtgaagtaggcgcgcgaggccaccgagccctgcggattggccggcgaggcaaggaagaacgccacggtccgcgccagcgtcgcctcgtcgatcgaatcaaggtcgggcaggaagccgttgctgagcgtggtcggcagatagatctgctcgcagccggcggcgcgggcgccggcgccataggccggatagaacgggttcggcatcaggaccgcgggccggcccttgcgcggcgcgacgtaacgcgcggccgtgatcgcagcgaagaacagcccctcgcggctgccgttcagcaccatgacctcgctctccggatcgaccgggcgcggcaattggaaccggcttcccagccaggttgcgaccgcgcggcggaacggctcgatgcccttggccatcgggtagcgtccgaactcggcggtgtgccttgccagcaccgggccgacgaaatcaggcaccgggtgctgcggctcgccgaccgacagcgtaatcaatggcttagccggttggtacggcgccaggagctcggtggtgcgcacgaatggggaacgctcggcctggccggcggatgcgacatcgccggcgccctgcgccatgccggatgaggcggtcattgccatggttgaaatgccagcactttcactgcggtcggagttgaggggcgccgaccgtaaaccgatcaagtcaccatagatagggcgaggttaagacgcgattaaccatcgggggtgggcgcggccggccgcgccgtgatatcagcgctggccgcacaagactgcatcgaaattgcaccgagattgctcttggagacgatccgccgccgcgccgtcagggcgctcatcatcacggacgcgcgcgaagtgctgctgctgcggattcgcccgccgcacggggattgcttctggatcgcgcctggcggcggcatcgagggcgacgagacggcggaggcgacgttgcggcgggagctcgccgaggaattgggactggtcgccttcgcgcatggcgccgcggtctggcggcgtcaccacaccttcaactggggcggccggcgaatctcccagaaggaagagtaccggatcgttcatgcggatcgctttcaccctgtgatgactgatgcggccgaggccaaggtgcttgattgcttccgctggtggccgatcgccgatctatcccgcgctgaggagcggctgacgccgctgtcgctcgccgccatccttgaaaactatctgcgcgccggcgcgcccagcgagctgccggacgaggaagtgctggtcgactgacgcggactgccggccgttgccgcgcattcgagcgatctgctttacgcgccattaaggccagcgcgcgcgtcacgagttccttcagcaattggcaacacagcccgaacgaatgatccgcgcattgcgagggcgtgcggacggaaatggcgatcaagatcgagacacgcggcgacgtcctgcgccgcaccggcaaggtcatggtgactgccgcaggcatgaccgcggtgatgtccttcaccatcggcatgctggtgttcggccgcgatctgtcggcgccgatcacggtcggtcagatgcaggtcttcggcctcacggccggcgtcttcatcgccgttgcgctcagcggcgcgatgtcgtatcgcgccggcctattgatgctggagctcacgcggactcgccgcgagctggcccagatctcgcagaccgaccaattaaccgggctcctgaaccggcgcggcttcgatgccgaagcggcggcagcgctcgacaaggcgcaggaagatggcgcgtcggcggcggtgctgatgtgcgacatcgaccatttcaagtcgatcaacgaccgctacggacatgagatcggcgacaaggtgctggtcgagatcgccgacgtgctgcgccagttcgcggtccggcacggcgcgctggtcgcccgctacggcggcgaggagtttgccgctgtcgtgaccggccggagccacgagcaggccgcgcgcggcgccgaggagatccgccgcgattgcgctgcaagaaccatcctcgacggcgtcacccagctgccggtgacgatcagcatcggcttcaccgtgaaggaagccggcttcgatctcggcaacctgatgcgcaccgccgaccaggcgctctacgccgccaagcgccacggccgcgaccgcgtcgagcacgcgcgcgatgccgcgtgagcacttgtagcccggatggagcgaagcgcaatccgggctacacactgaacgtatcgtctcaatgcgccggcagcttctcgaatgacggcttgccctcgggcagatggtggaaggtctgcttgtcgcaggtgtagatcgtcatctgcggggtgaacacgctggggtcgtcgaaggtgccgaccttcaggatcgcggcgggcaggcccggcaccttggtcaccagatgcgtgccgcattccgggcagaactcgcgggtcacggcgcgctcgagatccttgcgggtgaactgcttgggctggctcgcggtgtatttgaagccggtgaccggcatcgccatgaacaggttcgggccgccgcccgtgatgtactggcattcgcggcacaggcattgcgccgccatcatcggttcgccttcggcctcatagcgcacgttgccgcaatagcacccgccttgcaccttcatgacgtcctcccgtttttgttgtcggcttcattgtttgtagcctgtcattccatgatggcaggcaattccgacattattttctcaagccgcagaaaaaagaaaggggctccaacttgcgctggagcccctcaacggtccggacattgccgggtatgtgcccggaccgtagttctggacctggccccggagggagccagagtcccgggagaactcacatgttgtaggcgcgctccgtgtgctcggtgatgtcgaggccttcacgctcggtctcgacgttggcgcgcaggccgacgatcacgtcgacgatcttgtagaggatcgccgaaccgatgcccgaccacaccagcgtggtgccgacgccccaagcctgcgagatcatctgcgccgcgaagtcgtaatcggcgaccttaggcgggatcgcggtgtagtcgatgatccctgcgccgccgagcgccgggttgaccaggatgccggtgccgagcgcgccgatgattccgccgacgcagtggacgccgaacacatcgagcgagtcgtcatagccgagcgcgttcttcaccacggtgcagaagaacaggcagaccacgccgaccacgaggccgagcacgatggcgcccatcggaccggcatagccggccgccggcgtcaccgcgacgaggcccgcaaccgcgcccgagagcgcaccgagcaacgagggatggcccttgatgatccattccgcgaacatccaggccagcgccgccgcggcggtcgccacgaaggagttggtcatggcgagcgcagcgccgccattggcttcgaggttggacccggcgttgaagccgaaccagccgacccagagcagcgaggcgccgatcatggtcatggtcagcgagtgcggagccatcagctccttgccgtagccggtgcgcttgccgatcaggagcgcgccgacgaggccggcgatgccggcgttgatgtgcacgacggtgccgccggcgaagtcgatcgcacccttcttgaagatccagccggcgtcggcgttgatcgcgtcgagggcggcctgcgccttcgtcttggcatcgccttcagccgcggcggcgagcgccttggcggcatcctggatcgcgtccgggcccggccagtaccagaccatgtgcgcgatcgggaaatagatcagcgtcacccagagcgggatgaacagcgcgatcgccgcgaacttcatgcgttcggcaaaggcgccgacgatgagggccggcgtgatcgccgcgaaggtcatctggaagcacatatagacgagctccgagatgttggcgtcgaccgagaaggtcgccgccttcgagtccggcgtgacgcccatcaggaaggccttggagaagccgccgatgaagtcggagccgccggtgaaggcgaggctgtagccgtagagagcccagagcacggtgacgaggcagacggtgtaaaacacctgcgccagcaccgagagcatgttcttggagcggaccaggccgccatagaacagcgcgaggcccgggatggtcatcaacagcaccagcaccgtcgaggtcagcatccaggcgttgtcgcccttgttgacggttggctcggcgtaggcggcggtcgcggcgaaaaggccgactgcaagggccgccagtcccgcgccatagggacgcttgaacgtcatgttatttcactcctgaggtcttgaaaggttgagcgcgaaaatcaaagggccgcggcatcggcctcgccggtgcggatgcgcacggcgtgctcgaggctgatgacgaagatcttgccgtcgccgatctgtccggtcttggcggcggaggtgatggcgtcgatggtcttgtcgacctggtcggagccgactgcgacctcgatcttgatcttgggcaggaagctcacggcatattcggcgccgcgatagatttccgtgtggcccttctgacggccgtaccccttgacttccgtcaccgtgagaccgtgaacgccaatggcggtcagggcgtcacggacctcttccagcttgaatggcttaatgatcgccataacaattttcatgagtcctatccccgcttggacccggcgcgaacgaacaccgggagtttcgactgaggttcaccacgcggaggacatccactacgcgggcacagccacgacccttagaatcaaatgccgtgccaaccggcccgagttcgctaatggattatgaatccggatgttttcccgcattgcgggagccgggtgcccctgtgctattcggtcgcgcctaaaatctaatcagactggctcaattcgtgagcaagccagggtccggacacaattctgctcagctgggcagcagcaataggtatttagatggggtgttgccgggccattaggcggcgtcgcgcgccgcgaagaccttgtcgatcaatccccattcgagcgcctgctgcgccgacatgaagtgatcgcggtccaaggtccgttcgacgtccgcctcggagcgcccgcaatgctgggcgtaaagccggatgatgcgccgcttggtctcctgcatttcggtggcatggatcaggatgtcggaggcctggccctggaagccgccaagcggctgatgcacgtggaggctggcattcggcagcgcggcgcggtggccgggttcgccggccatcagcaggaacgagcccatcgaacgcgcggtgcccatgcacagcgtatgcaccggcgccttgatgaactgcatggtgtcgtacatcgcaagcccgctggtgatcacgccgccataggagttgatgtagaggttgatcggcttgttcgggttgtccgcctccaggaacagcaattgggcgcagaccagtccggacatcgcatcattgacctcgccgttcaggaagatgatccgctcgcgcagcagccttgaatagatgtcgaacgagcgctcgccgcgggtcgattgttcgatgaccatcgggacgagttgcatcatgtcgcgcatcggcgacctccatgtctgcaggtgatgacgtctcagcggatgaagtttgcgatcaggccgcgcgcatcagacagcgcgtgttgctgttggccggttgcggcggtttttccctgatgccgcaggcctgctggatgatgcgaaaccgcgtgccgccggcctcgttcggctcgatccggaaggtgacatggctttcgcgaaacggcggctcggactcgcggagccggtaacggacctcttcgcctgttatcgttgattccggctcggcgccggcgagatcgcaatccggcagccagcgttcgcgcagcgccggaatggtcacggcgcgccatactttttcgggcggcgcgtcgagctcgtattcgatcaccagagctgcgtcggtgtcaggctcgaccatgtcgctcattgatccatgtccttcagcaggtcggagagcgcttcgatgcgcttcggccaataggcgcggtagcgggcgagccagctgccgatgctggcgatgccgtccgggtcgacctcgtaattcacgaaacggccctgccgctgctcgcgcaccaggcccgccgcgcgcagcaccgccagatgctgcgacatcgccggctggctgatctcgaggccatcgcgcagggcgctggcgttgaggctgccgcccgcgagcttctcaaagaccttgcggcgggtcgggtcggccagcgccttgaagatatcggcttcgatcatgccaacacataagcacacacttatgtgttgcgcaagcccgaactgtcctcacgccgtgctgcgtgacgtcgggcgccctttgcatggggttgttttgcgaattttgacgctgggctccccccggccctgtccaggcggccgctactgcaacgcttcgccgtgctgcgagatgtcgaggccttccatctcctgctgcatcgagacgcgcagcggcacgaagacggagaccagcttgagcagcacgaaggtgacgccgccgcaccagagcgctgtaacgaccacgccgtagagctgggtcagcagctggttcggattgccctcgagcaggcccgaggtgccgccgatcgcggaggccgcgaagatgcccgcgagcagcgtgcccgtcaggccgccgatgccgtgcacgccgaacacgtcgagcgagtcgtcatagcggaagcgatgcttcagccaggtacaggcccagaagcagaccaggccggcaatgatgccgatgatgacgccgtgccacggtgccacgaaaccggatgccggggtgatggtgccgagccccgcgaccgcacccgagatcatgccgagcaccgacggtttgcggcgggtcgcccattcgatcgcgccccaggtcagcgcgccggcgcaggccgcgagatgggtcgcggtgatcgccatgaccgcgcgcgaattggccgcgagcgccgagccgccgttgaacccgaaccagccgacccacagcagcccggtgccgaccaccgcgagcgacagatcgaacggcgacagattgtcatggccaaagccatgccggttgcccatcaccttggctgcgacgaggccgctgatgccggcggagagatgcaccacgaggccgccggcaaaatccagcacgcctgcggaagcaaggaagccgccgccccacacccaatgcgccagcggcacataggcgaagatgaaccagccgatcgagaacagcacataggcggagaaccgcatgcggtcggcgactgagcctgccaccaacgccaccgtgatgatcgcgaacgtcatctggtacagcatgaacagcgcttccgggatggtcctggccgccggattgacgctgtccatggtgatgccggccaggaaccagctgtcgagcgagccgagccagggaccgttgcctacgaaggtcagcgaatagccgaaggtgacccagaggatcgagatcagcgcgacggcggtgaggctctgcgccatcgtcgccagcacgttcttcttgcgcaccatgccggagtagaacagcgcgagtcccgggatcgtcatcatcagcaccagcgcggtggcgacgatcatccaggcggtgtcggcggcgttgatgccgggattggtcgcagaatcctgcgcgaagaccggcgtggcctgcgcgaacagcattgcagcagtgatcggcgcagctgacatcgctgcacgaagagctcgtgcccccatcatcattccccggcgtgtcgtcgtttcttggcgtggatttgtgacgtgcgccggcctcgttgccggcgacggatttgataaagctcagagcgcgtcgttgtcggtctcgccggtgcggatgcgcagcgcgtggtcgatcggcgtcacgaagatcttgccgtcgccgatctggccggtgcgggcgtgctgggtgatgacgctgaccgcctgctcggcgaggctggaatcgaccgcgatctcgatcctgagcttgggcaggaagttcacgacatactcggcgccgcgatagatctcggtgtggcccttctggcggccatagcccttcacctcggtcaccgtcatgccgtggacgccgatcgcagtcagggcctggcggacctcgtcaagcttgaacggtttgatgatcgcgacgacgagtttcatggttcaggcccttattcccttgaagttgtccctgtgcgcccgttcccggaccggcgcttgccgcccccggagcggcaatttgccgttccgcacatttcgcgttcgccaaatctggcagctttccgggcaaatggcacaaaaaagttgcaggtagaaggggaaaacgtgcgcagcgcatgaactccgtcactgtacgagacgacaaccctcggccagaatatggctttcccgccccggccagcggtcccgctggctcgtttcgcctaccgtgcgcccacctgcgcgcgcgccccgaggaacaagaaatgtcgaaccgaaactggttttatgcatccgaaggccagcaaaagggccccttgcctgaagcccagctccgcgacctgatcacccgtggcatggtgggtgccgatacgctggtgtggaccgagggcatggccggctggcagaaggcgggggagattccgggtcttgttccgagcgcaggggcgccgccggcgtttccgcaggccggcggaccgccgccggtggcggcgtcggcaggctatagcggcggcgcgctgtcggccgacttcccgatctggggcctgttcgggcgcagcctgctgatgttcatcggccagatcttcgtcatccccgcgccgtggaccgcgaccggcctgtaccgctttgcgattccctatatccgcgtgccgggccggccgcacctcgccttcaccggccagccgctcgacatctggtacgtcttcatcgtgctcggccttctgacctatgccggagccgccaacagcaacatcgtgacgctgctctcgctgctgttgcagggcttcctgagctggatgatcgtgcgctggatcttcggccgcctcagctcgagcggccaggatctcccgatctcgttcaacggcagccccgcggtctatgtcggctggtacgtgctgatggtggtcgcgtgcatcaccatcatcggctgggcctgggtgctgaccgcctggatgcgctggatctgccgcaatgtcgaaggcacgcgccgcgaggtcaccttcaatgcctccggcctcgaagtgctgtggcggaccatcgtgttctcgatcggtttcgccttcctgatcccgattccgtgggtgctgcgctggtacgccaactggttcatctcgcaattcgcgctgaccgagcgcggtgcctacgcaggtagctaaggaggatcacttcggctctgaattcatcagagccgaagtcgctcgaggacgctacttgcgttcgcgcaccgatccttcttgcgcgacggatgccaccagcgtgccgtcgggcttgaagatcaggccgcgggtcaggccgcggcctgactgcgcgctcggcgaatcctgcgcgtagagcagccattcgtcggcgcggaacgggcgatgaaaccacatcgcgtgatcgaggctcgccggcatcatgcggcgatcgaacagcgtgcggccgtagcgcgccatcacggcgtcgagcagcgagaaatccgaggcataggccagcgcgcacagatgcagtgccggatcgtcgggcagcttcgccgcggtgcggatccagacatggatgcggccgtcgtcgatctgctggccgaaatagcggccgagctcgaccgggcgcagctcgatcggccggtcgctttcgtagtagcgacggatgaactccggcatctccttgaacatcggctgcttcgagacttcctccgccgtcagcttctccggcggcggcacgtcgggcatcttctcctggtgattgaagttgctctcttcatcggaatggaacgagaccatgatggagaagatcgcgttgccgtgctggatcgcggtgacgcggcgggtggtgtagctcttgccgtcgcgcagccgctcgacctggtagatgatcgggatctgcggatcgccgggcaggatgaaatagcaatggatcgaatgcggcagccggccctcgacggtgcggcacgccgcaaccatcgcctggccgatcacctggccaccgaacacccgctgccagctcgtcttcgggctgttgccgcggaacaaattcacctcgagctgctcgagatcgaggatggacagcaggtcgatcaggctcttggacatggatgcgtcctggatgggttcggtttggatgtcgtcattccggggcgcggcgcagccgcgagcccggaatccattcatccaccgaagttgcggcctgatggattccgggctcgcgcttcgcgcgcccggaatgacgagtggggccggttggccgctcttgtttctcccccctgtttcgcccagctaatatcaggtagcaagcacagtctgatggcgtgaggcgcgtaaggaaaaggcatgccggcacagcgaagtattgtgatctgcgggggcgcgtttgcggggctggcgctggccgtggcgttgcgccaggggctcgggccggacatcccggtcatcgtggccgacccggcgttgagccagcggccgagccgtgatccgcgcgcgacggcgatcgtggcggcctgccggcggctgttcgaaaccctcggcgtctggggccaggtggcgccgaccgcgcagccgatcacggacatggtcgtgaccgattccaagctcgaggacgccacccgcccggttttcctgaccttcgccggcaatgtcgagccgggcgagccgttcgcccatatggtcgagaaccgctatctgatcgatgcgctggcaagccgcgccgaggccgaaggcgtcgagctgcgcgccacggcggtgtcgagcttcgactcacgccccgacggcgtcagcgtgcggctggccgacggcaccgagatcgatgcgagcctcttggtcgccgccgacggcgcacggtcgaagctgcgcgagcgcgccgggattgcgacccatggctgggactatgaccaatccggcattgtcgtcacggtcgggcatgagcgcgcgcatcacggccgcgccgaggagcatttcctgcccgcgggcccgttcgcgatcctgccgctgaccggcaaccgctcctcgctggtgtggaccgagacgcgcaaggacgccgcgcgcatcacggcgttgagcgaggacgaattccacgccgagctcgagcagcgtttcggcttgcatctcggcgagatcaaggcgctcgaccgaccgcgcgggtttccgctcggctatttcgtcgcgcgctcgtttgtcgccgaacggctggcgctgatcggtgacgccgcgcatgtgatccatccgatcgcggggcaggggctcaacatgggcctgaaggatgtcgcggcgcttgccgaagtcgtggtcgatgcggcgcggctcggcatggatctcggacaggccgacgtgctcgagcgctaccagcgctggcgccgcttcgacaccatggcaatgggggttgccaccaactcgctgaacttcctgttctccaacgaatcgacattgctgcgcaccgtgcgcgacatcggcctcggcctcgtcgatcgcgcgccgccattgaagagcatgttcatccgccaggcggcgggcctgtcaggcgaagtgccgcggctgttgaagggcgaggcgctgtaagctttcgtagcccggacgaagcggagcgaaatccgggctactacgcgatcgcatcagtcgatcttgcgcgcctcttccggcagcatgatcgggatgccgtcgcggatcggataggcgagcttggcagagcgcgagatcagctcctgccgcgcggcgtcgaattccagcggtcccttggtgatcgggcacaccagaatttcgagcagtttcgggtcggcggtgctttcgaggtgatcggtcgtcgagttcattgcggtctccggctgcagcgttttcgagcgaagcctgtcctgcacttgatgcgggatggataccggttcgcgtgaagaaaacgcgtcagaataaactgccgtgatgtagcatatctaaatacgcgctgtcagcgcttcgccattcgcaacaattcgtcgagcgcggcctgctgccgcgccttcggcagcgcctgctccgacagcgcatagccgatgaacgcccaatagaagacctgtgcccggccgcgcgccacctcgtcagggaatccggtctgccggagcagggtttcgatatagccgacgcggcgccggtcgacctcgagcacggcggcgcgcgctgtggtgtcggcggtggcccagctgcgcaccgcgcgttccagcgccagccgcgccgagaacgcccggcgcaacagcagcgccagcgcgtcgccgcctttcggaatggtctcgagctccgcgatcacctgctcggcggcgacctcgcgccaatgggtgaggatcgcggcgcggtaggcgccgatatcggcgaaatgccagtagaagctgccgcgcgagacgcccatggccttggcaagcggctcggccttgagcgccgtgaagccgcgccgcgccagcgtcttcaggccctgatcgagccagtcattggctgagagctggtccgtcatggtttcctcgtccgcgccggcaccatacacaagtgtattgacaggcgccagccccaggtgccatatccatgccgaccatacagtactgtacggagacgtcgcgatgcgtgatcttctgctgcaaggcgccggtgcgatcgctatcgtggtcagcctgatccacggcgttctcggcgaaaccaagatattcgcgcgcgcaacgatcgagccgccgcgcctgcgcttcctcctccatctggtctatcaagcgggcacggtcgcctggatcggcggcggcgtgctgctcgtcgccgcgcccacgatggcctccgatgccgcgcggcactggatcgtggcaacgctcgccatcgtgttcggctgcgccgcgctggcgaacgcggtcgcgacccgcttccgtcacttcggctggatggcgatgagcgccgtcgtggcgcttgcagctgccggctattagcgagcgcggcagggcgccgaaggcgccgccttgccggacgtacgaagaatttatggagtcatcaatttccgtgcggaatcggcttacgcgcggataaccatgccaccgaaagttgtagaaaattatcgagaatacaattcaatcggcctagcttgtccgcgcggacaaccatggaccgacgcatgtttcgtgttctgacgtgcctttcaggtgagcatgactggcggctcgttctgctcgccggactggtctgcttcgttgccagcattgcagccgtcaacatcttccatcgcgcgatcgcatcgcaggcgaggacgcggctgatctggatcgcgatcgcgggagccgcgatcggctacggtatctgggcgacgcatttcatcgccatgctggcctacgagcccggcgtgccgaccggttacggcatcacgctgaccgcactgtcgcttgccgtggcgatgatgctgacctcgtgtggcctcggcctcgctgccagcgactccagcggctggcgcgcgccggtcggcggcgcagtgatcggcgccggcatcgccagcatgcactatctcggaatgtgggcgctcgaagtgccgggccatgtggtgtggtcgatggacctcgtggccgcctccatcgtgctcggcatgctgttcgggtacgccgcgctgtcggttgcggtccgccatcaggatcgctggatgtcgctggtcgcagcgctgttgctgacgcttgcgatcgtgacgcatcatttcaccgcgatgggcgcggtcgagatcgtccccgaccccctgcagacgccggcggcgctgtcgctctctcccgccttcctcgccgtcgtgatcgcgggcgtggcgctctcggtgctcgggatgagcctggtcggcgtgcttgcggatcgaaggctggcgcttcgcacccgccgtttcgaggacatcatcagccagttgtcgctggcgcgccagcaagtcgaggcgtcgcagaaggagctggagcaacagaggttccggctcgataccgcgatcaaccacatgggcgagggcctctgcatgttcgatgcggcgaagcgcctcgtcgtatgcaacgatcgctacgccaaaatgtaccggctgccgcccgaactgctgctgcccggcaccgcccaccgcgagatcatcaagcaccggatcgccaatggcatcctcaagggcgagaccaccgacagcgccgcgaccgagaagctcgccacactgaacgcgctgccagccgacgagatcagcagccgggtcgacgagcttgccgacggccggctgatctgcgtgacgcggcagccgatgcccggcggcggctgggtcgcgacgcatcgcgacgtcaccgagcagcgccgctccgaggccaagatcacccacatggcgcagcacgacgcgctgaccgacctgccgaaccgcgtgctgctcaaggagtggatggagcaggcgctgtctggtgcgcggtgcggcggaccgagccttgcggtgctgatgctcgatctcgatcgcttcaaggacgtcaacgacacgctcggacatccggcgggcgatgcgttgctgaagtcggtggccgcgcggctccgccgatgcgtcagcgatacgacgctggtcgcgcggctcggcggcgacgagttcgcggtcatcgactatgtcagcgatccggttgccgaagccggcctgcttgcggagaagatcaggaaggcgctcagcgagccgatcgatctcggccaccatcggttgaccaccacgaccagcatcggcatcgcaatcgcaccgcgcgacggcaccgattcggacgaggtgctgcgcagtgctgatcttgcgctctactcggcgaagagcgttggacgcggctcgttccgcttcttcgagccggagctcgaccggttgctgcaggcccggcgcagcctcgagcgcgacatgcgcagcgcgctcgccaacggcgagttcgagctgcgctatcagcccttcatccacgtcgcgagcggagagacctgcggcttcgaggcgctgctgcgctggcatcatccgcagcgcggcatgatctcgccggcgcagttcatcccactcgcggaagagaccggcctgatcgtgccgctcggagaatgggtgctgcgcaccgcgtgcgcggaagccgccaaatggcccgccgacctcaagatcgcgatcaatctgtcgccggtgcagttcaggagcccggagttggtcccggtgatcgtgcatgcgctggcgagcgctggaattccgcccgagcggctcgagctcgaagtcaccgaaacggccatcatccaggacagcgaggcggtgttcgcggcgctcagccagctgcacgatctcggagtgcggattgcgctcgacgatttcggcaccggctattcctcgctgagcttcctgcagaagtttccgttcgacaaggtcaagatcgaccgcagcttcgtgtccgagctctcgggcgcaacggacgagtcgcgcaggatcgcgcgcgcgatcgttcgcttcgccgtcagcctcggcaagacgaccacggccgagggcgtcgagaccagggagcagctcgacatcctgcgcgccgatgcctgcgtggaagtgcagggcttccacttcagcccgccggtccagagcgagaaggtggcgcagatggtcggcgggcggaccccggcggcagccgaacgtcctgcggttcgtctcgcagtggcgggtggcgcttcctgatcgaacgccgcccgagcggatttcggatacccatgaggcgtaaggccgcagcacgcggtcaaaaccaaattgcgcgtggagcgcaaagcggttttccgggccgttagaatttctctaaagcctgccgcggccgcgcttccttgacttggcaatcccctcggcattgttcacgcatatgcccggcgcgatgcgcgttgtgggcatgatcgtcaacggaggggatgcgcgtgaaggtgattctgagtgctgtgattgcagcgtgcgttttggggcttttcggatcggcggcattcgccgacggctacaagacttgcaccaagctcgacaagacgtcgtggaagccggcgagtgatgccgaagccaaggccaaggcggccggctacgaggtgcgccggtcgaaggtcgagggctcatgctacgaagtctacggcgtcaaggaaggcaaactctacgagctgttctacagcccggaggatctcagcctgaagcacacgatcgccaagtgaactgtccagtgaatcgtcaagtgaatcgccgagcgaagcgggcgcgatgacggaggcggcgccgggcgcccgcggcgcgaccagcgtgcaggtctgggatctgccgctgcggctgtggcactgggcgctcgccatcctcgtcctggtcgcatgggtgacgcccaacgcctatgaccggctgcaccggctggcgggctatgcggtgatcgggctattggcgttccgtctggtctggggctttgtcggcacgcgctacgcgcgtttcggcaagctcggcgtccgcctgcgcgccgcgccgcgctacatctggaatctccgtcgcggcatcaccgggcgttacatcgggctcaatcccgcgggcaccgtgatgctggtggcactgctgctcatgctcgcggtctcggcgatcacgggcgcgatggaggtcaccgtgaccttcttcggtgtctggtgggtggaggatacccacgcctatgcctcggatgcggtcatcatcctggtttgcctgcacgtgctcggcgtcatcgttgtgggattgctgcagcgtcagaacctggtgcgcgcgatgttcaccggacgcaagcggctgcgcaatcgctgacgaacgcgtggcttttgtttgggcatgatctccgggcaaacgcggagcgtttgtcgcgcgggaaaactgcttcgcagttttcccgatcatgctcattgcaccggcggatctcccgaggtgcgcttcttggcgaggtccatctcggtgacggcgatcaggatctcggcgcgggtcttcaggtcgggcgcctcgagcatcgcctgcttttcggccggaccgtagggcgacatcatcgccagcgcattgaccagcgcctcgttgggcgcggactcgatgccctcccagtcgaccttcagattgttggcctccaggaagtcggcgagcacttcgagcagcgccttgcgatcgacggcgtcctcgcccttgcgcgcggtgaagtcgccggcgaaggagaagaagtcgaccttgcactgccggtacggcgtctgcacgatcagctcctcgaccaccttgaagcgcgcgacgccggtcaattcgaggatgtagcggccgtcgccggattcggcgagctgggtgatgcggccgacgcagccgatgcggaacagcaccggcttcgcctccttctgcgaatgcgccacatcgggctggatcatgccgatcaggcgatgaccgtcgcgcaacgcgtcgtcgatcatcgcgagataacgcggctcgaagatgttgagcggcatctggccgcgcggcaacagcagcgcgcccggcagcgggaacaccgggatcacctcggggagctcgccgggcccgcgatattcggcattgatcggcatctggggtcccgctgctgtgacgggtgtactttacgagaacaggatggtcgacaaccgcctgcgcccctcgacagttgcttcatcggtgcccccccacgcctcgaagaactgcaccagctgcttgcgcgcgccgtcgtcgttccacttgcggtcgcgcttgacgatggcgagcaactgctcggtcgcttcagcacgcttgttcattgcgttcagcgcggtcgcgagatcgaagcgagcctgatgatcgagcgggtttgcggcaactttctgttccagctcggcgatcgggccgaccgactgcgcctgttcggcgagatcgatcgccgcctgcaccgccttcaccgcggcgtcgttgcgcttggattccggcaccatcgccagcgtctgcttggcctgctcgaccgcgcctgatgtcatgtagcatttggcgaggccggccagcgccgcgatgttggtggcgtcgtgcgccagcacctcggcatagatctgcgcggcagccgcggcgtcgccttcggcaagcacggcgtcggcctcggccaggatctccgtgagattgggctcgccggcggcgggcacacccttggtgatcttctcgatgaaggcgttgacctgactctccggcaccgcgcccatgaagccgtcggcgggctggccattgacgaaggcgatcacggccgggatcgactggatgcccatctggcccgggatctgcggatgctcgtcgatgttcatcttgaccagcttgacccggcccttggcgttcttgaccgccttctccaggatcggcgtcagctggcggcaggggccgcaccatggcgcccagaagtcgatcatgaccggctggcggcgcgattcctcgatgacgtccttgacgaaggtctgggtcgtcgtctccttgatcagatcgggcgctgcctggggcgtggtgccgccctgctccattatcgtcacgttgtcctcgcctggtcgtctgaggtcaaaaattatgggggcgttctagcacgctccgtacggccggttcagccgttctgtcaggctagagcatgatcctggaaaagtgggaaccggttttccgcaggatcacgcccagtaaatggcggtcggtcggcaaatttcaatcgctggccgctcggccgggttcgatcggggaccccggatttcagcgccatcccactgggtggacctcggctcgaatcgccccggaacgagatcgccttgcggcccgttccagcggaaacgtaaaaagaaatccagcgggatcgtcaaattcggtcgattcggggtcaatttttaaggaaaccacgcgatttcgtgagtcccggaccgcgctcttgtgttgcattcgcaggcggcttttggcataggtctgccgttgccggcgagcgatcgccgccatttcggatgcgggtgtagctcagtggtagagcacgaccttgccaaggtcggggtcgagggttcgagccccttcgcccgctccaaaatctctcgctgaccgaatatctcgccgacagagctgacagtctgatgaaggcccgccccgctgcgggcttatttgttgttcaggcggttttgccgttcgggcagtgctcggcggtcaggatgtcgcggcccgcgatggccgcttcccgcctcgttaaccgtcagatcgtgcgttctcaaaactgatagaaatttgtggttgtgtcggcgctgaaatggctgcgctcgcctctcgacgcggcacgcacgtgaatgatgccgatcagctggacgccagattccgccttgaaccgccgcgtggctcgcgctgcatgtgttgcagcgctcatcgtgattgccggcgtcgggatatgctcgccggcttcagcccagctgctgccgagcgactccgcctatgccccggcacacggtttcttttccatgcccgggttcgagcaggcgccaggcttcgagcccgcgcagcagccgcggacccgggtctacatcacgacgcgctcgcattggggcggccggcagaacttctgcgtccggacctgcgacggccgcttctttccgctgccgcgcctgagcgagacggcggatgtcaggtcctgcgaggcggcctgtcccgccgccgaggtgaaactgtattccggctccgacatcgacagcgctaggaccggcgagggtgaggcctacaggacgctggcgaatgcattccggtttcagcgcgagatcgtgccgcaatgctcctgcaggtcaagcgcctcgaccggcctgtcgccgattgcgatcgaggacgacatgacgcttcggagcggcgacatcatcgccgccgacgatggcttcaagatcgcggcgatcaccagtggggcgaggcgcagcgtgttgttcaggccgctgtcgaaggccaaggcgcaggcgctcggcctggcgcgtctctcgtcgcgatagacacggatcgcgcgcgttagcttcattcgaatatgacgccgcagcgcagaatgccttgttatcaggcagcccgcgcaggaaaatttcgccttgaatctcgtctcaacttgttttgacgcagcgcacactgctgcatgcgcttttcagcgtcgatggatgtgctaccattttgccgtctgacctacctcacagaccacgccaaccatcatctctcagggcgttcaaaatcaataacaggcaagctgcaacggcttgcataggggagtgactcgatgaaatcagctttcaatcgatccatacttgcgttcgcggcgatcgcgctgctggcggggaccaccttcgccaatgcgcagcaacaaactgacaagagccgggcgttgaagaaatacgaatccggcaccaaggaattctggacccatccgccggatgactggttccttggcgacgagaccgaagcgcagaagggcctcgccccaccgtccggcccgccgaccggcgcctccgacgccgagctcgccagcatgatgaagaagatcaagctgccgccgggcttcaagatcgaggtctacgcctcgaacgtgctcgcggcgcggcagatggcctggggcgacaagggcacgctgttcgtcggctcgttcggcctcggcaatgtctatgcgatcaaggacaacaacggcaagaaagaggtcaagaccatcctcaagggcctcaacatgccgaccggcctcgcgttccgcgacggcgcgctctacgtcatcgcggtcgacaagctgatcaaatacgacaatgccgaagccaatctcgacaatctgggcagcggcaaggtggtgtatgacgacatgccgtcctatgcggcgcatggctggaagtacatcgccgtcgacaaggacggctggttctacattccgttcggacctcccttcaacatcggcatcccgccgacctcggtgtcgcagatccgccgcgtcgatcccaagaccggcaatgcggagatctgggcgctcggcgtgcgcaactcggtcggcggcgacgtcgatccgcgcaccggcaagtactggttcaccgaaaacgcgcgcgactggatcagcgacgatctgccgagcgacaagctcaacatgatctcgaagatcggcgagcatttcggctatccctattgccaccagggcaatttgccggacaccaagttcgcgatgggtcacaaatgctcggagttcaccccgccggtctataatctcggcgcccacgtggccccgctcggcatgaagttctataccggcagccaattcccggccgagtacaagaacgcgatcctgatcgccgagcacggctcctggaaccggcacaagtaccagggcggccgcatcgtgaagatcaccgcgagccccgacggcaagaacgccaagcaggaaatcttcgcctccggctggatcgagggtgaccagggctatctcggccgtcccgccgatatcctgctcgacaaggatggctccatcctcgtcgccgacgactgggccggtgcgatctatcgcatcagctacagcaagtaacagtcgaagcttatgaggctgcggtggccgcgaggcgaccgcagcctctgctgcgatcggataacggaaccacctcgtcatgtccggattgatccgggcatccatccaaacaagaaccctttttaaacctgatggattgccggggcatcctcgaccagctcgaggacagcgcccggcaatgaccgccggagaaaccgacaatgcgcgttgtgtccctcggaatgctgttcgcgtcggcggtcgcgctgacctcgtttgcccaggcggcggacaatgccgccggcaaggcgaaagccgaaatctgcgccggttgccatggcgacaacggcatctcgcagaccgagaacattccctcgctcgccggccagctcgatcagttcatccaatggcagctggtgttcttccgcgccggcgcgcgcaagaacgagcagatgcagccgatcgtcgagcagctcagcaacgaggacatccgcaatctcggcgcctatttcgcatcgctgccgccgttcaagggcggcaaggacgacaatccggatctgtccgagaagggcaagcaggccgcggccggccgccgctgcgcctcatgccacggcgacaccttcgccggcaccaaggcggtggcccgcatcgccggccagcgcgaggaatatctcgtcaaggcgctgcatgactacaagtcgggcgtgcgctccggcggcgcgcaggccgcgatggccgacgtggcgtatcccttgagcgacgaagagatcactgcgctcgcgcattatctggcgcatctgtagcggcgaatcatgttgtcgtcccggcgaaggccgggacccatacgccgcggcctctcgatttgaggcagatgtagtcgctatctcgccaaccaactgagttcggtggttatgggtcccggccttcgccgggacgacaccgatcgtattacgcctgccgctgcttctcatacgccttgagatgcgtgtaggccgtgcgcagcttcggcaccgggatcttggccgcgtcggcgcgcacgatcaggtcgccgatcacgtgatcggcttcgaccggcagcccggccttgatgtcgcggaacatcgaggcggtcatcggcgagccttcggtggtcaagagcccgcgggtacgttggaagaacgggccgcccggcatgtgcccggcatcggcggcgatcgcgctgcattcgtcgaggatgccgagcaggaaatccctgccgccgggcgcggccaggatgttgccgaccgaggtccgcatcaggctggtggacgcggcgagcgaggccaggaatacccacttctcccacatgtcctgcatcacgtgctcgctggcggccgcgccgttgatcgcggagaaggtctcggcgatcgcgcgcacccggtccgacagcccgccggcgcgttcaccgaaagccagggactgcatcggctgcagctgcaccacctcgcgcttttcattcagcgtcgccgcgatcgcacagagaccgccaagcacgtgctgggcgccgaacgtcttgtcgagcgcatcgagatgcagcatgccgttgagcagcgggacgatcgcggtcttgtcgccgaccgctggcgcgaacgacttgatcgcgtcctcgaggtcgaacgccttgcagctcagcagcacgacgtcgaatttgtcggagagcttgtcggcctgcaccgtcggcggattgttcagcgtgacatcgccgttcgggctcttgatcacgagccccgcggaggcgagctcggcggcgcggcggggccgcaccaggaacgtgacgtcgcggccggcctgaagcatccggccgccgaaataaccgccgatcgcaccggcgccgaccacgagaacgcgcatgggaatttgtccttctttgttgttgccccggggagcgggcgaagcccgaatggcggataaatagggatctgaaccggctattcgctactcgctattcgccgtccgctcatctcactttcccgacaccaattcctcgacttcgcgcagctgctccttgccgaagaagatctccttgccgacgaagaaggtcggtgagccgaacgcgccgcgctcgacggccgactgggtatattcgatcagcttggccttgacatcggcatcctgcgcgcgggcgaacagttttgcggcgtccaggccggaggaggcgatcgctttgcccgcgatctcgggatcgtccatcttcttcggctcgacccacatgtggtggaaagccgcctcgatatatctctcgaacacgccttcgagctgggcggcgaccgccgcgcgcatcaggttcagcgtgttgaccgggaagaacgggttccagacatagggcttgacgttgaagcgcttgaggaagcgctcggtctcgatcttcatgaattcgggcttgttcttgacgcctgccagcgtctcggccggcgacttgttgttggtggccttgaagatgccgccgagcaggatcgggacatattcgaacttgacgccggtgcgcttctcgatcgccgggatcgcctcatggctgaggaacgcgttggggctgccgaaatcgaacaggaattgcggatttgggctcacggcggtcgctccctttgggcttgtctagcatggacctgtcgtcgcaggcgccatcggtagaatatgatactcatcatgtgagccgcggcgcgcgatgtcaaatcagtcgcctgatggtctgcttgcgccataccagggcgtaataggccatctgcagcaggaacatggtcgcgaaggtgaccgggtaggcgatccagatgccggtgatgccgatggcccggctgagcacgatcgcgaccggcacctcgaccagtgcgatcgccagggtcgagaggaacagcggcatccacaccgtgccgccggcgcgcatcgcacccgagaacaccgtcgccatgccgaacagcaccatgctccacagcacgatgtagagcagctgctgcgcgagcgcgaggacggcactgtccctgatgaagaagcccatcagcggccgcgcaaagagatagccgagcacgaccagcccgccggtgagccacaagttcatctcgatcccggttctgacgatggcgccgacccggttggaatcgccgcggccgatcgcctgcgcgccgaagatcgaggtcgtgatggcgatcgagatcgccggaaactgcacatagccgatcacctggttgaccgcgccataggctgcggtcgcgtccgagccgaacccgttgacgaggccgagcagcaccagttcggcgagcgagaccaccaccatgccgatcgctgtgggaatgccgagccgcaacacgatacggagcagggcaccgttcggccgcatggcgtgcaggaatgccgcgtcgaacgcgagcggatgcttgttccgcagcatgtggacatgcagccagagcaatgtcacgacgcccgagacggcggaggcgatcgcggcgctcgcgacgcccagcatcggcagcccgagccagccgcggatcaacgcgggcgtcaccacgaggccgacgacggtcgagaccgtcaacgccaccagcggcgtcacggtgtcaccgacgccacgcatcatcgccgcgagcagcaggaacgcgaaggtcaccggcatcgtaatcatcatgatccgcgcataggacaccgcggcgtcgaggacgtcaggcggcgtggcgagcgcgatcaggagcgggcgggcgaacaggccgcctgcgatcgcaatcgcaagcgccagcagcagcgtcacggtcatggtcgtgccggcaacggccttcacccgttcgggctcaccggcgccccaggcctggccgatcatgacggaggcacccgcgctgaggccgatcacgaaggagatgaagaagaacatcaccgggaagaacaccgacgccgcggccagcgcgtcgaccccgatcatctggccgagatagacgccgttgatggtgccgaacagcgattgcagcacgttgctcagcagcatgggcgcgaggaagaacaggaaggatctgcgcaaggagggagggttggacacgttcaatttccgacgatgggggctggtgcgttttaggtcaggcggcatactcgctacacctctcccgcttgcgggggaggccggatcgcatcgggggctctcgccacacgaagagtgtcgcgagcggcgaaaccctcaccccaaccttcccccgcaagcgggagaggggcgcagctcattcgtggctgctgtacatcatcggtcgctaatccgcttgatcgctataggcgaggctgatcgcgtggtcgcggatatcggctggccagtccgcgatcagcgtcgcaaagcggcgccggtcgtgcgcgaacagcgcacggatcgcctcctcgtaatgcggccggttgccgcccattgtcgtcatgaagcgataggcggcttcctgcgcgctgcgcgtgcgatccttgtcgccgctggcgcgccgcgcctcgtcgaccagcctgcggatcgcaactgatgcgccacccttctgttgcgcgagccagtcccagtgccgcggcaacagcgtgatctcgcgcgccacgacgccgagcttcggccgaccgggcccgcgcggcgcggccggcggcgccggctcgtcgtcgagcggtcgggcgtgcttgggcaaccgcgccagcacgtcgtcgaccgagccgcggaaatcgatatcgaccagggccgaggtgcggccgttgaacaccaggaccgcggcatcagcgcgccggtcgagcagctgcttggcggcgcgggccacctcagggaggtcgccggcggcgatgcgctgctcgccttcgaaagcgacataagcaggattcatggtagagctctccgattgcgcgacccattgccccgacaattccgggcaatcgtggtgcgcggatctcgactttcccgttcccggctggcaccaagcgccgcccgattgcaccgatagttcagaggacgcccatgctgacggttcatcacctcaacaattcccgttcgcagcgcgtgctgtggctgctcgaggaattgggcgttccttacgagatcgtgcgctaccagcggcagcccgacatgcgggcgccgaaggagctgcgcgcgatccatccgctcggcaagtcgcccgtcgtcaccgacaacggcaacaccatcgcggaatccggcgcgatcctcgaatacatcatcgcgacctacggcaacggccgcctgatcccgccggccgatacgcccgagcggctgcgctacacctattggctgcactacgccgagggctcggcgatgacgccgctgctgctgaagctgctgttcacgctgatgccgaagcgcgcgccggcgctgctgcggccgctggtgcgcaaggtgtccaacacggcgctgtcgacgctggtcaatccgcagctcaagcagcacatggcctattgggaaggcgagctcggcaagagcgaatggttcgccggcaacgacttctccggcgccgacatccagatgagctttccgctggaggcggccgccgcgcgcggcgggctcgaggacggccacccccgatgcgtcgcattcctcgagcgcatccacgcccgcccggcctatgcgcgggcgttggagaagggcgggccgtacgaggttggtcgatagattcgcattcatagccggcagctcgggttttgatgtctctatttatatccgggtattattgccacgtcaataatgcccgggtataaatggcgtgcccaaaccaaaaggagccgccatgaagaccgaggaccgcaagcaggccatcgccgactacaagaagcgtgagagcgcagccggcgtgttcgcgatccgctgtcgcgcgaccggcgcggtctgggtcgggcaggcgctcgatctggaaaaaatccagaaccgcatctggttcacgctgcggatgggcaatcatcgcaatgccgagctgcaacgcgcctgggcggcgcatggcgcggacaatctgtcgctcgagacgttggagcggatcaaggacgaggagctcgcctatgtgcgcgacacgctgctcaaggagcgcgtggcgcactggcgcacgcagttagatgcggctgcggtgtaaccgttttgagcatgatctttccggaaaaccgcttcgcacttttccggatcatgcttcagggcgacggcagtgcctgcacggtgacgccgggtggcggcacgtcgtcatcggggacgaagaaatccgacatcagcggcaccgagggatcgacgcgatagggctcgaagtcgcgcacgccgttggcatagagcaccttgtcgtcgatgcagaaatgcccggtaaactcgcgcgatggccgggtgatgatcgcataggccgcatcgcccatgatctccggcgtacggctcgcgcgcatcatggcatcgccaccgagcagattgccgaccgcggcggtcgcgatcgtggtgcgcggccacagcgcgttgacggcgacaccggccgatttcagctcgccggcgagccccagcacgcacatgctcatgccgaatttcgccatcgtgtaggcggtcgagtgctcgaaccatttggtcttcatgtcgagcggcggcgacagcatcaggatgtgcgggttctccgccttcttcaggtgtggaatgcagtatttcgaaaccatgaaggtgccgcgggtgttgattcccatcatgaggtcgtagcgtttcatgtcggtggcctgcgaattggtcaggctgatcgcgctggcattgttgacacagacgtcgatgccgccgaactcggcaaccgtctgcgcgatcgccgccatcacctgcgcctcgtccctgatgtcgcagatcacaggcagcgccttaccgccggcggcgcggacctcgtcggcggcagtgtagatcgtgcccttcagcttgggatgcggctcggcggtcttcgccgcgatcgcaacattggcgccgtcacgcgccgcccgcagcgcgatcgcgagcccaatgccgcggctcgcacccgagatgaacagcgtcttgcctttgagcgatgtcatgagaacctcctgtgagggaagcacaaaccgacggctccctctccccttgtgggagagggttgggggtgaggggtacctctccgtacggcatactgcttggatagaccgcgacccctcacccggattgcatctctcgatgcaatccggcctctcccacaaggggagaggcgaagcggagcaagcgggacggccatcacatcacctcacgttctacccacccgcatgcaacacgcggccgcgcgtttccggcagcgcgtaggcggcgatgaagaacacggcataggccgcgaccgcgaagatcgcgatcgcgttggcgagcgtcgtcgtggtcgacagcgcgccgaccaggaacggaaacagcgcgccgacgccgcggccgaaattgtagcagaagccctggcctgagccgcgcagccgggtcggatacagctcggtcaggaatgcgcccatgccggagaagtaacccgaggcaaagaagccgagcgggaagcccagcacccacagcacctcgttggacagcggcaattgggtatagagcagcaccaccgcgatggcgccgatcgagaagatcaggaacaaattgcgccggccgatccggtcggcaagccaggcgccgaccaggtagccgatgaaggagccgatgatcagcgtcgcgagatagccggtcgagccgaccacggagagcttccgctcggtggtcaggaagcgcggcacccagaaggtgatggcgtagtagccgccctgcatgccggtgccgaccagcgaggccagcagggtggtcttcaggatcggtccctggaatatctcccatagcgcggcgggtccggtgccggacgcctgctgctgcgccatggtcgcggcggagatctccggctcggtgacatagcggcgcagatagaacaccagcagcgccggcagcgcgccgatcacgaacatccagcgccaggcgttttccgccggcaggaccgagaacaggatcgcctgcgccagcaccgcaaggccccagccgatcgcccagcccgactgcaccgagccgaccgcgcggccgcgatattgcgggcggatggcctcgccgatcagcaccgcgccggccgcccattcgccgccgaagccgaggccgagcagcgcgcgggcgatcagcagctggtcgaaattctgcaccacggcgcagaccagcgaaaagaacgagaaccagatgatggtgagctgcagcgtcttcacccgcccgatccggtcggagagatagccgccgagccagccgccgaccgcggaggccagcagcgtcacggtaccggcgagcccggcggtgccggcatcgactttccacagcgtgatgatggtgccgatcacaagcggatagatcatgaaatccatgccgtcgagcgtccagcccgaggcgcaggcccagaacgtgcgccgctcctgcaaattcatgtcgcggtagaaggcgaggaggctggtgtcctcgatctctgcgacttcgatcgttttggattcggccgtgctcatgcgcgttccccggagaaatctttcaccggctgtttgcgatccgcggccggagttgcgcggatcgccaatctatcgcgatgtcacaggcagagcaaagccgcctttagtacccggcggcctctgagcctcgcgtgcgcggatccggcgcgccgagcagaccattggtcgtaaccacgatcgagttcgcggaggagtagccgagcggctcgaccagcttgtgccctttggccttcagctcggccagcacctcgtcgggaaagccgcgctcgatccggacctcgtcgggcagccattgatggtggatgcggggtgccgcgaccgcggctgcgatgtccatcctgtagtcgatgacgtcgacgatgatctgcgtcacggctgatatgatgcggctgccgccgggcgatccggtcaccagcaccggcttgccgtccttcagcacgatggtcggcgacatcgacgacagcgggcgtttgccgggtcccggcagattggcctcgaagccgaccagcccgaacgcgttggaggcgccgggggcggcggtgaaatcgtcgagctcgttgttgagcaatacgccggtgccctccgcaaccaggccgacgccgtagggaaaattcagcgtgtaggtgttgctgacggcgttgccgctggcatcgacgaccgaataatgcgtggtgttgtcgccctcatgcggctgcttggcgttgcgcacgtcggtccagggcgtggcccgggcaaggtcgatggtcgcgcgttgccttgcggcatagtccttgtcgaccagcaattgcgtcggcgcgtcgacgaaggcgggatcgccgagatagcgggcgcgatcggcataggcccgcttcatcgcctcgatcatgacatgcagagaggcggccgaaccctgcttcatgtcggacatcggaaagccctcgaggatgttgaggatctccagcagcaccacgccgccggacgaaggctgcggcatcgagacgatatcgtggccgcgatagctgccgcggatcggcgcgcggatcaccggctggtaggatttcagatcggcaagcgtgaagatgccgccggcattcttgatcccgctgaccagcttttcggcaaccgcgccttcgtagaagccgcgcggtccctgttcggcgatcgcggtcagtacgccggcgagatcgccctggatcaggcggtcaccctcatgcagcggtgtgccgtcggcgtgcgagaacgccctggccgaattcggccagcgcgacatccggcgatacatgtcggacagcgtatcggacgtatcatcggtgacgatgaagccgtcgcgcgccaggtcgatcgcgggtttgaggatctgcgccagtgtgaatttgcccgagccgtatttctccagcgccagcgcaaggcctgcgaccgtgccgggcacgccgatcgcaagcgcggagttgcgcgatttgtcgggatcgggcttgccctcggcattgaggaacatgtcgcgcgttgcagcttgcggcgcggtctcgcgatagtcgatcgcgacatcttcattgtggccggcgagatggatcaccatgaaaccgccgccgccgatattgccggcgcgcggataggtcaccgccatcgcaaagccggtggcgaccgcggcgtcgaccgcattgccgccctgtcgcaggatgtcggcgccgacccgcgccgcgagtttctcctgcgccaccaccatgccgctttcggcgtgaatactgctggtcgtatcagtggctgaaggctcgtaggcgcggcgctggacctgaccgagggcgggcgcagcgatgccgattaccaggagagcggcaaacagccgccgcgacatcgttgctgtcagcgccatcgaagtgtcctgccctgttggtcgccgtatcagcaaaaccggctcatgctatatgggaacggatcgaagcggcaaaagcctgcctgtagttgagctcaaggaatatctttcgcgatgacggcaacactgcagacgggcaccggcgaagcgaaggccaccaccaaggtctatcccggccgcgctgccgtcatcagctggatcttcttcgactgggccgcgcagccttacttcacgctgatcacgaccttcgtgttcgctccctatttcgcgagcttcgtcgcatcagatgccgcgagcgggcaggcgctgtggggctttgcgactgccgcggcggggcttgcgatcgcgctgctgtcgccgctgctcggtgcaatcgccgatgccagcggccggcgcaagccatggatcgcggtgttcggcgcgctgctcgtgatcggcgcgagcgcgatgtggatcggcaagccaggcaatccagacatcatcccgatgctgctgctggcctacgcgatcgccagtgtcggcgtcgaattcgcgaccgtgttcaataatgcgatgatgccgacgctggtgccgcccgaccggatcgggcgcctctcgggcaccggctgggccaccggctatgtcggcggcatcctcagtctcgtgttggtgctcggcttccttgccgccaatgcggagaccggcaagacgctgttcggcttcacgccgctgttcgggctcgatccggtcatgcacgagggcgaccgcatcaccgggccgctgaccgggctgtggttcatcatcttcgtgacgccgatgttcctgttcacgccggactacccggcgaagcgaccgatacgcgaggcgctcggcgaaggcctgcgcgacctcagggaatcattgcgaagcctgccgaagcagacatcgctggcgtggttcctgctggcgaacatgatctacaccgacgggctggtctcgctgttcgcgttcggcggcatctatgccgccggcacgttcggctgggatacgatccggatcggcactttcggtatcatcctcgcgattgccgggacgttcggcggctggatcggcggcaagctcgacgatgcgttcgggccgaagcgcgtgatcaccggcagcctcatcatcctgctgtttgcgatcgtcgtgatcctcaccgtgaacaaggattccatcctgttcatcccggtcgcgccgccggtgcccggcggtccgttgttcgcgggcgtggccgagcgcgcctatatcgtgctgggctgcctgatcggggccaccggcgcgccgctgcaggcagcctcgcgctcgctcttgatccgcctcgcgccgaaggatcgcatcgcgcaatatttcggcttgtttgcgctgacgggaaaggtgacgtcgttcatcggcccgctgctgatcggtacgatcaccgcggccaccgcgagccaaaaagccggcatggcggtgctggtggggtttttcgtggtgggactggcgctgctggcgagggtgcgccagtaacttacgatcgtcgtcccggccaagcgaagcgcgagccgggacccatgaccacggatgttcaaagtaggcgtgctggagcccaacgcgttctaacaacgcacgcctgtgattatgggtccctgctcccgtgcgcaattgcgcactaaagcgcgatgatatttggttgaatcgtcatcgcgcttcagctctttgtttgagcatgatcttttcgagaaaccgcttcgcacgtttccggatcatgcttttatcagtgcaacccgacctggccggcttcccagccgagcatcgcctgctttcgggtgataccccagtggtagccggtcagtgcgccgctcttgccgagggcgcggtggcagggcaccacgaacgacaccgggttgcggccgaccgcggcgccgacggcgcgcgaggccttcgggctgttgatgttgcaggcgatgtcggaatagctcaccgcgcggcccatcgggatcttgagcagcgtttcccacacccgcacctcgaagtcggtgccgatcagaacgacgcgcagcggctggtccgcccgccataaccgcgtgtcgaacacgcgctgcgccaaagcggtggtgccgtcggtgtcctcgacataggtcgcgtttggccagcgccgcttcatgtcggcgaaggcggtctgctcgtcgccggggtcggcgaaggcaagacctgcgagcccgcggtccgtcgcgatcacgatcgcggtgccgaacggcgaggggtggaagccgtagcgcagcgtcatgccgccgccgccggtcttccattcgcccggcgacatcgcctcatgggtgacgaacagatcgtgcagccgtcccggtccggataggccggagtcgagcgccgcgtcgagcacgctggcggaatcgcgcaacaggttcttggcgtggtccagcgtcagcgcctgcatgaaggctttcggcgtcagcccggcccagcggcggaacagatggtgcagttcatccggcgtgacggcggcggcatcggccatcgcttcgatggtcggctgcgtccgccaatgctccgagatgaacgcgatggcgcgccgcaccgagtcatagtcgcgcagcgcggcgttctggaggcccggcttggccaggcgctggtcgtgtatggcgagtgtcatcatggtgtctgatttaggagccatggcgcatccaaaccacccgatttccgacaagcgcgattagacgacggggttgtaagtggggccgcgcttcgcggtgttcaacgccgtggtcaaggccttggaaaaactggccttttcgtccgggctcaggaagctgccgacgctgacccggcggccccgggagaccagataaagccgctcgatgccgaactcctcgtgcgagatctgctcgaaccgcacccacagcggattgagcacccattcggcgacttggccgcggtggctgatcctgcgcacccgcagctccgagggcgtgacggtgatctcctcgctcgctttggcggtgcggaaattgaccttgaaggcccaatagatcaccagcacgtcgaggccgaagaagccgaagatcggccaggcgccgagccaccagaacaccgcgccggcgacgaagctgatcaccgtgacgagcgacatcagcacgatgaagccggtgcgattcagcgagcgatgcggtgtcagcagcgccgagaacagctttggctcggcctcggtgccggccgcctcggcgtcgttcgcgggatcaaaatcgttgcctgcagtcatgacgtatcagtatatcccgttcatggccaaaatcatccgctctcagcgcgccggcacctcaagcgttcggtcggcgccgaagaagaaagtcgcgaaagcggcaaagccgctgtccaaaggcacggcaaagaaggcgcccgcaaaaaaggccgccaggaaggctgcaaagccgaagccgtggacggcggaggaggtctacgaggccttcgatcggttccgcaaggccaatcccgagccgaagggcgagctcgagcacctcaacccctacacgctgctggttgcagtggtgctgtcggcgcaggcgaccgacgccggcgtcaacaaggcgacgcggccgctgttcgaggtcgccgacacgccggagaagatgctcgagctcggcgaagaaaaggtccgcgactacatcaagaccatcgggctctatcgcaacaaggccaagaacgtcatcgcgctatcggagaagctgatcgccgaattcggcggcgaggtgccgcgcacccgcgctgaaatcgaatcattgcccggcgccggccgcaagactgcgaatgtcgtgctcaacatggcgttcggcgaacgcacgatggcggtcgacacccacgtgtttcgcgtcggcaaccgcaccgggctcgcgcccggcaagacgccgctcgaggtcgagctcggattggagaaggtgatcccgaccgagttcatgctgcacgcccatcactggctgatcctgcatggccgctacacctgcctcgcgcgcgggccgcgttgcgaggtatgtctgatcaacgatctctgccggtggccggagaagaccgtctgagccatgatcggcgtggtgtggtaagaggctcgtccggcgttccggtgcgtgaccgaggagtgtggcgtgacagagcaggttcaagagggttcaccacgagtcacccaaccggctcttgctccggcgacagcgccagacgcaccgaaatctgcgaccaggggtttctggcgccggttcgcgattccgctgtttgcagtgctcgtcgcgctcgccttcgtcgtcgtggcgacctcgcgctggaacgcgtgggtcggcagcgcgacgatccagaccaccgatgatgcctatgtccgggccgagctcacccagctctcgagccgcgtttcgggcgaggtgttgaccgtcgccgtctccgatttccagcgcgtcaaggccggcgatctcctggtgcagatcgatcctgccgattaccaggcgcaggtcgcgcaggcggaggctggcgtggtcggcgcgcaggccgccctcgacaacctcaacaaccaggtcgagctgcaatatgcgacgatcgcacaggccgaggcctcgcgactgtccgctgaggcacagcagaccctggcgcgccaggagcaggagcgtcagcagtcgctctcgcaaaccgatgccggcacgcggcagcgcctcgagcaggcgaccgcatcctacgccaagtcggaggccgacgtgcaggccagccgcgcggtgatcgcggcgcagcgtcatcagctcgaggtcctgcaaggcaccaagaagcagcgcgccgccgatctcgacgccgccaaggccctgcttgcgtccgccaagctcaagctcggctacaccaggatcgccgcgccgttcgacggcgtcaccggcgagcgccaggtgcagcccggcgattacgtcaacatcggcaccaacctggtcaatgtcgtgccgctgccgaacgtctatgtgatcgccaattacaaggagacccagctgaccaacgtcaagccgggtcagccggtcgcggtcaccgtggatacattctccggccagacgctgcgcggcatcgtcgagcgcatcgcgccggcgagcggatcgcaattcgcgctgctgccgcccgacaacgcaaccggcaacttcaccaaggtggtgcagcggattccggtgcggatccagttcgacaagggccagccattgctcgatcgcctgctgcccggcatgtcggtcgtgacgaggatcaacaccggcgaggcggtcgccaatgccggaaagtgatgaccctgatcgcggcccggtctcgcgcggcgacgtcgcgcgctatccgctgttcgcggtcgtcgccgtgctgctcggcgcgttcctggcgaatttcgacagccgcctgaccacggtcgggctgcccgatctgcgcggcgcgttctcgctcactttcgacgagggcgcctggctctcgaccgctgcgatcggctcgcagatcttcgtggcgcccgcggtggcctggctcgccaccgtgttcggcctgcgccgcgtgctcggcattccgagcctcatctatgccgtggtctcgctgaccatcccgttcgtgcgcgactacacggcgctgatcgcgctcagcatcgcgcacggtatgctgctcggcaccttcgtgccggcgacgctgatgatcatcctgcgcaacctgccgatccgctggtgggtgccggggatcgcgttgtattcgatccgcgtcggcttcgcgctggactcgtcgagctcgctggtcggcttctatgtcgagcatctgggctggcagtggctgtactggcagggcgtggtgatcgcgccgctgatgggcctgatggtctatctcggcacgccgaaggagccggtcaatcgcgacctgctgcaccatgccgattggggcggtatgctgctgctcggcgccggcgtcgcgatggtctatgccgggctcgaccagggcaaccggctggactggctgtcgtcgggcaccgtgatggcgctattgatcgggggcgggctgttgatcatcgccttcgtgatcaacgagatggtcgcgccccggccctgggcgcatttcaacgtgctgtgctcgcgcaacatcgggctctcgctgatcgtcatcctgctgtacacgctgaccagcctgtcgaactcgtcgctggtgccgaatttcctcggcagcgtcggcgcgctgcggccggagcagtcgggcgtgctgctgttcacctatggcgcgctgccgatgttcgtgctggtgccgatctcaatcgtcctgctccgccatctcgatccgcgcgtcgtcgtggtgttcggattctcggccttcgcggccgccaatctctggggcacgcagctgagccacgtctgggcgcgggaggatttcacgggcatcgtcctgctcacgtcggtggggcaggcgctgacgctgctgccgatcatcatcatggcgctgtcgaactccgacccgtcgcgggcgaccgcgttcgcggcctatatccagatcatgcggctcggcggcgccgagatcggcatcgcattgatgggaacctggctgcgcgtccgtgagcagattcattcgaattatctcggacagcatgtccagggcggcgacgtcgacgtcgtgaatctgctgaagcggctggcgggtgaattttccagtcacggcatggggacggcgatggggcgggccgtcggcacgctggcggcgctagtgcagcgcgaagccaacacgctcgcctatattgacggcttctggctgtgcttctggctcgcgatcgcggcgctggtcctcgtcgccttcatcacccgcgcgccgcagggcccgctgtcgccggtgtcgcttggtttcatgaagaatctgctgcgcaggcccggcgccgccgcttcctgatctggcgaaaggcgcagcccggatgtcgccggcggcgtgctgccggagtcaatttatagtgactgccgcgctctctctatcgcgccggtgcctgaaatattttgcgtaccgcgtggttccataaccgggggaactggagccacgatgatcgagaccaagcagacggccgcgcttgtttccatggcgacggcggttccaccgcatctattccatcagggacagatcctgcaggccgcgcgcagccttcttgccgaccgctatcccgaattcgagacgctctccagcctgttcgccaacaccggcatccagcatcgccatggcgtgaagccgatcgaatggtatctcgagcggcgcggttggccggagcgaacgcaggcgttcctggagggcgccgaggcgctgttcgtcgatgccgccggcaaggcgatcgcggccgccggcctgaccggcagcgagatcgataccgtggtcacggtgtgctcgaccggcatcgcgacgccgacgctggaggcgcgcgtcgccggcaagctcggcctgcggccggatgtgtcgcgtgtgccggtgttcggtctcggctgcgcgggcggcgtgtcgggcctctcgatcgcggcgcggctggcgcaggcgcggccgggcacgaacgtgctgctggttgcgctcgaactctgcacgctcgcggtccgccacgatgagctgaccaaggcgaatatcgtcgcagccagcctgttcggcgatggcgccgccgcgctcgtgctgcgtgccggtgacggcggtgcgacgcggatcgaggcgtccggcgaaaagctgtggccggatacgctcgacatcatgggctggacggtcgatccggagggattcggcgtcgtctttcagcgcaccattccggatttcgtccgcgaccatgttggaccggccgttgccgaaattctcgcgcggatgcagctaacgaccgatgacatcgaccgcttcctctgccatcccggcggcgccaaggtgatcgccgcgctggagcgcgcgctcgcgctcgatcagggcacgctcgatcacgaacgcgatgtcatcgcggcatgcggcaacatgtcggccccgacggttctgtttgttctcgaacgcgcccgcgccaggggattgccgccgcgcgcgctgctcaccgcgctcgggccgggcttcacgctcagttgcgtcgcgctgaggcacgcggcgtgaacctcgcttcggtcatccttgcgctggtcacgctgcagcgcttcggcgagctcgtgctgtcccgtcgcaacacggagcggctgctgacgcgaggcgccatcgaagtcggcgccgctcactacccgctcatcgtgctgcttcacgcgggctggctgaccgcgctgtggatctggggccgtaaccaggatgtcaacctcgccgcattggcggctttcgtggcgctgcaaggtttgcggctgtggatcctcgccgcgctcgggccgcgatggaccacgcggatcatcgtattgccgggaacgccgctggtcgcatccgggccctaccggtactttccgcatccgaactatgccgtcgtggtcgctgagatcgcgctgctcccgctggctctgcacctgtcggtgctggcgttgatcttcaccgtgctcaatctcacggtgcttgcgattcgaattcgcgccgagagccgcgcgctctcggtttccgactggccacgcatcagcacgccatgagcgcgcgggcagatcagcaagccgacagcccatcggctgcgacctgggcaggcttcctcttgatgtgcctcggcatgttcatggcgatcctcgacatccaggtcgtcgcgacctcgctgccgacgatccagcgcgcgctgacgatctcgccttccgcgatgagctggatccagaccgcctatctgatcgcggaggtgatcgcgatcccgctgaccggactgctcacccatgcactgtcgctgcgatggttgttcgtcatcgccgtcagcctgttcaccatcgcgtcggtcggctgcgccttcagcggcggctttgccgtgctgctgacgttccgcgtgctgcagggattttccggcggcgtcctgatccccgcggtgttctccgccgtgttcacgctgtttccggcgcgccttcatccggtcgccaccacgatcggcggcgccatcgcggtgcttgcgccgaccgttggacctgtcgtcggtggctggatcacgcagacctggtcgtggccctggctgttcctgatcaacctggttccgggcacgatcgcggcgctggtcacgccgttgctgctgccgaaagagcggatgcatcttcgcgcgttctccaggctggacaaatcgtcgctgatcctgctcgcagcggccctcgcaagcctgatgatcgggctgaaggaagcgccgcagcgcggctgggcctcgatgctctgcctcagcctgctgatcggaagcgttgccgggatcgcgctgctgatccggcgcacgctccgcgcggcggatccgatcgcgcaattgaccttgttccggcggcgttcgttcgcgatcggctgcggcctgagcttttgcctcggcgtcggtctctacggatcgacttatctgatgccggtcttcctcggcttcgtccgccgccatgacgccttcgagatcggcaccaccatgctggtcacgggagctgcgcagctcgtcgccgcgccgctggcggccttcctcgaaagtcgcgtcggcgcgctggcgttgaccgcgacgggctttgccttgttcgcgttcggtctgggtctcagcgccttccagcctcgtacggccgatttcggcgagatggtctggccgcaggtcgtgcgcggcatcgccatcatgttttgcctgctgccgccgacacggtttgcactgggttcgctgccagaggacgaaattgccgacgccagcggattgttcaacctgatgcgaaatctcggcggcgcgatcgggatcgccctgatcgacaccatcctctacgggcgcagcccgatctatggcgaggattttcgtgcacgcctgctggcaggcgatatcaacgcggcgcaggcgatcgggctcgatccgatgttgctgatcaaccgaccgctgggtccgcccgacgaggcgacggtggcgttcatccggccgctgatcgaacgggcctcgctcgcactcaccgtcaacgaggcatgggcaatgctcgcctgcgtggcgatcgcaggattgctgctggtgccgttcgcgcgggcaccggcgtctctccaggtgccgcgagaagcggactagctagattgaagagacgttgcttcgccgcgccggctcgatcagctcgcggcgcgggcccgacagccgcttgtacatgtggaccatgaacgccatgccgaacagcggcgtcgccaggttgacgattgggatcgagacgaaggcggcgatgaacaggcccgcggtgaatacggtcgccgcattctccttgcgcatcgccttggcatcatcaggcgagcggaagcgcatcgccgcgagctcgaaatattcgcggccgagcagccaggcggtcgcgatgaagaagatgatgaagcccgcgcccgcgaacagcacgaacggcagcgcgaccacgtagaccaggatggtcagcagcgccgtcttgacgccctcgatcgtcgccagcgtgaccggcagcgccacgccgggatggtcggccggatagtgctcgcgctcgacatggtcggcgacgtcgtcgacgaacaggctcgccatcagcgaggtgatcgccggcatcaggaagatgccgccgagcacgacgccgaggccggccgagatcgagatgatccaggacagcacgtgcagcgtggaatggaagccggggccgagcatgccttcggcccagacctcgccggtgtcggcaaaccagctcagcagccgctgcaatccgatcgccagcacggtgatcagcaccagcgcaagcccgatcgagcgccacaggatcgagcgcatcggcggcgaaaggatttgcgaaagcgccttgacggcggcatcaaacatgactgggctacctctgcaaattaacgagcgagaggtagccacccaatatggcttcggcaagtgccgtgtgtgccgcggttcgactcgaattgcctcaggcgacgagcggcttgccccggacgttgggtccccagacaccgatagtcacaatcacgatcaccatcgccgcggtgatcaggccgaacacgccgccgacgcccgcctccttcaacatgaacgccacgatgaagccagagaaagtcgcgctgagccggctcatcgaatagacgagccccgccgcacgcgccctgatagcggtcgggaacacctcggtctggtaggcgtgataggcgtaggacagcgtcatgttggcgccggtcaccagcacaccgctcgcgatcagcagcacaggcgcggtgagttgcgcgaaggcgaggccgaacaccgagatcgcggcggccgcgccgcaaatgatccatttgcgctcgaagcggtcggcgaaggttgcggccaggagcggcgccagcggataggcgaacgcgatgatgaacgagtattgcaggctcttggtgacgttgatgcccttctcgaccagaagcgccggaacccagttggagaagccgtagacgccgaacgcctggcagagattgaagatcatgaacagtacgacgagcgaggcgtagggcggcctgaacaggtcggcatagccggtctcggccggcgcacgtgccggcgccattgcggcggccggggcggggcgcagcgcggccgtgcccgatgaagcctccagcgtccgcatgatccgctcggcttcagccgagcggccatttcgtgcgagccagagcgggctttccggcacgtagagccgcagcacccagatgatcatgctggcggccgcgccgatcagcaccacccagcgccagccgtcgatgccgtaaggcgttgccggcaccagccaccacgacagtgcggcgacgatcggcaccgccgacagcatcacagcctggttgatcgcaaaggcccggccgcgcatccagctcggcaccagctcggtgatgtaggcgtcgatggtgatgacctcgatgccgattccgatcccggcgatgaagcgccacagcaagaggccgccaggcgtggtctggcacgccatgatgacggacgctgcgctgtagaacagcagcgagtaagtgaagacggccttgcgcccgtaacgatcggcgaggaagccgaggcagaaggtgccgatgaacaggccggcgaaagtcgccgcgacgaaggcgccgatgccggagaagccgaagaaggcctgcgtcgtcgtggtcatcagcccgctgcgcgcgaggcccggcgcgatatagccggtgaagaacagatcgtagatttcgaagcaaccgccgagcgagagcaaaatcaccagccgccagacatagccggacgccggcagcgcctcgagccgtcgtgaaatctggtccggtccgcttgtcgtgttgacgcgatcggcaaccgagccgagttcgacggcgctcatgttggtcctccccgtgtggtccagcggccgcctttcttgcgaaggcgtgtcatccgcgcatgtttggcagccgggagccagaaatccagacgaacatatcgaagagatcgttcgatattttcgatcgtactatccaggacgcgctttcttgacgcgaaccggcgtccatcccgcatcgcgtgcgggacaggcttcgcttgaaagcgcttcagatcaggagcgtcgcctcccaggcgccgcggcccacctggtctgcgatcagggcgcggatcaggcggcacatttcctccatgacgtaagtcatggggcggttgcgcaggcggcagagatagagcgtgcgggtcagtttcggttcgatgacttcgcgcgcgaccagcaatcgtgccttcagcggctcgctgacgaagtgagtcgttgcgatcgtgcagccgaggcccgcgatcagcgccccgatcatgccgctggtcgagttgagatgcatgatcgcattggcctccagccgcttgagcggcacgggatcatcgaccagggcgcgcgcggagagcccgtgccgcaacaggatcaacggcagccgtgccacttcctcgaagctgatcggggcctttctgccgatcagtttctcggtgccgacgcagaacatctgctcctccagcaccggctcggccaccaggtctttttccgacggcggattgtagaccagtgcgaggtcgacgtcggagctcagcaggtgcagcagcgtcgcgccggagagactctcggtcagcgacagcttcaggttcggatatttggtcagcacggtccgcatcagcggcacgccgatcgccttcatcccggaattggccatgccgatcgagatgtcgccggcgatctcgctgccgccttccctgatctcgcgctcggccgccgccatggcacgcaggatgatgcgggcatgctcgtagagccgctcgcccgccgcggtcggttccatgccgcgcggcttgcgctcgaacagcggcgtggcgaattcggcttccagattggcgatgtggtggctcagcgctgactgcgcgacattggcctgatccgccgcccgcgacaggttgcgctgctcgtaaaccgcgatgaaatagcgaagctggcgcgaatccatgggttcagcgttctagaacgacgaatgcactattcgacagattatatttttcagatagcgtgcggaagcctaacctgcgccaactactcaaaacgagcgcaacgagcacggagaaaccgatgaccgggagcggactgccgctggagggtgtgagggtcgtcgagatgacccacatggtgatggggccgacctgcgggatgatcctggcgcaactcggcgccgaagtgatcaaggtcgaacctccggccggcgacaagacccgctcgctcggcggcatgggcgtctcgttcttcccgctgttcaaccgtggcaagcgcagcgtggtgctcaatctcgccaaacctgaggaccgcgacaccatgcaccggctgctcgccggcgccgacgtgttcctggagaatttccgcgacggtcaactcgacaagcagggtctcgggcccgagcagctgcgcgcgaaatacccgcacctgatcatcgccggccacaagggctttctctccggtccctatgatcatcgcccggcgctcgatgaggtcgtgcagatgatgtcggggctcgccgcgatgaccggtacccgcgacaagccgcaacgtgtcggctcctccgccaatgacatcatgggcggcatgttcggggtgatctcgatcctcgccgctctctatcagaggcgctgcggcaaggctgacggtgccgacatccgcatcggcctgttcgagaactgcctgttcctggttgcccagcacatggtcgaatacgagatgaccgggcgcaagccgcgttcgatgccggagcgcgagcacgcttggccgatctacgacatcttcgatgccgccggcggggatcgcatcttcatcggcgtcgtgaccgaaggccattggcagagtttctgccgcgaatttggcctgacggaattcgccgacgatccgacattgcgcagcaccacggaccgcatcatggcgcgcgaccggatcattccgcgcgtcgccgaggtgatcaagggctggaacgtggccgacctctcggcgcggctcgacgcgctcaacatctgcttctcgccgatcaaccggccggaggatctgttgcaggacccgcatgtgttgcgtccgggtggcctcgttcacaatgtcaatgtcgatggcaagccgttccgcgtccccgcgctgccggtcgaatggaacggacgccatatcggcgaaggcctgacagtgccggtgcttggcgccgataccgaggcggtccgtgccgagctcgatcaacaaacaatttcgtcaactggaaacgctgcgtgaggctgacatgacccgggtccacgatatctatcccaacgacagagtgagcctgcgcgaggtcggcctgcgcgacggcctgcagctcgtgaagacgttcccctcgaccgcggcgaagcagcgctgggtgcgcgacgaatatgccgccggcgtccggcatttcgaggtcggctcgttcctgccggccaagaccttcccgcaattcgtcgatgtccgtgacgttatcgccactgtcgccgcgctgcctggcgcgcatggcgtcgcgctggcgctgaacgagcgcggcgtcaatgaggcgctggcctccggcgtcgccgagatcgcatcggtggtgtcggcgaccgaggagcacagccaggccaatgccaaccgctcgcgcgaatccgcgatcgagaacatcaggcgcctctgcgagctgcgcgacgccagcgcgcacaggccgctggtcaatgccgcgatctcgatggggcttggctgctcgatcgtcggtgcggtcgatccgaacgaggtgttgcgcctcaccgagaagctctacgaggtcggcgtcgacatggtcgcgatcgccgataccgtcggctatgccggaccgaagcaggtcggcgagctgacccgtggcgcggtgaagatcgcgggctccaagccggtctgcgtccatctgcacgacacgcgaggaatgggcattgccaatgcctcggccgcgcttgatgaaggcgcccgcgtgctcgacggttcgctcggcggcctcggcggctgcccgttcgcgccgggcgccaccggcaatgtcgtgttcgaggacctcgtcttcctctgcgagagcaagggatttccgaccggcatcgatctcgatcgccttatcgaagtgcgctccatcctgaaagctgagatgccgggcgaaacgctctatggcggcctcgcccgtgccggcctgccgcgtggcacgagagcgaaggcggcgtagcgacgttcgtagatggggcaacgggccggcccgttacccatctaagctgccgtgcatccttaatcgtgcccatgcccgcgcttgcgcggcttcttgtccgccgcggtcgggatcatcacgacgcggccgtagcgcacgccgcgctcggcgatgacgtggtcggcgagatggcggacttcgctgctggcgcccttcagcgccgtcacctccatgcagctgtcgtcgtcgagatgcacgtgcagcgtcgccagcgacaggtcgtgatggccgtggaaattctgcaccagccgcttcgacaggtcgcgcgcggcgtgatcatagacatagaccagcgcggccacgcactgccctgacggcgcctcctcagcgctttgctgcaaaccggcgcgcgcgaggtcgcggatgatctcggagcggttctggtagccgcgcgcctcggcggcggcgtcgatctccgcgagcagatcatcctcgatggtgatggtgatgcgttgcatggactatccgtgttgctgagcgccagtatgacatttctcttgtaacgtcatactacgcttgctagcgttcgctggccgggtttggtttgtgctggtgcggttgtcgcgtgactgtaacaggtatcatgcgggggcatgggtgttgcgtcgtactgtttggcggatatttcccgccgcatccattgcagcgtgcgcggcggtcgccgaagcgcagaccgtggctgtcacaccgagccagctgccgccggtcacggtgacgtcgcctgctcaagcgccgcccaagcgcgccaggccgtcccaacgcccgcgccatgctgccgccggcggccacaggcccgcagcgctgccaccgagtccgccgaattccccgaacgacggaatcaccgccggcgctgcgacgatccctgccgccaatctgcaacccgccgcagccagcgagcggcagatcagcggcgagcagttgaacgcgcggccggtctcgcgcgtcggcgaagtcctggaggcggtgccgggcctgatcgtcacccagcactccggcgaaggcaaagccaaccagtattttctgcgcggcttcaatctcgatcacggcaccgatctcgccatcagcgtcgacggcatgccggtcaacatgctgacccatggccacggccagggctatgccgacatcaacttcctgattccggagctgatccagtcggtcgacgtccgaaaggggccgtattatgccgacaagggtgacttcgcgtccgccggcgctgtcgacatcaactacctcgatcggctctcgaagaacatcgtggagctgaccgccggcagtttcggctatcagcgcgcgatggccgcaggctcgacgaaggtgggcgacggcacgctgctcgcagctttcgaggccaacaagtacaacggcccgtgggacgtgcccgacgacgtccgcaagctcaacggcgtgctgcgctacagccagggcaccgcgaccgacggcttctcgctgaccgcaatggcctactccaacggctggaattcgaccgaccaggtggcgcagcgcgccatcgaccagggcctgatcggccgctacggctcgctcgatccgaccgacggcggcacgtcgagccgcttcagcctgtcaggcaattgggcgcagtcgagcgattacggacagaccaagctcaacgcctatgtgatccgctcgtcgctgcagctctacaacgacttcacctacttcctcgacgatcccgtcaatggcgaccagttcagccagaccgacaggcgcaccgtctacggcttcgatgccagccatgccgccgatattcgcatcgcgggcatcgatacccaggcccgggtcggcgtgcagacccgctacgacgacatcaatgtcggcctgttcaagaccgcgcagcgcgagatcctgtccacggtgcgcaacgaccaggtgcaggagggcagcgtcgcgctgtgggccgataccaccgcgcgctggaccgactggctgcgtaccacggtcggcattcgcgaggattattttgccggccatgtgctgagcgacacgccgcagaactccggcaacgcgcaggcggcgatgacgagcccgaaggccggcatcgtgctcggtccgtggtccaagaccgagttctacggcaatgcggggttcggcctgcattccaacgatatcaggggcgcgaccatcacggtcgatcccaacgacaaggtgacgccgctcgaacgcgtgccgctgctggtgcgctcgaagggcgccgagttcggcatccgtaccagggcggtcgacgggctgacctcgtcgcttgcggtattcgtgctcgacttcgattccgaactgctgttcgtcggtgacgccggtaccaccgagccgagccggccgagccggcgcgtgggcgtcgagtggaccaatcaatacaaattgctgccttggatgagcctcgaccttgatctggcctatacccgcgctcgcttcaccgattttgatccggtcggcaatttcattccgggggcgcctagctgggtcgccagcggcggcgttaccttcggccgcgataccggctggttcggcagcctgcgtgcccgctatttcggcccgcgcccgctgatcgaggacgacagcgtccgctcgctgtcgtcgttcatcgtcaacgcccgcgccggctataagttcgacaatgggatgcggctgcagctcgacgtcctcaatctcttcaacgcacagaccaatcagatcgagtattactatctctcccgtctgccgggggagccgatcgacggcgtcgcggaccgtcatgtgcatcctgctgagccgcttgccgtccggctgacgctggcggcaacgttctgatcagtcgcgcgtgcggcggctcgagctgaaatcctcgacgccgggctgcaccggggcggtttcgcgggagggcggtacgatcagcaacacgactcggcgcgtccggccgggcctgcccagcaacgttgcctgcgcatcgaactcggaacgaaagaggttggtggcgcgcgacgccgtgcgtgccatccagctcaggcagtccgcctggtctgcgaagcacaatgcggcccagccgcgatcgagcgtggtcttgcgcggcaaaccccaagtgtactgataggcgaacggccgggcatagaacggatgatccgggctgtagaaggcggcagcgaaggcgagtgcgtcgtcgccgctgaccgagacgagcggcgtcccgaccgcatggtgccaccgtgcggtgagctcggtcgcgatcgcatgatagaagctgcggccctcttcataaccgtaagcgtggcgatagagcgcgtggatcggcgcgccggcggcaaccgcgagaatggcaatgcccgccaccatgacggtcaggttgaccgcgtagaagcgctcgatcgggtagctcgttccgcacacgatcagcacgatgaacaggaagaggccctgcaccgcccagagcgagggcaggtcggtgccgatcgcaagcgacacgatcgccggaaacaagatggtgccgattgcgaccagcagcagcaggcggagccccgggttcattgcgcggaaatcggccggcagctgcgccagcctttggccggcaatgaacacccaggtcaccgccgcgaccgagagcgccgcgatcagccccgtgatgaaataggccacctcccacagcgcggcgacatggtcgacgccggcatgcgcgagcgcatagtcgaatgtcgttgctccagtcgtggcgagccagtgcagatgcgggccgagcaccagcattccggccagcgtggagatccagggtgaggccgacagcaaatagcggcggcgatccggatgcagcacggccgcgaagacgaagctcgcgaccaggaagatcgaataatatttgccgagcatcgcgagcgcgcaggccgcgccggccgcgatcgcccagccgagttgccgtggcgcctcgaacgcgcgaaggaagcagtaggtcgccagcggccaggatgccagcagcaccgtgttggcgttgaaccgctgggcgtggaattgatacaccggcagcagcatcgccagcagcaggacgatcacccgcttctcgccacggacaaagcggcgcgagatcaggtcgaccgcccacagcgccacggctgcattgaccatcgccatcagctgcagcgaccaatcggtcagcgggaaaaccgcggtccatccccgggtgatccagcccatcatcggcggatgcttgtggtatccccacgcgaggtgccggccgagcgtccaggtctcgagcacgtcggggtgcaggccggcgccgagataggcgacgaccagatacgccgtccagactgcgacaaagagtgcgagcagcagcgggatcgaccagccggtctcgattccctccagccagatgttgaatggacggcgccagcgcgccggatgcttctccgacgccgcggccatcgccgagaaatctatcaaccgaagcaccgtaaaactaccgaatgaaagcgagcgagaagcgcacgcaccctagtgatgcggtagcgagaactcaacgacgaagccggacgatgaggcggattccagatggtggtcgacgagtcccgctatccccgcgtgggctccgcggccatcacttccgcagccggaagcggcgcctcttcgtcaatcgcttcaggaacaagcggcggcgacctgtgctctggaaacacactgaattcgcccgctacctcctggagcggcttctgcttgtcggcccagtgcagggccgtgtagtcgaaaccgtgcacgatggtgggtttgacgatttcgaaataaggcgagatgtcgaagtcgcgcggcatgtagagcgaggaatcgcggatatgcaggatctcgcggcgcgccttgcggctggcggcgcgggtgatcttgggcaggatcggatagcgcacggcgtcgaaggcctgcgcgatcagcgccgagcagatgatcttggtcggatcgccggagccgaacgcgatcatgcgccgccgccagcgctgcgggatcggcagcggaaacagatagcgcgcgaggtcgacgatgttcttggtgtcgtaaccgaagccgatccggttgatggcgtagcggcacaccgtggtgcggtcctcgtaggacagcccgaccggccggcagagccgtgtgtggtaggtgaaatatttcgacagcggcgcggaggtcacgccctcgccgacattggcctcgatcagcacgtgttgttcgccgtcaggctcgaacgcgccgtcgatcggtccgacaaacagtgcggcgtgcgaccaggtcgactgcgtcaggtatttgatgatgccggagatccggttgttgccctcgaccagcaggacatcgccctcctggatgatgccacgcaaatggtcggggtcgctcggcgtgaacggctcgtagccgggcacttccttcgacaggtaccccgcgatccatttaccgacggtatcgagcattacgcccatggattccccccagcggttctatgaccgcttgtctccacctaatcatggtcgcaagccgttgcaatttagttcatgcgctcagtcgatcaatcatgattgatttaccatgagtgttgctgcgatcggtgagatgcggcacagttcgcgaagcgttcccattctctgcaagtccccggaaaccatgccagaagctatgtcatgcccgtgaaccgccgcgatttcctgtcggcgtccgcaggtcttgcgctggcgccggtgctgggcgggcgggcgcttgctgcgccgctgccgcgcgaggccgatatcgtcgtgatcggcgccggtgccgcgggcattgccgcggcgcgacggatcgccgccgcgaaccgcaaggcgatcgtggtggaggcatccggccaggtcggcggccgctgccagaccgacgcatcgacattcgatgtgccgttcgaccgtggcgcgcgctggatgcacaatcccgaaaccaacccgatgatccggctggcgcgttccgcgggcctcgacatcgtcacggcgcctgcgggccagaagattcgcatcggtcggcgctacgcccgccccggcgagaccgaggagtttctggcggcgctggtgcgcgccaatcgcgccatcgacgacgcctcgcgcaaggccgatatcgcctgcgccgctgtgatgccgaaggacctcggcgattgggccggcaccgccgaattcctgctcggcgccagtttcagcggcaaggacctgaaggatctctccgccgtcgacaaggtgcgcgcgcaggaccgcaacaccgcgatcgcctgccggcagggcctcggcgcgctgatcgcgaaactcggcgaggggctgccgctcgtgctgtcgacgccggcgcagcgcattctgtggagcaatcgtgacgtggcggtcgagacggcttccggcaagatcgtcgcacgcgccgccatcgtcaccgtgtcgagcaacgtgctggcgagcggcaatatcaagtttgcgcccgagctcccgaagcgctcgctggatgccgtcgcgaaactcggcctcggtagctacgatcggattgcgcttgagattcccggcaacccgctcgggctgtcgcacgatgacgtcatcatcgagcagagcaattcgaccaggaccgcgctgctctacggcaacatcgccggctcctcgctgtgcacgatcgatgtcgcgggctcgttcggccgcgagttgtcggcgcaaggcgagaaagcgatggctgcgttcgcggtggaatggctgaccaggctctatggcagcgaggtcggagcatccatcaagaagaccagcgcgacgcgctggaatgcgcagcccttcattcaaggggcaatgtcggccgcagcccccggcgcgcagttctcgcgccggatcctgaccgagccgatcggtgcgatgtatctggcgggtgaggccacccatgagacgctgtggggaacggtcgacggcgcctgggagagcggcgaacgcgcggccgacgccgcgctgcgcaggatcggcggagtgaaggaggccgcgccggagacgccggcacctgccgccaaacacaagcgccgcacgccgcgatcggccgagccgatgaattgagtgtcggctgagatcgggcttcgctactggatttgcgggcagattccgccgcataacagatgtcgtccctgcgaaagcagggacccataaccacgaatcgttgttggggagcgatgttggaacgacggctcccgaccgcaacatctgctgcggcgtatgggtccctgcgttcgcagggacgacatcgagtgtgtggccgcagggccgcgtcctgcccaactcactcgtcattccgggacagcccgcagggctgaacccggaatccattcgtccacggcacaggcggcccgatggattccgggttctcgcttcgcgagccccggaatgacggtgagataagatcgcgcccctcacaccggcagcttcagctccatcagatccttcgcgaccacgatccggcccttgaagttcgtctttacgtcacgggtccagtcgtcgtcggtgacatcggggtcgtcgccggggacgaagtggctcagcaccagcgttttgacgccggcggcagcggcgatgcggccgacgtcttcggtcgaggtgtggctgtcgagcaggtgcttcttcagagtcgcgccgttcttggtctttgcgacgaggcgatcgaccgccgggatatagaggcattcgtgcaccagcacgtcggcacctttggcgaactcggcgagcttcggattgtaggcggtgtcgctggagaacacgacgacgccatccggcgtctcgaacttgtaggcgaagttgtccgtgatcggcggatgcggcgtgcggaacgcggtgaccgtgacatccgatgtcttcagcaccacgccatcgtcggtgatgtctttcgcgatcaggagcttgcgcgggtcggggcggccttcatccgcgatccgggtctcgacgtcgaacttgttcagctcccaatattcccgggtcatcgcctcgatgcctttgggaccgaacgaatggatcggcgtcgaaaggcccgctgcccaggcgttgtagaacagattgccgtattcgagattgtggtcggaatggtgatggctgatgaagatgtatttcaccgagggaatcggcacgccggcggtgaccagctgccggctgacgcccatgccgcaatcaatgacaaagggggtgtcgttgacgacgagcagattggctggattggcagcgccgatgccgacgcgcgggccacccttggtgccgaggaacacgatccgggtgcgtggttttgcattctgcgcgcgcacgacaggcgacgcgagcatggcggcgctgccgagcgccagtttcagtgtagtgcggcgatcgatcatggtgttcctcccgcagacgtcttccgagttctgccgaccctagccgccgcgcaaaatgccatcaagcgcccgcaggccgacgatgacggcggcagcgatcagcgcggagcagatcgtacgaaacacctgctcgctggccttgccgacgcgatcgggcgccccagccaataggcgacgatcggcgtgccgccaggtgcgagcggagcgagcttcgaaggatgaatcggccacagtcgggccgtcgacccttcgagacggccgctacgcggcctcctcagggtgacggtgacaggtactccgcatgcgggagagagaacagcggatcgctcgcgtcgccatcacgcacgcggcgtcacgcccgcagcgtgccgccggtcttcttggtgacttcggcaacgacctttgccgcaaccgcgtcgatctcctggtcggtcatcgtcttctcgcgcggctggatcgtcaccgcgatcgcgatcgatttcttgtcggaatcgatgcccttgccttcgtagacgtcgaacacggtcacgtcagtgatcagcttcttgtcgacattctgcgctgcgcggacgatgtcgcccgccttgacgctgcggtcgacgatgaaggcgaagtcgcgcgacaccggctggaatgccgagagctccagcaccggcttggcgcgcgtcgcccgctgcttgccctgcgggatgcgttcgaggatcacctcgaacacgatcatcgggccgtcggcgccgagcgcctcggccgcgcgcggatgcagctcgccgaaatagccgagcacgttctgtggaccgatctggatggtgccggaacgccccggatgcagccaggcagggccgcccggcacgatctgcagcgcctgcaccggcgcgccggcagctgccagcacggcgaaggcgtcggccttggcatccatcgcatccgccgtggccgcaccggtccagtgccgtccgatccccttcgacgaagcgtagccatggcgcaccccggaagcggccaccagctggtcttctggacgatcgccacggaacacctggccgacctcgaacagcgcgacgtcgggcgtgccgcggttgatattggcctgaacggccgcgacaaggccgggcagcaggctcggccgcatgtcggagagatcggccgcgatcggattggcgagcacgagctcgctctggccgccgccgaacagttttgccgcatcattggtgatgaacgaccaggtgacggcttccaccatgccgcgggcgccgagcgcgcgcttggcgcggcgggtgcgcagctgcatcggcgtcagcaccggcttgcgcggctcctcgccgcgctcgaacggcgtcatcggcaccttgtcgacaccgacgatgcgcacgatctcctcgacgatgtcggccttgccctgcacgtcggtgcgccaggacggaactgcgaccttcaccacagggccggtaccggccagcatgaagccgagccgggtcaggatcagcttcacctcgaccagcggcacctcgatcccggcaagccgcttgacctcggtgagcgggaaatcgatgacgcgatcctcgccgaactgcttgccgaccacgacgttctcggacggcgtgccaccgcacagctccagcaccagccgggtcgcgagctcgagcccgggcaccatgaaggccggatcgacaccgcgctcgaagcgatagcgcgcgtccgaattgatcccgagcttgcggccggtctgcgcgatgttgatctcgttccacagcgcggactcaatcagtacatccgtcgtgttgtcgtcgcagcccgaggcctcgccgcccatgatgccggcgagcgattcgacgccgtgctcgtccgcgatcacgcagacattgctgtcgagcgtgtaggtgcggccgtcaagcgcgagcaacgtctcgccgtctttggcgcggcggaccgtgaggttgcccgtcaccttcttggcgtcgaacacgtgcagcgggcgggcgcggtcgtaggtcatgaagttggtgatgtcgaccagcgcgttgatcgggcgcaggccgatcgaggtcagccgcttctgcagccattccggcgacggaccgttcttgacgccgcgcaccagccgcagcgcgaagcccgggcacagcgtggcgtcttccaccttgacctggaccgggcaggggaattcgcccttgatcggcttgatcccgggatccttgaacttgcccatgtcggcggcggcgagatcgcgcgcaatgccgtgcacgccggtgcagtcctgccggttcggcgtcaggttgatctcgatcatgggatcgccgagcccggcccaatcggcatagcccttgccgagcggcgcgtcgcccggcagctccatgatgccgtcgtgatcttccgagatctgcaactcagccgccgagcacagcatgccgcggctctcgacgccgcggatggtgccgacgccgagcgtgatgtccttgccggggatataggtgccgggcggcgagaacacgctgatcagccccgcacgggcgttcggcgcgccgcacaccacttgcaccggcgcgccgccgtcgccggtgtcgaccatgcagacgcgcagccggtcggcattcggatgctgctcggccgagatcacgcgcgcgatggtgaacggcgcaagcgccttcgccttgtcctcgatgttctcgacctcgagcccgatcatggtgagcttgtcggcgagcttctcgagcggctcgtcggtctcgagatgttccttcagccaggagagggtgaacttcatgacgatgatttctcttgtcccctctcccgcttgcgggggagggttagggtgggggctctctccgcgatggcagcggcgattgtttcgaggacgcctgcacgatttgtcatgacgtcgagattgctgaagcgaagcaccttgaagcctttcgcttcgataacggccgagcgcgcggcatcggcgcgttctccttcgtctgaaaagtgttgaccgccgtcgagctcgatcacgagctttgccgcgtggcagacgaaatcggcgatgtagttgtcgattggcacctgacggcggaagactgcaccgttcagtcgattgccgcgcagctcagaccagaggattcgctcgacatcggtcgcattcttgcgaagcgcacgtgcgttggaacggagtccctcggagaccttccagtccggatgttcgggatcgaccattagcagccccattgcggcgagacccccaccccagccctcccccgctagcgggagagggagtccgaccgctctcgtcgacagggtcttcgtatccattcgaagccggtgagcgtactccatccattccttctcccacttgcaggggaggaacagggtgtgggctcgcgccgcgtcggtggtctcaacgagactcacgaactcaatccccccgcgatggtcgggatgtcgagcggcttgaagccgtagtggttgagccagcggatgtcgttctcgaacagctggcggaggtcggcgatgccgtatttcagcatcgcgatgcggtcgatgcccatgccccaggcaaagccctggtagacgtcggggtcgatgccgcaggcgcgcagcacgttcgggtgcaccatgccgcagccgagaatctccatccagtcctcgccctcgccgaagcggatctcgcccttgtcgcggcggcactggatgtcgacctcgagcgacggctcggtgaacgggaagaacgacggtcggaaccgcatgttgatgtggtcgacctcgaagaacgccttgcagaattcgtgcaggatccatttgaggtggccgagatgcgagcccttgtcgatcacgaggccttcgacctgatggaattgcggcgtgtgggtcgcatctgagtcgatgcgataggtgcggcccgggcagatgatgcggatcggcggcttctggctcagcatcgtgcgcacctgcaccggcgaggtgtgggtgcgcaacagcatgcgcgaaccatcgtccttcggattgaagaagaaggtgtcgtgcatctcgcgggccggatggccttcggggaagttcagcttggtgaagttgtagtcgtcggtctcgatgtcgggaccttcggcgaccgcaaagcccatgtcggcgaagatggtggtgagctcgtcccacacctggctcagcggatggatacggccggtctccgccggcgcatcgcgcagcggcagcgtgacgtcgatggtctcggcggcgagacgcgaatcgagcgcggccgccttcagcacgtcgcgcctggccgcgagcgcctgcgtcaccgcatccttggcgaggttgatcttcgcgccctcggtcttgcgctcgtccggcgacatcttgccaagggtggcgagcaaagccgagatcgagcccttcttgccgagggctgcaacgcgcaccgcctcgagggcggcctcgtcagcagcggaggcgatctggtcgaggatggatgtttcgagcgttgcgaggtcggacacggtcaattcctgcgctgagcatgatccggcgggaagagccggcttccgaaccatgcgccaaaattcggctgggttgtcgccgcccgaaggccgtaacgtcaagcaaaaagccggtcatttcgggctaacggccggctgcattgaacccagcgcggagaccgggctacccaaggggagctgaaggagacccacgcgatgttgctgcgatcttgcctcgccgtgccggcggtcctgttgatgctcggaacggcacgtgccgcgaccgaggaatgtcccgccaaatcgacccagatggacgacatcatcgccgagcttcagaaggcgccgagctgcaaccgcgcgatgaagattttcgaggcgtgcgaatacggcgccagcggggacgtccagttcggcgaagtggtcgagaagaaatgcgaggcggacttcctgtccggcctcggcgcttcgcagaagaagctctacgccggccagctcaagcgctgcgaccacaaatacgataacgaaagcggcaccatgtaccgctcgttcacggcgttctgccgggcgatcgtcgcccagcgcttttcgcagaaggcgcttaaagcgggcccgaaagcccgctaggcctttgttttgagcatagtctgatcggaaaaccggtacccacttttccggatcatgctcagatcaggcagccagcgccgccttggccttctcggcgatcgcctggaacgcgaccggctcgtggatcgcgagatccgacagcaccttgcggtcgacgacgacgcccgacttggacaggccgttgatgaacacgctgtaggtcatgccgaacgggcggaccgcggcgttgatgcgctggatccagagtgcgcggaaggtgcgcttcttgcgcttgcggtcgcggaaggcgtactggccggccttttcgacggcctgcttggcgacgcggatggtgttcttgcggcggccgtaatagcccttggcggccttgtagactttcttgtgcttggcgtgagcggtcacaccgcgtttgacgcgagacatgacggaaatccttgagatctagaagagacggggcgccgcgcgaggggcggcagggttcaagcgaatgagcgcgatcaggcgttcggcaagaagtacttcttgacgttgtcgccgtcggtcttgaacagcacacgggtgccgcggagctgacggatctgcttcttcgtccgcttgatcatgccgtggcgcttgccgcgctgggcgtgcatgaccttgccagtggcggtcaccttgaagcgctttttagcgcccgacttggtcttcaacttgggcatttagctctcctattgcacagcacgaaaatcgccccgagaggcgtccggccggctaaaatgctcgttagagcgttgaaagtgctatggttttttccgaattgaaagaacctgcactagacgtcgccacggcagcccttgatcagccgggcggcgaaggcccggcttatgacagaggatcggcggttttgcaacgtttgaagcgggaaatcggggtcggaaccgggtagtccccgttggctgcatccggcctacgagaaacgaaacagcccgccagatcgcctgacgggccgttcaatttcaacaaagcgactcattcgaactagcgcggcgccagcaccatcacgacctggcggccctcgaacttggcgtcctgctcgaccttggcgaactcggcaacatcggccttcaccttgtccagcagcttggtgccgatctcctggtgcgccatctcgcgaccacggtagcgcaaggtgatcttgaccttgtcgccttcctcgaagaagcgctgcatcgcgcgcatcttcacgtcatagtcgtgatcgtcgatcatcgggcggagcttgatttccttgatctcgacgaccttctgcttcttgcgagcttcggcggccttcttctgcgcggaatatttgtacttgccgtagtccatgatcttgcagaccggaggactggtgttcggcgaaatctcgacgaggtccatgccggcttccatggccatcttgatggccaccatggtttcgacggtgccctggttgacaccatcggcatcgatcagctggatctgtgcgttgcgaatctcatcattggtgcgcggcccgtcttttgcgactgtgggcggggctctattgggacggcgaatgggtaactctccaaagttgtgaaagggaggcggatattttgaagcaagacgctgcggcgggcaagcgaagtcgcttccttaagcggcaaaaccgtcaattgcgaggcattttggccacgcccggcacatatagcgggcacatctgctccgcaaggcatgccggctgccgttgaccgctgccacgtgacgattgaaaagcagatgtctgacacgcgagtgaccgaaccatgagcgaaaccgccgcatccggacaggaacccgccttcatcgaggtcggcgagggccgggaggcgcgccggatcgcggtgcgcgcccgcgccggcggcgccagcagcgcgcctggcctggtctggctcggcggcttcaagtccgacatgaccggcaccaaggcgctcgccctcgacgcatgggccgccgagcacggccgcagctgcgtccggttcgattattccgggcacggcgaatccggcggcgagttcgccgacggcacgatcggccgctggctcgaggagagcgttgcggtgttctcgcaattctgcagcgggtcgcaggtggtgatcggctcctcgatgggcggctggatggcgctgctgctcgcgcgcgagatcgcgcggcgaggtggcaggaaggcgcaactcgccggccttgtgctaatcgcaccagcgcccgactttaccgaggaattgatgtggaagggcttctcgcccgagatccgcgccgagatcgagaccaagggcgtgtggctgcgtccatccgaatatggcgacggctcgccctacccgatcacccgcaatctgatcgaggagggccgcaaccatttgttgctcggcagccagatcgacgtcggctgtccggtgcggatcctgcagggtgcgcaggatcccgacgtgccgtggaagcatgcgttcgcattggtgcaccggctgccggccgaggacgtggtgctgaccatgatccaggacggcgaccaccggctgtcgcggccgcaggacatcgcgcggatcatcgccgcggtggcggagatcggttaagctccctgcacagggagaagccaatggacacgacaacaatgctgcgcgcgttctgcgacgcggtcgaacggcgcgacggcaagcgctttgcagacctgttcaccgaggacggcgtctatcacgacgtgttctacggcgccttcgaggggcgcgccaaaatcgccgagatgatcgacgactggttctaccggaccgcgaccgatttccgctgggtcatgcacgatcccgtcagcgacggcacgatgctctacgcgcgctacacgttcagctaccgatcgaccctgcccgaggccaagggcgcgcgtgcgatgttcgagggcgtcgcgatcatgcggctgcgcgacggcaggatcacggaataccacgaggtcgccaacaccgcgcccgccttcgtcgatctgaacttcgcaccggagcggatcgccaagatcgtcggcaagcagggcattgcgctgcgggcacgggaagagatgaagcggcatttggcgtgagctattctccgccgtcattccggggcatcgcgaagcgatgagcccggaatccatttttccgtcagcgcctgcggcctgatggattccgggctcgcgcttcgcgcgccccggaataacggtggggaagtcctacggcggcggcgggttgctcatcggcttgcgctgggcgagcgcggccacggtggaggtgccgatcgggcctttctcgtcatagagccagcactcgccgatcgcgatgccgtcggtggcgtgatggttcaccacttcgaagccgatccagttggtcaccggcaaacggtgcagatagatcgtgacgtcgctgttgatgtagccgaggccctggtcgccggcattggcgaacgggctggcaaagtccgcgccggtcgcgacatggacgaacggcgtcatcttcacgccttcgacgagctcgcgcacctcgctcatccagagccgccgctcgccgagcgagcccatatggccgacaatcggccgcgtctcccatttgccgttcatgccgagcctcggatcggtcggcttcgcaatctccgccggtgccggcacccgccagttcggcggcgaccacacgttgcccggcgcattttccgtccggcgcaacaattggcaggaggcgcgcgccatgctggtgccgcccgagatgaactcggcctcgatcaccttgatgcggagcccgtcgcgcacgagccgggtcgtcacctcgaccggcgtcgtgatgttgggcagccggaacatgtcgacggtcagccgcgcggggacgaaatcgtcggagccgtggcgctcctcgatgacgaagccgagcaggccgatcacgacgcggccgtgcatcgattccgggctccaggggccgttggcaactgatgtcggcatgaagccgtcgccgtgcctggtgaagaaaggctggtttgtcatggcgggcgaccatgacgggaatggcgcgatgaaatcaaggggcggcagccgcgccccactcctgctgcaccgtgatgtcgggctcgtcgccggctcgcgacgccagtgcggcgagcgcatcgcgtgcgatcagttgtgacagcgcccacaccgcggcgccgcgcaccagcgggctcgcatcgtcgagcaggcgccgcgcctctccggcgagaccggcattgccggaattgccgatcgcaaccagcacattgcggatgaagcggtcgcggccgatgcgcttgaccggcgatttggtgaacagcgcgcgaaacgcggcatcgtcgagccgcgcgagatcggcaagatcaggcgcccgcaacgcatcgcgcgctgcgagcttctgctcgcgtcctgcctcggcgaacttgttccaggggcacaccgcgaggcaatcgtcgcagccatagatgcggttgccgatagccttgcggaattcgtgcgggatcggacccttgttctcgatcgtcagatacgagatgcagcgccgcgcatcgagcttgtagggcgcgggaaacgccgcggtcggacagatgtcctggcaggcgcggcagctgccgcaatgatccgtgtcgctctcatcgcgcggcaactcagtcgcggaatagatcgcaccgagaaacagccaggagccgaacgcgcgtgacacgagattggtgtgcttgccctgccagccgattccggccgcctgtgccaacggcttctccatcacggccgcggtgtcgacgaacaccttgacctcgtcgccggtcgtagcggcaagccagcgcgccagcactttcagccgcttcttgatcacgtcgtgatagtcgtcgccctgcgcatagaccgagatcgcgccctgcgagcggcgcgcgatcagcttcagcggatcatcgtcgggcccgtaattgacgccgagcatgatgatcgagcgcacgccagcccatagcgcgcgcggatcggtgcggcgctccggattggccgcgagccaatccatgtcgccatggccgtcggagccgagaaactcgaggaaatattttccggcctcgctggtcgcgtcaggatcggtgatgccgatggcatcgaagccgagcgcgcgcgcctcgcgttgcagcgccgccttgagatcggacggagagagcctgaccgccgggttcagaagtcgaggtccacataggtgcgcgacgccggcactcccgccagccattcgctgagcagcgggcggaacgacgggcgggatttcacccgcgcgtaccacgactttgccgcgtcgtcctcgctccatggcacgtcgcccagatagtcgatcgccgagagatgcgccgcggcggcgagatccgcgtaggtgaggcggtcgccggcgaggtagttccgcgtcttcgccagccagccgatgtagctcagatgatagcgcacattgaccttggcggcgcgcatgatgtcgggcgcgggcggaccgccgccattgtcctcgctcatgaagcgcttgtagatccgctcggtcaccagcgggttggaggcttcttcgaagaacttttcgttgaaccacgccatcaggcggcgcacctcgacacgctcggccgacgacgtcggcagcagccgccgctcgccggcatcgaggccgtgcgtctcgtcgacatattcggcgatgatgggcgcgcccggaatcggtggaaagccctcggcgatcagcaccggcgtggtcgctgccggattgagtgcgagatacgcctcgcgccgctcccagacccgttcctccaccaggcgcagatcgaggccatactcgccgagcacgaggcggatgaatcgcgaatgcggacagaacgggtggtgatacagcgtgtacatgaagcccttggtagtttcgcggcgcttaagaaaccatcaacctgtgcggcccggccgtgcgatttggcgaggccagttccgctcgtctctatgtcgcgtcggcacgcaaaccggtagccgcccccgcagatcgtgcgggtcacaaaaacgctatagcccagcaaatcggccgggtaacccattgtttgacgattttttgcgattgcggccaatgtgcgaataagcgagaagaatccggttttccacacagggcagatcagatcatgatgacggatatgctgcgggcggtgattctcggcatcgtcgagggcgtcaccgagttcctgccggtttcttcgacaggccacctgctgctcgcggaacgcttcttcaatctcggcgaaggcaatttctggaagagctttgcgatcctgatccagctcggcgcgatcctcgcgatcctggtgctctatttcggcagattgtggcgtgtcgcgctcggcatgttctccaatcccgacgaccgccgtttcgtgatcggcgtgctggtggcgttcctgccggcggtcgtgatcggcctgctcgcgggcaaatacatcaaggaattcctgttcaatccgtgggtggtctgcttcacgctgatcgtcggcggcgccgtcctgctgtgggtcgatcagctcgatctgaaagtgtacgaggacgatgcgacccggttcccgctgctgatgtatttctggatcggcgtcgcgcagtgcctggcgatgatccccggcgtgtcgcgctcaggtgccagcatcgttgccgcgatgctgctcggcgccgacaagcgttcggcggcggagttctcgttcttcctcgcgatcccgaccatggtcggcgcgttcgtctatgatttctacaagaaccgcgccgacttcacctcagacaatctcagcgtgatcgcggtcggcttcgtggtgtcgttcgtcgtcgcgatggtcgtggtgaagacgttcctcaactacgtcacccgccacggcttcaccttctttgcctggtggcgcgtgatcgtcggcacgctcggcctgatcgcgctggcgatgggccggtaagggaaactccaaccgtcgtcccggcgaaagccgggatccattaccccgaatggtagtttggcacgacgttggggccgtagcccgctgcaacaatgagctgcggtggttatgggtcccggcctacgccgggacgacctgttgagagagcggcctacgcgctcttcttctggaactgcccggtcgcgcggaagcgccagagatattgcggggcgatcgcttccatcgaatccggcgtgatgccgaggccggcgaaggtcaggccggcggccttggcggcgtcggacaccacattgtccacgcgcagcatcgcgacctggtccggcgtcagcgtgaacgggccgggcgcgaattgcaggacgtaggattgcagcttggcgaggccgaacggcagcggcgccagcatgcggtcgcgctgggtgatctggaggatgatctgcatcacctcgcgcatggtcagcacttccgggccgccgagctcgtaggttgcgcccggcttcgccttgccatcgacggcatccgccacggcgtccgcaacgtcggcgacataggccggctgcaccgtgttgacgccgccgccgaccagcggcagcaccggcgagatccgcgccagcgcggcaaagcggttggtgaactggtcctcgggcccgaacagcagcgacggccgcatgatggtggccgacggcagcgccgcctgcaccgccttctcgccctccgccttggcgcggaaatagcccgacagcgaattttcgtcggccccgatcgccgagacatggaccatccgcccgccatttgcggccgccgccttggcgatggtctcggcgcccttcacctgcaccgcgtcaaagctctgcccgccgccctcggccaggatgccgaccagattgatggcgacctgcgaatcacgcatcgccgcctcgaccgaggccgggtagcggacgttggcttggacggcatgaatctgcccgacccggccgagcggctggagatggccggccagttccggccgccgcaccgcgacgcggacccggtaatcgcgcttgcagagcgcccggaccacgttccgccctagaaaccccgatccgccgaagaccgtgactgtggtgtccaggttcgatgccatggggtggttcctgtcggattcgggagttattgacgtgggttagccatctggcgatacgccatcgaccccaccatgtacagggtattcgatttttcgtttcctgaatttgacaagcgcgtaaccgaaccttactaacgcgcccacgcccaggtggtggaattggtagacgcgctggcttcaggtgccagtggcttaacggccgtgaaggttcgagtcctttcctgggcaccacccattttcataagcgattgaaatcgctcagcatccgcggggtgggtgcggcgacgccgtcacccgccgccgcttcaggccgctccggccccatgctctcgaagcagagccgtcctcacacgacccgccgccccgcgcgccgcgcgatcggcttctgcacaaagtacatcgcgaccatcgagatcatcgagctcgccacgacgacgtagccgatccggtcgaaatgcagcagcgagccgtccgggttctcggcgacgatcgcggctgcgaccaccgagcccagcccgcccgagagctgctgcaccgaggccgagaccgcgctgaacgatccgcgctggctggcgtcggggatcgccgacatcagcgcctgcgacgggatcatgcgcgagaagatgccgacgaacatcagcacattgacgatgatcgcggtcagcagcgagacgtggccgagatgggtgtagatcagcaccatgatggccgacaccacgcagccgaagatgaaggtcggatatttgccgaacgcgtcgctggcgcggccgaccagcggccccatgatgatgctgaacaggccggagaccagatagatcgtcggcagatgcacgatgtcgatgccgagattgtgcacggtgaaggcgctgccgaacggcatcagcatgaaaccgccggtcgccagcagcgtcgtcaccaaaaaggccagcgtgtaacgcggctgccccacggtcgcgatcagatggcggaacggattgctgtcgtgctgcagcttgagatgtgcggtgaccggctccatgaacagcgcaaccaccgcgatcgccacgatcgacaggccgacgatggcgacgaagcagatgtgccagttccagtgattggccaggaaaagtccggccgggacgccgagcacctggctcgcggcgaacgccgtttgcagcacgcccatggcgcggccgcgcagctgcagcggaatcaggtcggtgacgatcgcgagcacgaccgagccgatcacgccgccgaacaggccggtgacgatgcggccgagcagcagcacgtggaaattctgcgccagcgcgcatagcacggtgccgagcatgaagccgacatggaagaacagcagcagcttcttgcggtcgaagcgatcggcaaagccggcggcgaggatgccggaaatgccggcggcgaacgcgtaggccgacaccgcgacgccgaactgcccggccgtgatgttgagcgacggcatcaggatggcgccgagcggcgacatgatgatgaagtcgaggatcagggtgaactgggtgaaggaaagcagcgcgatcaggaacgattgatagcgcgtgaagccgcgcacctgcggctcgtcgtcgatcggcgcggcgatggtctgttccgacatgaggctcatttctgaagatgagtaggacgtgcgagcggctgggcacagatagggcgccgctcgtggatttcatcggcggggacacgcaaaaaatgcgcggatatgtgatcaagaaccgcgagattcccgctcctccatgtgggtattgcgaggcctcgggtcatctcgtcgccaatcgtttgaattgcagcgtgatccaaatgcaacagaggttgcgcggtgctgggcagccgtgtcgggatatggcaagagcggggcgtgatccccccgctcagcggcgcggcgaccgcctatccgctcgcatcccgggcgtttgggggctagtgtcgcctgtcgaatcgaaccgagacccgaggccttaatacatgaccatccgcctgcatcgcggcgacctgcccgatctcacgcgctacaccgattccgttgcgatcgacaccgagaccatggggctgcatccgcatcgcgaccggctctgcgtggtgcagatgtcgaacggcgacggcactgccgacgtgatccagattccgaaggggcacaccgatgcgccgaacctgaaggcgctgctggccaatcctgcgatcaccaagatcttccatttcgcgcggttcgacgtcgcggtgctctacaacacgttcggcgtgatgccggcgccggtctattgcaccaagatcgcctcgcggctgtcgcgcacctacaccgaccgccacggcctgaaggatctggtgcgcgaggtgctcaacgtcgatttgtcgaaacagcagcagtcgagcgactggggcgcgcagagcctgagcgaggcccagctcgcctatgccgcctccgacgtgctgcacctgcatgcgctgcgcgacaagttgaacgtgatgctggcgcgcgagggacgcaccgatctcgcgcagtcctgtttcgatttcctccccacgcgcgccaggctcgatctcgacggctgggaggccgaggacatcttcgcccattcatgatttcgcccgttcatggcgggcgccgaattcgtcgcggcggggccaaatccgccccgtttcggccaaactgttcacgcgttgtcccctgcgggggcgcgacgcgaggtccgggctgcatatttgggcggctccggctaggataggggcatttcgcgcctctggagctcaggtgaattcggttcagaatccagcctatgtgacgggcctcgaggcgcgctttgccgctgccgcgcggcacagccgcatggtgcggatcctgcgcgtcgcggtgcccgcggtggttggactgtcgatggcttcgatcatcttcgtctcggtctacaatcccttccgcgaaatcatccccaggctgccggtcgagatggataacctcgtggtgtcgggcaccaagatcacgatggaatcgccgcatatcgccggcttctccgccgacggccggccctatgaaatgtgggccaaggcggcgatccaggacgtcaccgatcccgaccatgtcgagctgaagacgatccgcgccaaggtctcgcaacaggacgagtcgaccgtgacgatggacgcgcgcaccggcttcttcgacaacaagaagcagctgctcgacctgcgccaggatatcttcctgcaatcgtccaccggctatgaagccaggctgacgcaagccttggtcgacatcaacaagggcaacgtgtcgtcggacgaacatgtcgacgtcaagctgctgcagggcaccctgacatcggaccgactcagaatctacaacagtggcgagctggtgcggttcgaaggcaatgttgtgatgtacctcgacaagctcggcgacaacaatgcgagcccgcccgccgaggccgcaccgctacctcctcctccggcgccgccgaaggcgcgcaaatccgccaacacgaaatgattttgatgatgagacgttttccgcacggcatcgcaattgcggccttcctgctcgcgctgttcgcagtgaattccgcgtccgcgcagggctcgatgagcggcgtccccaatgccatgcagggcttctcgcagaaccgtgaccagccgatccagatcgaggccgccgcgctcgaaatgcgcgacaagaagaaggaggcgaccttctccggcaatgtgaaggtcgtgcagggcgacaccaccatgacctcgaagatcctggtggtgttctacgaggacaaatcgacccagacgcccgcgcccgcgccggccggcaccaagggtgccgccgccaagggcactgcgccgatgcaatcggcgaccccgggccccggcggggcatcctcgatcaagcggcttgaagcgaagggcaatgtcgtcgtgacccagaaggaccaggtggtcaccggcgagaccgcgatcttcgacaccaagaccaatctgatcaccatgctcggcggtggtggcggtcaggtggtgctgacccagtgccagaacgtgctgcgcggcgaccgcctgctggtcgacatgaccaccggcgtctcgcgggtggaatccgagagcggcaaggtgcagggcctgttcatccagtcgcagggcggacagagcggcaagggtggctgcggaacgccggccgcccccgggacggccccggcggcaccgtcaccgcttcagctcctgccgggcagcaagtcgaaatagggagccaagtaagcttcgcgtaaggtccagcagaatcaattggttagataatattttgcagccgcgaggttgaagcgcgaggggcgagactgtatttactgctgcggttcggccgaagatgcgcctcgagggggaatcttgttggctgggcaggggcatccactcatccaaggcgcgggtcaccgcgctttgtcgtattatttgagcatgatccgcgcaaacgcgtccgcgcttgtcgcgcgggaaggccggaatccggttttcatgttggcaggttggcgtgcgaatcgattggtccgcaggcaaagtcgcgggatcaccgtgaaaggctgaagcgaagcggggatggtggatttattcggcatgttccggcggcgctctgcgaaacgcagcaccggatttgcgcgtgcgcatgacgacatcacggcgctcggcgaccagttcggcgagatgctgacgtcgccggtgcgtgacgcgccgccgatggcgcgtgccgcctcggttcccgccgccgagctgccgcgatcccagcccgcagcagcgcccgctccggcccgggcaaggccagccaggaacagcgccccggcggcgccgcagctgatcaagcggccgggctacctggctgtgcacagcgtggaaaagagttttggcagtcgccaggtcgtgcgcggcgtaagcatctatgtgcgccgcggcgaggcggtcggtctgctcgggccgaacggcgccggcaagaccaccgtgttctacatgatcaccggcctgatcaaggccgatcgcggtgcgatcgagctcgacggccacgacgtcaccaggctgccgatgtatcagcgtgcgcgtctcggcatcggctatctgccgcaggaagcctcgatcttccgcggcctgtcggtcgagcagaacatccgcgccgtgctggaggtcgtcgagccctcgaagaagaagcgcgagcacgagctggattcgctgctcgacgagttcaacatcacgcggctgcgcaagagcccgtcgatcgcgctgtccggcggcgagcggcgtcgcgtcgagatcgcccgcgcgctggcgacgcgcccgaattatatgctgctcgacgagcctttcgccggcatcgacccgatcgcggtcggcgacatccaggacctcgtccgccatctcactaaccgcggcatcggcgtgctcatcaccgaccacaatgtccgcgagacgctcggcctgaccgaccgcgcctacatcgtctatgccggtgagatcttgactgaaggcagtccggaggagatcgttaatgatcccgatgtacgccggctttaccttggcgaggaattccggctctagcccaaattttgcatccgtcaagccgtgtacaagcttcacggactaagataagcaagaatcgagccaacttttaaggtcgatcttgcctccatggcgctgacgcaaagactagagttccgccagtcgcagtcgctggtgatgacgccgcagctgatgcaggcgatcaagctgctgcaactgtcgaacctggatctgtcggccttcgtcgaggaagagctggaacgcaatccgctgctcgagcgcgcggccgacgggccagagccgccggtggcgggcgagccggccatggagcggtccgactacggcgattccgacggttcctcaagctacggtgacgatggtgaccgctccgacatggcctctggttcgagcggcgaggccgctttcgagcccggccaggaggagtggctgaatcgcgacctcggcacccgcgccgagatcgagcagacgctagacaccggtctcgacaacgtgttctccgaggagccggcggaggccgctgcgcgcgccgcgcaggatgcaccgccgtctgtctataccgaatggggcggcggcgcctccagcgatgacgaatacaatctcgaagcgttcgtggccgccgagctgacgctcgccgaccatctcgccgaacagctcgcggtggcgttctcggcgccggcgcagcgcatgatcggacagtacctgatcgacctggtcgacgatgccggctatctgccggccgatctcggccaggccgccgagcggctcggtgcgtcgcagcaggcggtcgacgaggtcgtcgcggtgttgcagaaattcgatccgccgggcgtctgcgcccgaaacctgagcgagtgcctggcgatccagctgcgcgagctcgatcgctacgacccggcgatgcaggcgctggtcgagcatctcgatctgctggccaagcgcgacatcgcaggcctgcgcaagctgtgcggcgtcgacgacgaagacatcaccgacatgatcgccgagatccggcggctcgatccgaagcctggactgaagttcggcacctcgcggacccagaccatggtgcctgacgtctatgtccgtccgggtcccgacggcggctggcatgtcgagctcaacagcgacactctgccgcgcgtactggtcaaccagacctattactctgagctgtcgaagacgatccgcaaggacggtgacaagtcgtacttcaccgactgcctgcagaacgcgacctggctggtgcgcgcgctcgatcagcgcgcccgcaccatcctgaaggtcgccaccgagatcgtccgccagcaggacggcttcttcacctatggcgtcgcgcatctgcggccgctgaatctgaaggcggtcgcggacgcgatccagatgcatgaatcgacggtgtcgcgcgtcaccgccaacaaatacatggcgaccaatcgcggcagttttgaattgaagtattttttcaccgcgtcgatcgcgtccgccgacggcggcgaggcgcattcggccgaagcggtgcgtcaccacatcaagcagttgatcgacggcgaagcgccgtcggcgatcctgtccgacgacacgatcgtggaacgtttgcgcgcttcgggcattgatatcgcccgccgcaccgtcgcgaagtatcgcgaggcgatgcggataccatcctcggtgcagcgccgccgtgacaaacagagcatgctcggtaatgccctttcggctcctgcctcctcgtccgaccggtcgcgtgatacagcgcccgtttaggttacttcttgagcatgaccccgtccgagtacggaccggtccaagcgctcgttgcgttcgcgtcaaatcgcgatagtctcaatctttcctggtgaagcgtcgtccaccgagggaggtacccggaagcccagcaagcatcgtgctcctgcaagaccgatcgaggcatccagcaatcgaggcatcaaatgacccttcgaatctcgggaaagagcatcagcatcggcgaggcgcttcgcgcgcgcgtcagcgagcgcaccgacgaggtcctgcgaaagtattttgatggcaactattccggtcacatcacgctgagcaaggatggcttcggctttcgaaccgactgcgcgctgcatctggattccggcatcacgctggaagccgaatccaacgccgccgatgcctatgccagcgcggatgccgcgctgctgatgatcgagaagcgcctgcgccgctacaagagccggctcaaggaccgctccgcccgcaaggcctatgccgcgaacgccgcgctcgccgaattgaacggcgcaggcctcgacgcgccgagctacatcatcgaggcgcccgagaacgaggacgaggtcaccgaatacagccctgtcatcattgccgaggcaaccaccgcgctgaagcggctgtcggtcagcgaggcggtgatggagctcgacctgaccggcgcctcctgcctggtgttccagcatggcggcagtggccggttgaacatcatataccgccgtacggacggcaatgtcggctgggtcgacccgcccgcggtgagcccctgaggatagttggcagatggcattgacgttcgaagccagccctgcttatggtccgccgcctccaggaataaggggggcggaacagggttcgcaggtgttggcaccgccgatacgttggagtagaagccctgccaaatggacccgggctaagcccgcatcccacctcatcttcttgacgccgccgctgtaaagcctatttcgcaacctgacggtcattcacctcggaacgtcccaatgccgattaccgacctggtcgcacccgaggcgatactccctgctttgaaagtcatcagcaagaagcaggcgctgcaggaacttgcggcgcgtgcctccgctttgaccgggcagaacgagcgcgcgatcttcgaagtgctgctgcagcgcgagaagctcggcaccacggcggtcggctatggcgtcgccatcccgcacggcaagctgccgaagctggagaagctgttcggcttcttcgcccgtctcgagcggccgatcgatttcgaggcgatggacggccagccggtcgacctgatcttcctgctgctggcgcccgaaggcgccggcgccgatcacctcaaggcgctggcgcgcatcgcccgcctgctgcgtgaccaggacgtcgccaagaagctgcgcgcatcgcgcgacgcgcaggcgatctactcagtgctcgcgctgccgccggccagcgcggcctaatcactcagcgctcattcgcgcaactgtcatcggcgtgtagtctgttcgtcaggcgatggcgcatgcccgacgcgttgtcaggctcgttgagcctgcagcctggatgaagcgcagcgcaatccggggaaaatctcgcagtcggcgcgaatcccggatttcgctgcgcttcatccgggcttcgaagcattggaaaatttcagcagatcgtcggcagcaggcggcggacttcatcgagcagatccgggacggcctgctcgtcgtcagcaagatgcctgagcagcgcgctctggaacaggccgtcgaacagcgcgtagagcgcggccggagacgatgccggcttcttgttgccgagctcggcgtagcgcgtggcgatgcgccagatcatcgcttccaggctcttgtcgatctcgagcacgtccttgcgaaacgccggctcgaacatcgcctgcgagcgcagatcgtaccagagccggtgcatgcgggcttcgtcccgcaacgtcgccgcgagtttggcgaggaagccttcggtcaattcgtcgcggctgcgcgccgtcgtcaccacctcgtcatagcgcgtcacgcatttcgccttgtagtgacggacgcagcagcagatcaggtcgagcttgtcgctgaagtagtagtgaaacacgccgtgcgtgaatgcggagttctgcgcgatctcgcgcaggctggtgcgcgcgaagccgagctcgccgagcgtctccagcgcagcctccgcaagctcgacgcgccgtgcgttgaacttctcgtcgcgcagcgtctcggtcgccaccgccacgcgttgggccgctcctgtcgcatgccgcgccatccggtgcctttcctctgtctcttcccgcgagcaactataccgcggcgaccgcagtgtgctccatcccttcacaatcatcctctttgacacttgtcaaattcagacttgacaagtgtcaagttcctggacgagggttggcgcaataatttggacaaccgtcaagacggctgaccaatcgacaaaacaggaggaaatgcaccgccggggcgcgccacgctgcgccccgccgacgtcggccgcgatcaccaatgcgctccaaatgcgcaacgtccggcccgcgcagcccccagtccgcagcactgatcaagatcaccaagcaaagggaggactacgtcatgagtgggaagagccttgaaggcaggaaagccctggtcaccggcggcgcccgggggattggcgcggcgattgcgcaggcactggcgcgctccggcgcggctgtgatgatcggcgatattctcgacgataccggcaaggccagcgccgccgagatcgccaaggccggcgtgaagaccggcttcgtcaagctcgacgtcaccgacgacgcgcagtgggagcgggccgccgcagcgacggtcgaaaccctcggcggcttcgatatcctgatcaacaatgccggcatcgagatcacctcgctggtcgccgacatcaaggccgaagacgcgcgccgcatgtgcgacgtcaacgtcgtcggcaccgtgctcggcatgaagcacgccttccgcgcgatgcggccgggcggcgccgccggcaagggcggtgcggtggtcaatatcgcgtccgtcgcggcgacgatcgccttcccgagcatcgccgtctattccggcaccaaatccgcggtcgatcgcatgacccgcgtcggtgcgatggaagccggcaagctcggctatggcgtgcgcgtcaactgcatctatcccggcctgatcccgaccgacatgggcctgcagctcgccaatgacatcgtgaagatcggccttgcgcccgacgtcaacgccgccgtcggttcggtggtggagcagacgccgctcggcaagctcgctgaggtctccgacatcgccgacgccgcggtgttcctgtgctcgaacgatgcccgcttcatcaccggcatcggcctgccggtcgacggcggcatgggcatgtagcaacgaagctgacaacaagcatttcggaggaacgcaatgagcgagaagaagcccgtcatcgtctatggcgcgtccggctacaccggccggctggtttgcgaatatctgcgcgagtacaacattcccttcatcgccgccggccgcagcgccgacaagctcaacgccgcgatgaagtcgaacgtcgccggcatcgagaccgccgactatgaggtggtgacggtgccgcacaccgccgctgcgctgaccgagctgttcaagggtgcctcggtggtgctcaacaccgtaggcccattcgccaagttcggcatcgaggtggtgcaggcctgccttgcggcgaagtgccactacaccgacacgaccggcgagcaggactggctgatcacgctcgagcaggagttcggcaccaagttcggcaatgccggcctgctgctggcgccgggcattgcgcagatgtacaccaccggcgagatcgccgcgcagctgtgcctggagacgcccggcctcgacacgctcgatatcgccgtgttctggggcggcagcccgaccatcgcctcgacgcaaaccatcctggtcaacgccgcgatggccaaggcctactacctcgagcagaacaagtatgtcgagcatcagcccgatgccggcctcaccaacctcgtcatccccggccagcacgaactggcgctggcgctgccctggggaggcacctcgcatccggtctggttcaagcgtgatccgcgcgtcgccaacgtcaaggtgctgggtggcgtgttcaatcgtgcgctcatgctgggcgtgccgcagatcgttgctgccgcgctggaggcgaccaaggacatgaagcccgacgagcgctacgccgcgctggcgcagactgcggccggcgtgatgaacaccatgccgccgcgcgagaacccgcgcgtcaacaagtcgctggattcggtgtatgcctccggcccgctcgggcgcgcgcactgcgtcatcaacggcaacagcaattacaagcagaccggcctgctgcaggcctatgccgccgcgcatctggtgcagcaaccgcccaagcgcgtcggcttcgcctccggctgccaggcgttcggccatcacgagctgctcgggcaattgcgcagcttcggtctggtcggcaagccggtgctgaccgtgcacgattaagcttgagccccgatcggatcggggctcaacactccgttccctgaagcgttttcgtcaagcggactggtatccgccttgttcgaaaacgtctatccgcgggtgacgcagtcgcgcgtcacccgcgccctctcgcgaggctcgccatgcgcttcatcgattatctcgacaagggtgcctcgctcggcgccgatgcgccgtgcctcaccatggatggccgcgacctcagctatggcgatgtacagcggctgagctaccggatcgcgcgcgggctcgagcgctccggcatcgcgccgggcgagaaggtcgcgatcctctcaggcaacgatccgctggcgttcgcctgcgtgttcggcatctcccgcgcggccgcggtgtggtgcccgatcaatccgcgcaacgaagcggccgagaacaagttcatcctcgatcagttcgattgcagcctgctgctgtttcattcgagctttgcgccgatggtcgaggccgtgcggcaggacctgcccaagctgcgcgcgctggtctgcctcgatcaggaactgccgttcgcgccgtcattcgaccgctggctgtccgggcttgccgacgatcaccatcagcgcgacacgatcgacgatctcgcgatgatcccgggcaccggcggcaccaccggcaagcccaagggcgtgatgctctcgggacgcaacattgaggcgatgaccgcgctgaccctgatgggttacccgttcaagggccgtccggtctatctcgcgctggcgccgctgacgcacgccgccggcgtgctgtgctttccgatcatgacgctcggcggccgcgtcgtgatcatgcatcaccctgatataggcgagttcctggcgctgatcgcgcgctatcgcgtcacccacaccttcctgccgccgaccgtgatctacatgctgctcgatcatcccgagctcgacgcggcggatcgctcctcgctgcaatgtttctggtatggcgcggcgccgatctcggcgacgcggcttgccgaggcgttgcagcggatcgggccgatggcgcagctgttcgggcagaccgaggcgccgatgatgatctcgatgatgccgcctgccgatcactatcatgcagacggcacgatcgcgatggagcggctgtcgtcggcgggacggatcggtccgctggtgcaggccggcatcatggacggcgacggcaagctgttgccggcgggatcgcgcggcgagatcgtggtgcgcggctcgcttgtcatggacggctactacaagaacccggaggccacgcgcgaagcatcagtgcatggctggcatcacaccggagacatcggctacatcgacggcgacggctatctctacatcgtcgaccgcgccaaggacatgatcatcaccggcggcttcaacgtctattcgatcgaggtcgagaacgcgttgcgggcccatgaggcggtgcaggattgtgcggtgatcgggatgcccgacgacaaatggggcgagcgcatcgttgctgtggtgcagccgcgcgccggccacaccgtcgatgcgaccgcgctggcggcgttcgtcaagcagcagatcggcagcatcaagacaccgaagcagatcgaggtctgggacgatctgccgcgctccaaggtcggcaaagtgctgaagccagacatccgcgcgcggctaactcgctagcccgcgcgatccgaggcatctacctcttgccatactcggtgaacacatagtcgcggttctgcaccaccgtgtggcaggcataaccacattttgcgtcgttttcctgcggcggattatccgtcgtgttggcgggcctgaacacatcggtcgccgcgtcgtactcgaacgcgccgtatccccagccgccgctatccgcgaacctcttgctgtccttgaccatgaagtcgacgtcgtgctgggcgcctggcacggttggttgaccgggatatgcctcttgcttcttcgggatccagtgaatcttcgccatcttggcgccatccgggaacggcttgccattgccgggtacgccgtcgcgataggcgccgatcatcgcgggattgcccaggatcacggcgatgacgccttcattctcgctgatcgcgatcaccgcccagtcctcgtatcccctgaactcggagaacgcgagcccgttctgcacctgcaaactgtacttgtcctgcgcggaaatcgcgacaccggtcgcgaggatggaaatcgataccggagcaacgagattgatcagcgtgctcttctgcatggtcgcatctcctccaatgatttggcggcgaataagtcctggtggaagtcctcttgtcgtgcggccgtctgaaaggctcgggactgcgcggaccgttcgtcacgcgaactgataacagcacggaacggtgccgaacgaaatggagccgctgcggtccgcgcctattgacaagcgctttgtgacgccagaagacggatcggcgcaacatggcgcgtgcgtaccaagggatgactgatgtcccgcgattttcgccttgatcgcgttcctgtcgacgttctcgcttacgaactcgccgaggaaagggccagcgcgctcgggcgcatgggccgggcgctggaacaggccctcgccaaattgcgcgagttcgatgccgctcatccgcgcgctgaagcaccggcgcctgcacagcaggcgcggcgcatgctggtccggcaagccggccacgcgctctggatgttcgtggtgcagcgggaagcttgcgggctgcgcaataaccgcatgctgatgcgcgactacaatgttcccggcgaggtgcagctcagcatgggtccgctacccgccacgtcgacctgatcccaataaaaaatgcgcgggccgcctcggtcggtgtcgaggcatgcccgcgcatctgaactcgcggatgtcgtgtcagcagcgcgtcagtggacgctgacggcttgcagctcgttgctccaggcgttcgcgatcgcggcttcgcggctgtcggtcagcatgatcggcgtgccgtcggcggcgtgcagcgcgaacagcttgaggcccggcgcgatcttcggcgcctgcggaaacagatcgggcacgtcctcggaacggacctgcttcacataggcgatatgaccctcgcccagatgggccagcgcttccggcgtgacgctgtcggattggaagatgatgcttgcttcactcatggtctcgactcctcagtcagacaagcggtcgagtccgctccttgtttctattattcgtgctcattgatagcgattgtcttaatgacccgttcaggttccggcctggccagatcaatcgacaacaacccgttcttcagatccgcgcccagcacctgcatcccctctgccagcacgaaggtgcgctggaagtggcgcgcggcgatgccgcgatggatgtattgccgagccttgtcgtcctgctggcggccgcggatgacgagctgattttcctcaatagttacatcgagttggtcgcgggtgaagcccgccaccgccaacgtgatgcgcagccgctcgggctgcccgttggtgcggtcgcaccgctcgatgttgtagggaggatagccgtcagcgcccttcacgacgcggtcgagcgcacgctcgatctcgtcgaatcccagaaggaacggactggacaacgatggaacacgagacattacaaagtcctctcgaagcgactttgaggggcccttgcggcgccccatgcaaccggcgggccgtctggcctccggttagtgagggatatgggggcgatctggatagcgttcaagcagcccagaaaccagcctaaacgcccgcaacatgagggcaaattcttctcgatcggttaccccacgacccgcttccggccgtcagcggtaaaaagatgcagtttgtcgcgcggggcgaccgccaggatccgctcgccgatcccagggccggtggcgccgggaacccggacgatcacctcgccgggcggcagctcgcccggattggcggcaacgccctgttccgcgcgctggcggctgccatagacgaaggtctcggcgccgacatgctcgattgcctcgacggtcaggccgagcgcgacgccgcccggtgcggtctcattggagatcacgaaatcctccggccggatcccgacaatgccggcgccgtcgacgcccgcgatctgggacgtcagctcctccgagcgcagcggcatcaggttcatcggcggggcgccgatgaaggacgcgacgaaggtggttgccggcttctggtagatctggagcggattgccgatctgctcgacctggccgccattcatgacgacgaggatgtcggccagcgtcatcgcctcgagctggtcgtgggtgacgtagatcgaggtggtgttgagccggcgctgcagcttgcggatctcgacccgcatcgcgatgcgcagcttggcgtcgaggttcgacaacggctcgtcgaacaggaacaccttcggctggcgcacgatggcgcggcccatcgcgacgcgctggcgctggccgccggagagctggcgcggcttgcgctccagcattggcgagagctcaagcacgcgcgcggcttcctcgacccgggtcttgatctcggcctcggccatgccgcggttgcgcaggccgtaggccatgttgttgtagacgctcatatgcggatagagcgcgtaattctggaacaccatcgcgatgtcgcgatcggcgggctcgacctggttgacgacacggccgccgatgtcgatctctccgccggtgatggtctcgagcccggcgaccatccgcagcagcgtggacttgccgcagccggaggggccgaccagcacgcagaactggccgtcgccgacgtcgacatcgacgcccttgatggcctcgaagccgccgggataggtcttgcggacgctgcgcagcgtgacgttggccattacttttccgtctccaccaatccgcgcacgaacagtttctgcatcacgacgacgacgaacaccggcggcagcatcgcgagcagcgcggtcgccatcacgacaggccattcggtcagcgcgtcggttgtggtgatcatcttgcggatgccgacctggatggtctgcatgtcatcgcgcgtcgtgatcaacagcggccagagatactgattccagccgaggatgaacaggatcacgaacagcgcggccatgttggtgcgcgacagcggcaacagcgtatcccagaagaagcggaacggtcctgcgccgtcgatgcgcgaggcctccagcaattcatccggcaccgtcatgaaaaactgccggaacaagagtgtcgcggtggcggacgcgatcagcggcagcgacaagccggcgtagctgtcgagcagatgcaggtcggcgacgatcttgtaggtcggatagatgcgcacctcgaccggcagcatcaatgtgatgaagatgatccagaagatcgccatccggaacggaaaccggaaatagacgatcgcgtaggccgagatgatcgagatcgcgatcttgccgaccgcgatcagcagcgccatgaccagcgagttcagcatcatgttgaggacgggctcgcgggtcgagccgctcgtgccgacaaacagcgtctggtagtaggtctcgaggaaatggccgccgggcagcagcgacatctggccattggcgatgacggcgttgtcctgggtcgaggcgacgatcgcgagatagaccgggaaagcgacgatcgcgatcccgatccacaggatgacgtgagccagatagcgctggaagccctgttcctcgaccatcagtaagtcaccttgcgctcgacgaagcggaactggattccggtgagcacgatcacgatgaccatcaggatgaccgactgcgccgccgacgagccgagattgccgccgagcaggccgtccgaatagaccttgtagacgagcgtctcggtcgccttgccggggccgccgcgggtcatcgtgtcgatgatgccgaaggtgtcgaagaaggcgtagacgatgttgatgaccaggaggaagaagatggtcggcgacagcagcgggaagatcacggtccagaaccgccgcatcggacgcgcgccgtcgatcgcggcggcctcgatcacgctcttcgggatgctctggaggcctgcgaggaagaacaggaaattgtaggagatctgcttccaggccgcggcgaggatgaccagggcggcggcctggtcgccgttgagcagcggattccagtcaatgcccatgccgcgcagatagcgcgacagcacgccgagcgagggatgcagcatgaacacccagagcacgccgacgaccggcggcgccaccgcatagggccagatcaggagcgtgcggtagagcgtcgaaccgcgcagcggcttgtcggccatcacggcgagcagcagcgcgaacgacagcgaggacaccgcgatcgcgagcgagaacgcgaaggtcctgataatcgcggcgaaataggccgggtccttgaacagctcgagatagttctcgaaccagacgaagctggtggacaggccgaaggcgtcctgcagcaggaaggactggatcaccgcctgcgcggccggccagtagaaaaagatcaggacgatcgcgagttgcggggcaaccagcgcgtaaggcaacagctttgattgaaaaatggcttgcttttgcatgatctcggaagaattggcaggccgcgcttgcggcctgccggatggtctcaaggcatcatgtcagtggacggcggtcttttcaaactgccgcagcatctgattgccgcgttcgacggccgagtccagcgcctgcttggcggtcttcttgccggccagcgcctgctcgatctcctccgaccacatgtcgcgcagctgcaccatgttgccgaggcgcaggccgcgggaattctcggtcggctccttgttggtgagctcgagcagcggggtctcgagatagggctggtccttgtagaagccctcttccttggccttggcgtaggccgccttggtgatcggcagatagcccgaggccttgtggatccagacctggcggtcggtgtccgagaggaaggtcaggaacttggcgatgcccttgtattcctccgccgacttgccgcccatgatccagagcgaggcaccgccgatgatcgagttctgcggcgcgcccttgacgtcgggataatacggcatcggcgccgcggtgaagttgaacttggcctgcgccttgacgttgccgaagaaggccgacgaggtcaggtagatcgggcattcacccgaggtgaagcggccttcaccggtgttggtgcggccggcgtagtcgtaggtcttgtccttctgcagctcgaccaggttctcgagatgcttgacctgcagcgggccgttgaattcgagcacggtgtcgaagccgtcgaggccgttggccttgctggcgagcggcacgttgtgccaggccgacagctgctcgagattgacccaggtgacccacgagccggagaagccgcaggtggtgtagccggccgccttcagcttcttggcgtcctcgaacacttgcggccaggtcttcgggatctcggcgatgttggccttcttcagcgcgtcgaggttgacccacatcacggtcgacgacgagttgaacgggaacgacagcatctcgcccttcgaggtcgagtaatagccggtgatcgcgggcagatagacgctcggatcgaacttctcgccggcgtcggccatcagcttgtagaccggtttgacggcgccggtggcggccatcatcgtcgcggtgccgacctcgaacacctgcatgatgtgcggcgcgttgccggcgcggaacgccgcgatgccggcattcatggtgtcggcgtaaccgcccttgtaggtcgggatcaccttgtagtcggactgcgaggcgttgaagtcggtggccagcttgacgatgacgtcgttgttggcgccggtcatcgcgtgccaccactggatctcggtcaccgcaaatgcaggcgacgcgaatgcaagcgtagcagcggctaccgcagcagcgcctaatcgtcggaaaatcatcaaagcccctcccggttggaacgtcatctttcgttgcgcgcgttatcagcgccggatgacgttcaaatgaccgtataaacgaaagccatcgtaggggggaagccgcgacaaagggaagcggtaaaaaaggcggagatcgcagccgccgccctgcggtgcaacgccggacgcgacgctgcaccgcggggctgacggatggttgtgtcagcgcttgcgctggggaccgcagaccacgcccttgtcgaccaggccgttgatctcgtcgctggagtagccgaactcgccgagcacctccgcagcgtgctggctgaatttcggcggtgtgcggcgcaggttcggcttggtgcgttcgaggcggatcggcgaggcgacgcccttgtaccaatccttctcgatgacgtcgccgcgatggatcgtgtgcgggttggtcagcgcctggtcgatcttctgcaccgggccggccggcaggccggcggcgagcagccggttgcacagcggctcggcctcgtgctggctgaacacggcggccagctcggcccgcagcgcatcgcggttggcgatccggtccttgttgcgggcaaagcgcggatcggtgccgagctcgggcttgccgatctccttggcgagcttgcggaaggtgccgtcattgccgacgccgatgaagatgttgtcggtcttggtcgggaagatcgcataaggcacgaggttcggatgctcgttgccggtcagctgtggcggcttgccgtgcatgaaatagttcgcggtgtgcggatgcatgatcgcaagcccggtctcgtacagcgtggtctcgaggaactggccgagccccgagcgctgccgctccgacagcgccatcaggatgccgatcgcggcatagagcccggtggtgatgtcgaccagcggcacgccgatgcgcatcgggccgctctccggcgagccggtggccgcgatcatgccggtcatcgcctggatgatcgcatcatagccgggattgccgccgcgcgggccgtcggcgccgaagcccgagatccggcaatgcaccaggcgcggaaatttcgcgcgcagcacgtcgttgccgatgccccatttgtcgagcgtgccgggcttgaaattctcgatcagcacgtcggcggtctcgagcatcttcatcagcaccacgcggccgccctcggaggcgaggtcgagtccgatcgagcgcttgttgcggttgatgccgacgaaataggccgcgtcttcctcgtggaagggagggccccagtcacgcacctcgtcgccggcgggcggctcgaccttgatcacgtcggcgccgtggtcggcgaggatctgggtgcaatacgggccgccgagcacgcgcgtcagatcgatcacgcgcagtcctgtcatcgcgcccgtggccgctggggtattcatggaaacaaccttcgctcagttgggataacgagggtcccagagctaacggtcttcaggcgaggcagcaatgctttgatcggcgctggcccatgcagcgggcagcgcgtgcgttcgccacgcaccaaaagtaatggtccgccacgttgtcgcgtggcggaccattgcgtgatgtggaattagacgacggtcagcttgacgtcgacattgccgcgggtggcgttggaataggggcacacctggtgcgccttctcgaccagtgcttcggcgtccgcgcgcgacaggccgggcagcgagacggcgagctcgacggcgaggccgaagccgccttccgagcgcgggccgatcccgacggtcgaggtcaccgcggcgtcggcgggaaccttggggccgccctgcgaggccacgaacttcatcgcgccgatgaagcaggcggcatagccggccgcgaacagctgctcaggattgttgccggcgccaccgccgccaccgagctccttcggggtggtgagcttgacgtcgagcgcgccgtcgagcgttgccgcatggccgtcgcggccgccggttgccttggcgctggtcttgtagagcacgttcacagacatcgtggtctcccttggtttggcttgctggtttcgagtgggtttgaaatcaacggccgcatgtattgcattcaattgaattgtgcgcaatataaattgcgcggcctcacatttaattgttcgcaattgaattggcggtcccgtgagcccaaaatgacccgcaaacgagatggattcgatgggaatcatggtcaggaaacagacggcggcggatcaggcgctgcggctcgataaccagatctgctttgcggtctattcgaccgcgcacgccttcaaccgcgtctacaagccgctgctcgaccggctcgggctgacctatccgcagtatctcgtgatgctggcgctgtgggagcgcgacgacgtgccggtcaaggatatcggcgagcggctgttcctggattccggcacgctgacgccgctgctgaagcggctggaagcggccgagctgatcaggcggacccgcagcaccgaggacgagcgcgtggtgctgatcgcgctgacgcagcaaggccacgcgctgcgcgaaaaggccaaagccgtcccgcagtcgatcctcgccgcgtcggactgctcggttggcgaattgctgacgatgaaggacgagatcgtcgcgctgcgcgaccggttgaatgcggtgctgggggagtaggcggacggcgtggccgcggttagaggcgcttcttggcgaaggcgcagtaccagacgagttgccagggtttgaattttgaagtgtgggcggacttgccggcgttgtgctcgggaatccgtcgtttcagatcctcggtggcgccaacatattcctgatcagggaagtcgatgctgcggatgatatagacgtaccacattcgcatctacgaatagccggagtacggacgcctagcagggacagcttagcctatcgatcgggagcggacttagaaagtggcggttgaaccagtccgtcttcgcccttcgggctacgccggacaccacgcttcgcccttcaggcaacccgtagctgcgccacgcgtagcccgaagggcgaagcgtggtggagccaggcgggatcgaaccgccgacctcttgcatgccatgcaagcgctctcccagctgagctatggccccttatcccgtgggacgatcctgggggatcagtccctgcccgcgcggcctagacgactcgcgcggcagcaccgttgatcacagatctgcgccgatctcaagtctcttcgtcgcctccgacgtcaccaatgatgtcggtgacgtcctcatcgccctcttcctcgtcggcgatgaaggtcgaatcgtcgtcatcatcgtcgtcgatggtctcatcgacctcgatatcgtcctcggattccggaaccacggccttgaccttgccggtgttctcctcggcatcggcctcctcgagcgagaccaattcctcggcttcggccgcctcgggctcggctgcggttgccggcgagttcacgggcgcgccacggccccgcgccggcgcgacgggcgcaatcggcacgacctcgccggtgtagggcgaaatcaccggattcttgttgaggtcgtagaacttcttgcccgtggtcgggcaaatgcgcttggttccgagctcggacttggccaacgtggtcatcccagaattttgctgaaaaacggtgcttcacttggctagttgagcagccgctgtcaatagcggtttgcgcgcaagtgacgggcgcgtgacgcggtgttgcctatgtgatacctgccgcggcgcgagaggacacaatcttggcccattctgacaccccgaccccgctggaatcccgcgcttgcggccccctggctggcaaggtccgcgttcccggcgacaagtcgatttcccaccgtgccctgatcctgggggcgctttcggttggcgaaacccggatttccggcctcctggagggcgaggacgtcctcaataccgcccaatccatgcgcgcgctgggcgcaaaagtggagcggacggcgccgtttgcctggtcggtatccggcgtcggggtcggcggcttcgcccagcccgcagcgccgctcgatttcggcaattcgggcaccggctgccggctggtgatgggcgcggttgcaggctgtccgatcgcggccgtcttcgacggcgatgcctcgctgcggtcgcggccgatgcgccgcatcctcgatccgctcgagctgatgggcgcccgggtcagcgatatccgggagggcggccggctgccgctcaccctccacggtgcccgctatccggtgccgatcgtctacaagacgccggtcgcctcggcccagatcaagtcggcggtgctgctggcgggcctgtccgcgcccggcatcaccaccgtcatcgagcaggaggcgagccgcgaccacaccgagctgatgctgaagcattttggcgccgagatctcctcggagaaggaaggcagccacggccgcagaatcacgctgaacggcgagcccgagctgcacggcgccgaggtcgtggtgcccgccgacccgtcctcggcatcgttcccgatcgttgcagcgctgatcgtcgaaggctccgacgtcgtgttctccgacgtgatgaccaatccgctgcgcaccggcctgttcaccacgctgcgtgaaatgggtgcctcgatcgaggagagcgaggtgcgcggcgatgccggcgagccgatggcgcaattgcgcgtgcgcgcctcgaaactgaagggcgtcgaggtgccgccggagcgcgcgccgtcgatgatcgacgaatatctggtgctggcggttgcggctgcgtttgccgagggcaccacgatcatgcgcggcttgcaggagctgcgcgtcaaggagtccgatcggctcgaagccaccgcggacatgctgcgcgtcaacggcgtcaaggtcgaggtctccggcgacgatctgatcgtcgagggccgcggccatgtcccgggcggcggtcttgtcgccacccacatggatcaccgcatcgcgatgtcggcgctggtgatgggctgcgcgtcggatcggccggtgaagatcgacgacactgccttcatcgccacaagttttccggacttcattccgatgatgcgcgcgctcggagctgatttcgcatgatcatcgccatcgacggacccgccgcctccggcaagggcacgctcggcaagcggctcgcccaccactacggctaccgccatctcgacaccggcgtgatctaccgcgcggtggcctatgcgatgatggcgcagggcgccgacctcaatgatgaggcgctggcggtggccgtggcgctggagctcgaccccgagaaattcggcaatccgatcctgaagacccagaaggtcggcgagggggcatccgtcgtctcggcctttcccaaggtgcgcgaggcgctggtcagcttccagcgccagttcgccgccgatccgcccggtgcggtgctggatgggcgcgacatcggcaccgtgatctgccccgatgccgacgtgaagatcttcgtggtcgccgatccgcaggtgcgggcgcgcaggcgcacgctggaggcccgggcccgcggcgaggacgccgacgaggcggcggtgctcgcggacatcctcaagcgcgacgagcgggaccagaatcgggcgattgcgccgctgcggccggccccggacgcccacacgctggacaattccaacctcgacatcgaggccggcgtgcgcgccgccatcgccatcgtcgaggcagcgcgcgccaaacgctaaagcgcgatgatatttggttgaatcgtcatcgcgctttagctctttgtttgagcatgatcttttcggaaaaccgcttcgcacttttccggatcatgctctagaatcagcggcatcgaagcgccctttcggctcgaaaacccagcaaaatggggcatttcctgcttgccgaaagcagggctcagggctatatcagcgccgttcggcgccaccatcgaccatgtcgaggccgtgtctgagcgggccggtgctgggtttgagccctcgccgcatctggaggaacgcccgctcccaggtcttgcagtcgatattttcgcttcgggctccggactatcaaacgtaccgaacgtgcagtcttgctgccggcccgctgttgctcctcctgcaacgagcggtcgtcagggtttgcggaaccctgacacttcacgcgcggtgcgcccaacaacccgaacggccggcgagatcccgcatctggagaaccaatggtttcgaattctgcgtcttcctattccccgacccgcgacgatttcgcggcgatgcttgatgagtcctttgccggcggcaatctgcaggaaagctcggtcatcaagggcaaggttgttgcgatcgagaaagacatggccgtcatcgacgtcggcctgaagaccgagggccgcgtcgcgctgcgcgaattcgccggccccggccgtgagagcgacctgaaggtcggcgacgaagtcgaggtgttcctcgaccgtatcgagaatgcgctcggcgaagccgtgctgtcgcgcgacaaggcgcgccgcgaggaaagctggggcaagctcgagaaggcgttccagaacaacgaaaaggtcaacggcgtcatcttcaaccaggtcaagggcggcttcacggtcgacctcgacggtgcagtggccttcctgccgcgctcgcaggtcgacattcgtccgatccgcgacgttgcgccgctgatgaacaactcgcagccgttccagatcctcaagatggaccgccgccgcggcaacatcgtggtgtcgcgccgcacggttctcgaagagacccgcgccgagcagcgccaggagctggtgcagaacctcgaagaaggtcaggtgatcgacggcgtggtcaagaacatcaccgattacggtgcgttcgttgatctcggcggcatcgacggcctgctgcacgtgaccgatatcgcctggcgccgcgtcaaccacccgaccgaggtgctgaccatcggccagaccgtgaaggtcaagatcatcaagatcaaccacgagacccaccgcatctcgctcggtatgaagcagctgctggatgatccgtggcagggcatcgaagccaagtacccgctgggtgcccgcttcaccggccgcgtcaccaacatcaccgactacggcgcgttcgtcgagctcgagccgggcatcgaaggcctgatccacgtctccgagatgtcgtggaccaagaagaacatgcaccccggcaagatcgtttcgacctcgcaggaagtcgaagtgcaggtcctggaagtggattcggtcaagcgacgcatctcgctcggtctcaagcagaccatgcgcaatccctgggaagtgttcgtcgagaagttcccggtcggttcggtggtcgagggcgaagtcaagaacaagaccgagttcggtctgttcctgggtctcgagggcgacgtcgacggcatggtccatctctccgacctcgactggaagcttccgggcgagcaggtcatcgacaacttcaagaagggcgacatggtcaaggccgtggtgctcgatgtcgatgtcgagaaggagcgtatctcgctcggcgtcaagcagctcgaaggcgaccccttcgccgagccgggcgacgtcaagaagggcgcggtcgtgacctgcgaagtgctcgaagtgaaggaaagcggcatcgaggtccggatctcgggcaccgagttcaccaccttcatcaagcggtccgaactggcccgcgatcgcaacgaccagcgcgccgagcgcttcgccgtcggcgagaaggtcgatgcccgcgtcatccagttcgacaagaaggcccgcaaggtgcaggtctcgatcaaggcgctggaagttgccgaagagaaggaagccatcgcgcagtacggctcctccgattcgggagcgacgcttggcgacatcctcggcaccgcgttgaagaaccgcggcaccgacaagtaagcgttcgcaccattctcgcgaacaatcggggccccggcgcaagccggggcccttttgtttgccggattgcgggccttgttttcttcatattgcgtcgcaattgatgtatttggctaagctgatagtgacgctgcgacggcaaaacgcgcggaccttcgcgctgaccatttctggagagaccgatgtcgctggattcggacgtgatcgtcgaccgtcgccgtatcaggcgcaagctgacattctggcgcgtcgccgctgcggtcattgcgatcgcggccatcgtcggcgtgggcgtgatcgccgccggcggacgcggcggcttgtcgacgtcgaacgcgatcgcgcggatcaatatcgacggattgatccgcagcgaccagcagcgcgtcgaggcgctggagcggctcggaaagtcgagctatgcggcggttgtcgtgcacatcaattcgcccggcggcaccaccgcgggctccgagcagctctacgactcgctgatgcagttgaaggcgaagaagccgctcgtcgtcgtggtcgagggattggccgcatcgggcggctacatcaccgcgatcgcctccgaccatatcgtcgcccagcagacctcgctggtcggctcgatcggcgtgctcttccagttccccaacgtttccgaattgctcaagaccgtcggcgtgaagatggaggagatcaagtcctcaccgttgaaagcggcgcccaatggcatggagccgaccagccccgaagcccgtgccgcgatcgaggggctggtcaaggactcctatgcctggttccgtggattggtgaaggagcggcgcggcatggacgatgcgctgttggagaaggtcgcggatggacgcgtcttcaccggccggcaggcggtcgatctcaagctgatcgatcagctgggagatgaaaagaccgcgatcgcctggctggttgcggagaagaaggtcaaaagcgacctgccggtgcgcaattacacgcttaatccgcgattcagcgacctgaccttcctgcgcaccgcggcgtcgatgacgctcgatgcgttcggccttggcgccatcgcgcggcggatcgagcagggtggcgtggcccaggccgtcgaccggtttgggctcgacggcatgctggcgctgtgggcgccgggaggagccgactagtcgggtgcgaaacgcgtgatgatcaaggtattcccgctctgcgggaatcgccgcatgccccaattgggctatttgtcacgcgatttcacggcgtcctaaatcgatttagcgtcttgacagtgcacggcattttcacggaaatgggtttccgcaagagcccggatcccattttcgatgatcaaatccgaacttgttcagcgtatcgccgagcacaacccgcacctctatcagcgggacgtcgagaacattgtgaatgcgattctcgatgaaatcgtcgcggcgctggcgcgtggcgaccgcgtcgagctgcgcggtttcggcgcattctcggtgaagcatcgcccggcgcgtgccggccgcaatccgcgtaccggcgagcatgtgccggtcgaccagaagagcgtgccgttcttcaagaccggcaaggaaatgcgcgagcgcctcaatcgcgacgaggccgaggcgggagccgccaagatcgacgcgcccaaggctgatgcttaaggctgaggcctgagcgccgcctccggcgttgtcgtgctgcgggcgaagggcccgcactttctccatcgctgcgagagatggtcatgcgaaagttcttcacggcagtggtcgtcattccgctcggactgatcttcatcatcttcgccgtcgccaaccgtcactgggtgacggtgtcgtttgacccgttcaattctgtgacgccgacggttgcggtcacactgccgctgttcgtggtcatcatcgcttccgcgatcctgggcgtgatcgcgggcggcatggcgacctggttcaagcaggggcgctggcgccgcgccgcccggcagcacgaggccgacgcccgccacatccgcgccgagctcgccgacctcagggccgcggcctcccgggacgacgcgcagcgccgcccggccgcggcccagctcggcttttacgggcccaatgggcgagacaagcagggcgcgacgttgtagaacccgccccgtccgaccagggttcaccccggttccggccgcccgaaaacctgttttgagacccgtttcgagaccatgcccctgctcgtcaaaatctgcggcctgtcaacgcgcgagacgctcgacgtcgcgctggagagcggcgccgacatggtggggttcgtgttctttccgccgtcgccgcgccatatcagcctagagaccgcgcgcgagctcggcaaacaggccaagggccgcgccgtgaaggtcgcgctgacggtcgatgccgacgacgcgaccatcgagaacatcatcgagacgctgcggccggatatcctgcagctgcacggcaaggagaccaccgcgcggctgcgtgatctcaagcagaaattcggcctgccgctgatgaaggcgctgccggtcgagaccgcggccgacctcgcgccgctgccgggttatgccggcgtcgccgacagtatcctgttcgatgcccgcgcgccaaaggatgcgacgcggccaggcggtctcggcgcgccgttcgattggcacgtgctggaaaatctcgacctcgcgctgccctacatggtctccggcgggctcaacgccgagaacgtcgctgaagccgtccgcgttacccgcgccggcggcgtcgacgtctcctcgggtgtcgagcgcacgcccggcgtcaaggatcccgagctgatccgcgccttcatccgcgccgcacgcgcaacccaaagtactacccaagaactgatggttcgatgaatcaaaacctgcccaattccttccgcagcggccccgacgagcgcgggcatttcggcattttcggcggacgcttcgtcgccgaaacgctgatgccgctgatcctcgatctcgaaaaggcctatgccgacgccaaggccgatccggcgttccaggccgagatgaatgtctatctgaaggactatgtcggccggccgtcgccgctgtatttcgccgaacggctcaccgagcatctcggcggcgcgaaaatctatttgaagcgcgaggagctcaaccacaccggttcgcacaaggtcaacaacgtgctcggccagatcatggtcgcgcgccgcatgggcaagaagcgcatcatcgccgagaccggcgccggccagcatggcgtggcgacggcgacgctgtgcgcgcgcttcgggctcgaatgcgtggtctatatgggcgcggtcgacgtcgagcggcagcagccgaacgtgatccgcatggagatgctcggcgccaaggtcgtcccggtgcagtcgggcgcgcgcacgctgaaggacgcgatgaacgatgcgctgcgcgattgggtcaccaacgtgcacaacaccttctattgcatcggcacggtggcgggtccgcacccctatccaatgatggtgcgcgacttccagtcgatcatcggccacgagacgcgcaagcagatgcaggaggccgagggccgcctgccggactcgctgatcgcctgcatcggcggcggttccaacgcgatgggcctgttccatccgttcctcgacgatccctcggtcgagatcttcggcgtcgaggcagccggccacgggctgacgcagctgcatgcggcctcgcttgccggcggccgccccggcgtgctgcacggcaaccgcacctatcttttgatggacgccgacggccagatcgaggaagcgcattcgatctcggccggcctcgactatcccggcatcggccccgagcacgcctggctgcacgagaccggccgcgtgacatatctctcggcgaccgacgaggaggcgctggccgcattccagctgctgtcgcggctcgaaggcatcatccccgcgctggaatccgcgcatgcgatcgcgaaattgtccgaactcgcgccgcagcggccgaaggatcacctgatggtggtcaacctctcgggccgcggcgacaaggacgttccgcaggtcggcgacatcttgaaggcgaggcagaagtgatgggctgggcgctccttccttacctctccccgttggggagaggtcggctgcgcagcagccgggtgaggggtctctccactcattcgaaccgcagcgatgtttcgatcatctcgagcacaccctcgcgattctcatacacatcggtcttggtaacccgcacgacgagaaagccgcaagcttcgaggactttggtcctggcttcgtcgcgtttcagttctgatgacgtggaatgtgttacgccgtcgacttccacgatcagtttgccgtcgagcgtgacgaaatcgacgacgtatcggtcaatcgggtgctggcgacggaatttccatcgcgctagcctgcgattgcgcagcgcctgccaaagcttcgcctcggcgtttgtctgtgacgcgcggaggcttcgcgctcttgctttgaactgctccatccccctcacccggctgctacgcagccgacctctccccggaggggagaggtatagcacagcgactgtccaaccatgactacccgtatcgacgcacgtttcgccgagctgaagcagcagggccgctccgccttcgtcaccttcgtgatggcgggcgaccccgacgccaagacctcgctcgatatcctcaaggcgctgccgaaggccggcgccgacgtcatcgagatcggcatgcccttcaccgatccgatggccgacggcccgtcgatccaggccgccggcctgcgtgcgctcaagggcggcatgaccttgcgcaagacgctggcgatggtccgcgacttccgcaaggaggacaacgccacgccgatcgtgctgatgggctactacaatccgatctacatctacggcgtcgacggcttcctgactgacgccaagaccgccggcgtcgatggcctgatcatcgtcgacctgccgccggaggaagacaccgagctctgcatcccggcgatgaaggccgggttgaacttcatccggctggcgacgccgaccactgacgacaagcgcctgccggcggtgctcgccaacacgtcgggctttgtctattacgtctcgatcaccggcatcaccggcagcgctgcggccgactccaacgcggttgcggaagcggtcgcgcgcatcaagcggcacaccaagctgccggtctgcgtcggcttcggcatccgcacccctgagacggcgcgcgcgatcgccgagagtgccaacggcgccgtggtcggcaccgcaatcgtcgatgcggtgcgtgccaacctcgatgccgagggccgcgccacgccgaagaccgtgagtgcggtggcggacctggtgtccgcgctggcgcagggggtccggggcgccaagcaggccgctgaataagccacattttgcggcaacaaggccgcagacggcggcttgccgggttcgcccggcccgccatatatccagctggtgcgggaccgacccgcatttcggagcgaaccatgaactggctcaccaacgtcgtccggccgaagatccgcaacatcctgcgccgcgagacgccggagaatctctggatcaagtgcccggattccgggcagctcgtgttctacaaggacgtcgaggccaaccagttcgtgatccccggctcgaactaccacatgcgcatgggcgcggtggcccggctcaagtcgatcttcgacaatgagacctggttcgacgtcgcgctgcctgacgtcgcggccgatccgctcaagttccgcgacgagcgcaagtatgtcgaccgcatcaaggacgcgcgcgccaagaccggactgaacgacgcgatcaaggtcggctacggcaagttagagggagccggcgtcgtggtcgcggtgcaggatttcgatttcatgggcggctcgctcggcatggcggccggtgaagcgatggtgcgcgggctcgagctcgcggtcgagaagaagtcgccgttcatcgtgttcgccgcctccggcggcgcgcggatgcaggaaggcattctgtcgctgatgcagatgccgcgcaccacggtcggcgtgcagatgctgcgcgaggcgcgccagccctacatcgtcgtgctgaccaatccgaccaccggcggcgtcaccgcctcctatgcgatgctcggcgacatccacatcgccgagcccggcgcactgatcggctttgccggcgcgcgcgtgatcgagcagaccatccgcgagaagctgcccgaaggttttcagcgcgccgaatacctgcgcgagcacggcatggtcgacatggtcgtgcatcgccatgagatgaaggccacgctggcgcggctgtgccggctgctgaccaaggcgccggcgcttgaaaccgcatcgaagcccgcaactccggtcaccgagccggcccagatcgtgacggccccggagacggtgccggccgcgccgcacgcgtgaccgcaagcgccgccccatcgcaggcctcgttcgaggcgctgatcgcgcggatatcggcgctgcatcccaagcgcatcgatctcagcctcgatcgcatgcgcggcctgatggagcggctcgatcatcccgagcgcaagctgccgccggtgatccatgtcgccggcaccaacggcaagggctcgacggtcgcatatctgcgcgcgatcctcgaagcatcgggcctgcgggtgcacgtcttcacctcgccctatctggtgcggctcaacgaatgctaccggctcggcgccgtcggcggcggcaagctggtcggcgacgatgagctgcacgcgacgttcgagcattgcgagcgtgccaatgccggcaatcccatcaccatcttcgagatggaaacggcggtcgcgttctgcctgttcgcgaagcatccggccgacgttgcgttgctcgaggtcggcctcggcggccggctggattcgaccaatgtggtcgagatgccgctggcttcggtgatcacgccggtcagcatggaccatatggaattcctcggcgacacgctggccctgatcgccagcgagaaggccgcgatcatcaagcgcaaggtgccggtagtgtgcgccgagcaggcgcccgatgcgatggcggtgatcgaggcggaggcgcaccgcatgcgggcgccgctgcacgccgccggccagcaatggcatgtcggcgtcgagcgtggccgcctggtctatcaggacgagcgcggcctgatggatctcgctgcgccaaaactgttcggtcgccaccagttcgacaatgccggccttgcgatcgcgacgttgcgcgcgatcgacgcgttcaagctcaacctcgccgccttcgagaccggcatcgtcagtgcggaatggccggcgcggatgcagcggctggtctccggcacgctcgtttgccagggaccgcagggctccgaggtctggctcgatggcggccacaatgccgagggaggccgggttgcggccgccgcgctcggcgatctcgaggagcgcgtgtcgcggccgctggtcgtgatcgcaggcatgatggccaacaaggatgccagcgcattcctcgccaatttcgccggattgacgcgccacatcatcgcggtcccggtgcccggccgcgacaacggcatggcgccggacaagcttgccgacgccgcgcgtgcgctcggcatgcgcgtcgagatcgcgaccggcgtcgacgccgcgctgcgacggctcgctacgctggcctatgaggtgccgccgcgcatcctgatcaccggctcgctgtacctcgccggcccggtgcttgcggccaacggcacgcctcctgcataacaggcctcgcgtccctgctgcggtacgcatgagggaggacgagacacatgcgttttgctgcgatcgccgacatccacggcaatcatctcgcgctcgaagccgtactgtcggacatccgcgcccaagggatttccgacatcgtcgatctcggcgacatggtcagcggaccgctcgacgcgcagccgaccatcgatatgctgatggcgctcgatgcggtccatctgctcggcaatcacgaccgctatctgatcgaccgcccgcatgagaaaatgggcgcatgggagcggctggtccatacccagctcgagcagcggcatttcgactggctgcgcacgctgccggccaatgcggtctatcgcgacgcggtgttcctctgtcacgcaacgccgcaggatgacgagacctattggctcgacacggtgctgccgggcggcgaggtgtgcatctcttcgcccggatcaatcgaggcgagggccgcaggcattgcgcagtcgctgatcctttgcgcccatacgcataccgcgcgcgccgtgcggcttcgcgacgggaggctgatcgtgaatcccggcagcgtcggctcgcccggctatcgcgacgtccatccgtatccgcatgtggtcgaagccggctcacccgacgcgcgctacgcgatcctcgaaagggttggtggcgactgggatgtcaccttccgccacatcccctacgaccacgaagcgatggcggcgctggcgcggcgcaatggcgaggccgagctcgcctcggcgctcgcgaccggatggatcaggtaaaacaaaacggccggctttcgccggccgtgtcgcaaatcagctaattcaaagcggatcagaccgcagcggtgatccactgctgcagcttggccttcggcgcggcgccgacctgacgcgacgccatctcgccgcccttgaagatcatcagggtggggatcgacatcacgccatacttcgacgcggtcttcgggctctcgtcgacgttgagcttgacgatcttgaccttgtcgcccatcgcgccggaaatctcatcgagagcgggcgcgatcatgcggcaggggccgcaccattcggcccagaagtcgacgaccaccggcccggtcgccttgagcacttcggcttcgaaatcggcgtcagaaaccttgccaacggccatgtgagtacctcgttcagttgagacaaaagggcgcggtggagaatcgcgcccgggagcatgcggcaaacgtatgaacgcccccttgccgggtcaagctcgctcacgccgacatgaacttatgccagcccggcgtccagcgcggaggcggaaatctccatcatttcaggggtttcggtccagagcagggcggcgtggatgatcctttggggataaagtttcgccagcaccgcgcggtacagcgcgagctgccggatataacccttgggggcgtcggcggcggtccttggcggggcgttgttggtcttgaaatcgacgatcaggacctcgttcggcgtcaccaccagccggtcgatctggccggagaccagcgccttcggcaggcccggccgctccagccggccgacgatcgacacttcggcacggctgccgggggcaaataccggcgcgaagcgcaggtcgacggtcagggcgaccacctgccgggccagcgccgcgcgttcgtcttcgctccagccatcggcgttgcgcgcaagataaccgagcgccgcgccgagccgccgttccagcgcgatttcgggcagcgattgcagcaggcgatgcaccagcgtgccgcgttgcagggcgcgggcgcgcagctgcaccgattcgccggatcgtatcggatggctgtcgccgtcggacggatcggacgggcgcagcacgcccgcggctgaggcttcgggtgcggccgcttcacgaagccaggacggcagcgcgaccggggccgcttccgttggcgcggccgggcccgagagatccgcgatgtcatccggccgtgaatagcgcatcaccttgccggccggcgtctcctcttcctcgagcttgagcccggcattggcgagccccctggtgatcagatcgtaccaggaggatttccgcaccgtgctcatgttgccgggcatgcagccgccgacgatcagccggtcggcggcacgggtcatcgcgacatagagcaggcggcgatattcgtcctcggtgtcgccgagcatcgccttgcgcgcatcggcgacggcgggcggatcctcggccttcttgccggcccacaccacgacgccgggcgcgttcggcgcggcattgccctgcggcagatggatcagccgcagccgctgggtgtccgacggcgaggtcgtggtgtcgaccaggaacaccaccgatgcctcgaggcccttggcgccgtgcacggtcatcacgcgcacctcgtcgcgcgagatctccatgtcgcgcttcacctcggtgtcggcggcgcgcagccaggcgacgaagccctgcagcgaggccggcgccttgcgctcatagcccagcgccagttcgaggaattcgtcgagcgcgtcattggcctcgtggccgagccggcgcagcatgcgcgcccgcccgccgtcgccgccgagcagccaggcgtagaacgcgaacggcgtctcctgggtgaagcggcgctcgcactcttccaggcgctgcagcgccgccgaaaaacgctcgtcggtcggcgcctgcgcggtcagtgcttcgcgcagcgagccgcggcgctgataagcgagcttgaacagatcgtcgtcgtcgagcccgaacagcgggctcttcagcgccaccgcgagcgcgaggtcgtcctgcggcagcagcagcgcgtcggcaaggttcatcaggtcgatgatcgcgatgtgctcggtcagcttcagccggtcggcgccggcgaccggaatgcccgcgtgcttcagcgcctggatcaccgcgtcgaaggcgttgccgcgccgccgcaccaggatcagcatgtcgccgtaacgcaatggccgtcgtccaccggcgctcccggtcatggtgccgctggtgaccaagcgcttgatctcggcctggatgcgccgtgccagcttcacctcggggctggtcaccgcgacgccgtcgaacggcgcgcgccagccctcgatgtcctggcggtcgtcggcaaccgcgagatcccacagctcgatcaggctggggccggcgtcagtcatcgcattgtggatcggataaccgttctcgaccgcatggatgctgcggaagatctcttgctcgcggaacacatggtcgaccgaatgcaggatcaccggtcccgagcggaacgaataggtgaacgacaccggatcgaatttcagcccggcctcctcgaaccgccgcctcagctcgcggcggcgcagatcgaactcacggggcgccgcgccctggaacgagaagatcgactgcttctcgtcaccaaccgcgaacaccgtgcgcaccaggccgtcgcgcgcgccggcgccggaggtgaattccgagatgatgtgggcgacgatgtcccactgccgcgggctggtgtcctgcgcctcgtcgatcagcacgtgatcgacgccgcggtcgagcttgtagtgcacccagccggaggagacccggtcgagcatcgcaagcgtcttgtcgatcagatcgtcatagtcgagcaggccgcgttccagcttctcgcgccggtagtgcgcagccgctgccgtggcgatgtggatcagcgcctcggtgcggtcgcgcgccaccacggcgcgtcggcgttcgatcagcggaccgagccggtcgatctctgcatcgaacctgttgcctgcgaccggattcttcttgatgaaactgttggtgatgacggaggcgcgcggcgcgcggtcatcggtcaggaacacgccgagatattcgtccacttgagctgcaccggtgaaggtcagcgccgcccgcagccgctcggcctgcttctgatccgccttgctgctggtgtcgagcagcgttgccatctccttccagctcgaccgcggcaggttcggcccgtcgacgatctcgcgttcgacatcctcgatgcgatcatcagcggagacgccgagcgcggccgacatctgcgcggcggcggcggtggcgttgccggcggcatcggtccaggccatgaaatggtcgcggctgaggcaggcctctcggaccacctccttgaaggtgacgtcggcggcattcgccatcgcggtccgcagcgcgcggccgatcggactgtcgggaatccgcgacgcctccaggaacaccgctagattggcgcgttccatcatctcgttctggtcgcggtcgtcgagcacggcgaagcgcgccggcacgttggcctcgaacgggaactgttgcagcagacgggtgcacaacgcgtggatggtctgcaccttcagaccgccgggcgtctccagcgcgcaggcaaacagttttcgcgcctcgcgccgcagcgaagcggatggatgcgcgatgccggcctcgcggatcgcggcatcgagcccggcgtcatcgagcgtcacccaatggccgagcgtcgtgaacacgcgctccgccatgttggccgcggcggccttggtgaaggtgatgcagaggatcttctccgggggcacgcctgacagcaaaaggcggatcacgcgctgcaccagcacatgggtcttgcccgagccggcattggccgacacgaaggtcgatgccttcggatcggacgcgcgtgcctgcgcatcgcgcacggccggcgggatcggacgtggggccttcaccattcctcgatccccaatccgcctgcagcggaccattccttgatccgcgcaaggtcgtcataggcgccgtagcggttcgcccacatcgagaggttcagcgaggtgtagggctgctgctcgtcgtcgaaggcgcggatcagcgcttcgagcttgcgccgcgcagtgtcggcggcttcgtcgggcggctgcggcgtgtcgctggtcttgatcttcaattccagcgaacgctgctcgcccggcggattgttgccgctcagcctgacatagacgaggtcgccgaccgaggcgtccgccggaatcccggcgaagccgccctcgcgcaggatcgcggcctccagcgtcagctgcggcgacaggcccatgcgcacctgcttgccggtcggcggctggccggtcttgtagtcgaggatcgcaaagctgccgtcgtcgcgccgctcgatgcgatcggcgcgcgcggagagcacgaatgtcctggcgtcgtcgagcggaatgccgatctcgccgcggatctcggccttgatggcgtcgatgctgccgcgccgcgcctgttcccattcggcaaaccacgccgcgatgcgctggaagcgcggccaccacagcgcgcgcgcttcgggccgttccatcagcggcttgaaatgcttggctccgatatcgcgcagcgcgctcttgatgtcgtcgggcagcgcgtcggcataggtttgcgtgaactcgccgagcgattcgtggattgccgagccgcgatcggccgccgacagcggcatgtcgaccgggtcgagcggatcgagcctgaggatgtagcgcgcgtagatcgtgtagggatcgcgcaaccagtcctcgatcgcggtgaccgacatcttcagcggccgcgcctcgcgcggcggccgcggctccggctgcggcatcggctcgaccttgtcgggctggtcgagctcggcggcatatttcacataagtctcgccggccgatgtagcggccttccagcgcgcttcgcccgcgactgcttcgagccggtgcaggaagcgcgaggcgaccgccggcgcgccgccgaccttggcggcatgggtgaggatcacctcgtcatggccgagcagctgcgcgaagtcgtgtgcggacaggccgatgcgtcgctcgggaagatcgagcccgagctcgtgccgcatcggccggctcagccacggatcgatccgcggcgccggcggccagacaccctcgaccaggccgccgaggatcacgcgatcggattcggtcagacgcgcctcgagctggccgaagatgttgagctgcgcgcgcgccgattccggccgccgcaccatgcggtcggcgaacgcggtctggaacacctcgggataatccgacagcggcgtcatcagcccgctcggctgctgcctggcgagcagctcgtcgaaggcagacgccagcgacgcaccggcgcgttcctcgaacacgatggcgacgtcgttctgatcggccgacagcgcgatcagcgcctcgcggtggcgcgccgccagctcggcaaaatcatacggctttgacgcggccatgccttccagcggcgccagcgccgcctgcaatcgggttatcaggccctcggcctgattgagctcgttgtcgcgcagccgggcgcgcggctccatggcatgcagcgacgaggtctcgccgccgtgcagcttgaccagctcggcgcggaagcgggcgaagtcgcgcgcaagcccgccggtccctggttgcggccgcgtgccgcgcagcagcgcgatctccagcacctcgatcgcgcgcttcagcgcgccatgcgagccgccgagccggaacagcggatgcttgagcagcgcgagcagcgtcggcggctccagccccttggcggcggcctccgcggtgaggcgggcgaacacgccggccggcgtttccatcagagcgtcgccgccggaatcatcgaactccagcttccagcgggtcagcgaggccatcacgcggcgtgccagcgcgcgatccggcgtcaccagcgcggccgatttgccgagatgccgcgcctcgcgcatcgcgaccgcgattgccagcgcctccatttccggattgggcgcctcgaccacggtgagattggtcatcccggcggaaatccgcgccacgatctcgggccgctccagccggtcatgccattgtgccgtggcggtcgacggacgcatcgtctccgacaccagcacctcgcgcccctgcggtgccggctcggcgaggctctcgacgtcgcggcgcttgatgccgaagcgatcgagcagggcgtgcatcgcgaactgcggatggttcgacgacggcggcagggtgaagcgaccgtcgtcgccgcgctcgccgccgatcgtatcccaggactcttcgtcgagatcggtgtcaagcccgggcagcaccacggcgccgttcggcagcttcgccaccgcgtgcaggaatttcgccgtggccggcatcgagccggtcgaaccggcggcgatcaccgggcccgtgggatgcgcggtcagccgcgccgcttccgcctcgatcaggagatcgcgccgtgccgcgggttcgatccggccgatctccttcagataattcggccaggcgtcgcgcgcgatgcgcaggaagtcgagcgaatgctgccagtatttgtcgagctggtccggcaccaggcggtcgagcgcgcgccagtcgacgccgcgcgtcaccatgtcgtccatcagccgcgccaggtcgccggcgagctgcaaggtcgaggccgggccgccgaccaccagcggcgctgacaccggcgtcttcgcccaggccgcgaccagatgcgccagggtcagccgtcgctccagctcgccgagccggggcggaatctccagcggcgcggcgccgccgacctcgtcgccctggtcggcgaaggcgagctcgtcctcgtcgatctcgccgagcgctatgatgcgcggcagcacagcggcgtcggaatcgagcacgtcgaggaagatttcgcgcgccagccgtccggcgcggcgggtcggcagatacagtgtggcgttggcgagcttggcgggatcgttgcgcgcctcgaatcccgccaccaggcggccgtcgaccagcgccgcgatgacggtgcgcaggaacggcgcggaaacgggaacgctgaaaacgcgcatgggctgccttgttcgaatcaggcgccaatataggaagtggcgacggtcgttagccacccctgccggtcagccatgacagctcaatgtcgcagccggccggcgcagcgatcgacggcatccaggaaccagcgcagcgccggatcgtcagcggcacggctggtatggatcaggtcgatcgcgaaggcgggaatctcgatcggcggcgcgacgacggcgatgtcggcgagatgcgtgaagcgccgggcgacgcgttcggacagcgtggctatgagatcggtgccggccacggcgaacggaacggccaccacatgcgcaagcgtcacggccagccgccgcttcagcccgtggcgcgccagcagcgcatcgatcacgctcggcaggccgtcgccgcccgccgccgagaacagcgcgtgcgggaggccggcatagtcttccaggctcaggcgttccgatcggctcgcgcgcgcgccgtcgcggatgcagacaaagcgttcctcgaacagccggtgccggatacagcgcggcgtctccggcagatggccgccgatcaccgcatcgagttcaccgcgctccagcttggccagcgccacggtcggatcggtgagcggacgcacggcaagatcgatgcctggtgcttccatgcgcaacagacgggtcagttccggcaccaggacgagatcgccgtaatcggtcgcagcgatcgtgatgcgccgccgcgcggtggccggatcaaagccccggtcaggcgccagcgcgccccggatctgccgcagtgcctcgccgatcgggcccgccagtgccagcgccctctcggtcggctgcatgccggccccggcgcgcaggaacaattcgtccgcaaacagcgcgcgcagcctccgcaacgcgctgctcatggacggttgggcgaggccgatgcgttcggccgcgcgggtgacgtggcgctcctccatcagcgcctcgaaggcgaccagcaggttgagatcgacagtggctaaattcatcacagcaataatggacataataataatcgatttcaacaatgatctggctaagcctagggtgtagcgggcatgacgacgaggccggaagatttgggacaatcatttgcgagactgatgccgcgcgggccgaccttgctgatcatcggcgtgctggccgggctggccttcccggccctggcgcagggcgtgcgcccgctgatgacggtcgcgatcttcgtgctggtgctcggcaccttcctccaggtcgatggcgcggcgttccgccgtgcgttgctgcgtccacgggtctggctgctgttgccggcgctcgcgatggtggtgtgtccgctggcggtcggtttcgcggcgcgcggcgccggatttgcgccagagctgatcgtcgcgctgctgctgtcggtctgtgcgccgccgtcgagcggcaccgcggcggtcgcacgcatgctcggcttcgatgccaccgttccgctcgccgtgacgctgctgtcgatggcgctggccccggtcaccgtgccgctgatcgccgcggcatttgccggccttgcgctcgatccgctggcgcttggtgcgcggctggcgctgctggtcggtggtgccggcgcactggcgttgctgctgcgccgtcaggcggcggcacatttggcgcggcattcgggcaccatcgacgccctcgtgctcgcctcgcttttactgttcgcaattgccaccatggccggggtgcgcgcgcagatcgcggcccagccgatcgccgcggcgacttgcgtcgggcttgccttcgcctgcaatcttgccttgcaagggcttggcgcgctgctgacgccgggtccgctggccgagcggttgaccacgggcctcgttctcggcaaccgcaacgtcggactggtgtggtcggcgatgggtgcggcggtgtcgccgatgacggcgctgttcttcgcggcgacccagtttccgatctacatgacgccgcgcctgatcgagatgctggttcggcgcgggcgaaaagaggaagcctcaccatgagcgagatcattctgaccgaacaactcgccgtccgcttcgcgcgcatcgcgctcggccatgtcggccgcgaatatccgaacaagccggatcacgtgttggcagggccgcaggatgcgcgcacgccgcgcgaattgcatccggtgttcttcggcagttacgactggcactcctgcgtccacagctactggatgcttgcccggctgctgcgccgttatccggcctccgatgcggcagatgcgatccgcgctttgttcgacgaacagttcgtcgtggaaaagatcgctgccgagtgcgcctatctcgcagccccgaccgcgcgcggcttcaagcggccctatggatggggctggctgttgaagctcgcggccgaactctggcggctcgaggatacgcggtggcgcgagcaaattgctccactcgccgaaatcttcgcgcagcgctttcgcgatttcctgccgctcgcgacctatccggtgcgggtcggcacccatttcaacaccgcgttcgggctgcgcatggccgccgactacgccgcggcgacgcaggacgatgcgttcagcgcgctgctgcgcgacacggcgctgcgctggtacggcgccgaccaggattgtcctgcctggggcgagccgagcggcgacgattttcaatcgtccgcgctgatcgaagcggaatgcatgcgccggctgctggcgcctcgtgacttcctgccctggttcgaccgcttcctgccgcacctcgcgcagcgcgagccggcaaccctgttccggccggccaaggtgaccgatcgcagcgacggcaagcttgcgcatctcgatggactcaatctcagccgtgcctggtgctggcgtgcgctggccggtgcattgccggagggcgatgcccgtcgcccggttctgatggaagccgcgcgacaccatctcgatgccggcctgccgcatatcgccggcgactatatgggcgaacactggctcgcgagttttgcagtcctcgcgatcgatgcagatggctaacgacaactttgcttaaagcgggatgagtttcggtcgatcggcttggcatggtctcggttcacctctccccatcggggagaggtgagctcgcgacgtcgttctagctcaagctaatctcatcagactctaagcgacgctttccaggaaggcttcttccgcggcctggatcgcgtcgggggtcccgacatgcatccagacgccgtcgaggcggaggccgaacaggcgctcctgctcgttggcgcgatcgaacatccgggtcagcgagaactcgccggccggagcgtcggcgaacagcgccggcgacatgatcgcggcgccggcatagacgaacggcaccacctggttttcccgccgcttgcgcagcgcgccatcgggcagcatcgaatagtcgccgcgtccgctgtagccgatgctcgaggcggtcggcgccatcagcagcaggatatccatccgcgccggatcgaaggtttcggccagccgcgccagattggagcgcacgccgtcgatccacatcgtgtcggcattgagatggaagaacggcgcatcgccgagcagcggcagcgccttgacgaccgcgccgccggtgccgagcacctggtcgcgctcgtcggagatgatcacgtgcgggcggctacgggtcttgacgtgctcgatgatctggtcgggcaggtaatgcacgttgacgaccgcttcgctgacgccggcgccggcgagcttgtcgagcacatggtcgagcagcggctggccggcgacgctgaccagcggcttcggcatcgtgagggtcaaggggcgcatgcgcacgccgaggcccgcagctagcaccatagccttgtggggagtgacaggcattttccggatattctcggtcatcatctctcggcgccgatcctatcacggcgattcggcaagcacatcaaccagacgccatagtcataggacatgacggccgtaagacggcattaacgacgagcctttgttggagcatgatcttgccggaaagccgtctccaattttccggatcatgctctagacgtcggcttgcgcaccgcgtctggcagttttcttcttcttgtcgccttgtttgaggaagttgactccaatctggtcgccgttgacccaggccagttcgcagcggcgataggccaatcctgtggacgacagcagcagaaaaaactccttcagggcgaggccctcgaccgaaccctcgacggtcagcttggcgcccgtctcggatacgtcttccatggtgcagtcgcgccgccaggtgccgtcaatgcccatcatgtgcgcggctatgccgcgctcaaacgtgacacgatcgcccctgcgacgttccgtccccatcgtgtggtcccgctcccgatccggccacgccatgaggtgcggcctcgacaatcttaggggacccaaggctaacaagccgtaaactaaggtactgggggagggacgttggcggtgtaccagatgcggaaggtcgtcagcgccggatgggcgagcgagcgctccagataggtccagatccgcggctgatgcttgagatactgcggtttgccgtcgcggcggttgagccgcgcgaaggtgccgagcaggcgggtgttgcgctgcgccgacatgatcgcatagagctcggcgaaaccggccggatcgaagctctcgtcggtggcgcgccgtgccttgatgtagcgggtcaacagcgacagttcgagctgctcgggcacgtcgatccgcgcatcctgcagcagcgacaccacgtcataggccgcggggccgagcagcgcgtcctggaagtcgatgatgccgacgcgcaggatgccggtgcgctcggccagccagatgatgttcggcgaatggaagtcgcggatcacccaggtccgcggcgccgcggcgggcttttccagcaggccacgccacatcccgaggaaatcggtgcgcagctcctcgctcggctgcacgccgcggtcgggcagataccattccagcatcagcccgatctcgatcagccaggcgtcgatgtcgaacaccgggatgtcgtagctctcgtccggtgtcaccggcagctgccgcggcagcgcctcgcggtgcaacgcggccagcatgtcgacggcggcctcgtagcgctcggcgatcgggcgcggcggatcgccctcgatcacgccttcgccgccgagatcctcggtgatcagaaagccggattccagatcggcgtgccggatcgcaggcgcggagaagccgtgcttgcgcaggccgttgccgatcgcaacgaacggccggacgtcttcggcgagatgcaccgctgcactgtagggccggccgttgtagatcgccgggccgtcggggcggcgcggcgagttcatcaggatgacgctgccgtcgtcgttgcgcagccgcgcgtaggagcgcgtcgaggcgtcgcccggcatgcgctcgcgccgcgcgctgaggaagcctgcgcgctcgaggaatcggcgcagctcattgagccgcgcgaccttggccgcggccttgccgtagccggtgatctcggcggcgcgcgcggccgatccgagcgccgggcggtggctgagtgcgatgtcgatgcgatcagcgggcatcgcgtccggcgcgcgctccggccactcgatcagcaccacgatgtcgtcgggcagcggcgccagcccgatctcctcgagctcgctcgcatcattgatgcggtagagatcggcatgaaccagtgggaacgacggcagctcgtagctctgcgccagcgtgaaggtcgggctcggcacttccagcgtatcgtcggcggcgaggtagcggatcagggcgcgggcggccgcggtcttgccggcgccgaggtcgcccgacagcgtgatgacgtcgccggcgccgatcaggagcgcgaggtccgccatcaactcggccgtcgcggtttcgttcgcgagcgccaccgagaatgtcgaggtcgccgtcattccgcggcgttgcgatgtgcggtctggtcgatcgggaagtcgcaggtcacggtcgtgccgcggccgacggtcgaatcgacgcggaccctgccgccatgcagctcgacgaaggagcggaccagcgacaggccgagcccggcgccacgatgccgcgagccgtgcgaatggctctcgaaccagttgaacaccttgtcgcgcatctcggctggaatgccgggaccggcgtcggtcaccgcgaacactacgctgtgcgcggtgcggtgcgcgctgatggtgacggtggcgtcatgcggcgagaagccgacggcgttggcgagcagattgtacagcacctgcaccacgcgccgctcgtcgccgacgaaggcgccgatgttgggctcgatatcgaccttcagcgtgatgcggtcggtggcgaggcgatcctggatgccttcggcggcggcctcgatcgcctggccgatattgaccgggccgagctcgagcttcatcgcgccggcgtcgatggtggcgagatcgaggatgttgttggtcagcgccagtagcgcgttggtcgatttggtgacgtagtcgagatactcggcctgcttcggcgtcagcggtccggtcgagggatcgctgaggaaatgcgcgaagccgatgatcgtggtgagcggcgcgcgcagctcgtaggagacgtggtggacgaaatccaccttcatctggtcggcggtttccagcgcctcgttgcgttcgcgcagcgcccgctcgacattctcggtgtcggtgatgtcctggaaggcgagcagggtcttgccgtcgggcagcgggatggtcatgcagttcagcacgctgccatccttgcgctcgagcttcagcgcgacctgggcgcggttctcgatcgcggtgatctgctcgcgcagcgtccgccaggtcagggcgtcgtcgaacagcggccggcacagcgcttccacctgctcgatatgcggttcgccctgcagcgcatcggccggcagcttccacatcttggcgaacggcggattgaacaattcggcgcggccgttgctgccgaacaccgcgaccgcttcgccgagattgtcgagggtctcgcgctgcaccctcgtcaggcggtcgtagcggcgcgcgaggtcgaggctctcggtgacgttgtcgaacaggtaggtgacgccgccttcgaggttcggcgtggtgacgacgctgatggcgcggccgtcgggcaggaaccaggtgtaggtctcggattcgaccgcgcgataggcctcgtgcagcttggccttccaggcccggaagtccggctgctcgggcagcttgcggttggcgcgcaggcgatcgaggacactggaatcgtcggggttgctgtcgaggaaggcctggtcgaggccccacagccgccgataggattcgttgtagaaagtgagccgccggtcggcatcgaacaccgcgacgccggaggacaattggtcgagggtgcggcggtgcgcttcgaccatccgcgcgatcgccgcgcgcaacgccgccgcctcgctggcgtcgatcgcgatcccggcgctgccgccggagagcttcagcgcctggacgtcgtagatccgccgctcgccgctgaccacgatcggcagccgcgcggcatagctcgcattgtcattgagcgcgcgcgtcagttcgctgcgctggtcgctttcgagcagctcgagattgcgctgcaacgcgtccgacacgctcttgccctcggtcgcgcggacataggcggcgttggcatagcgcagattgccctcgaggctcttggcccagatcggccacggcgcggcggcggcgaaatcgcgcagcagctcggtctcctcctgcagcgtcttgtagcgcaggttggattcggcaagctcgcggcgcaggccgccgagctcgcggatccgcacgatggcctggccgccgatcgcgcggcccatcgcctcgatggcgcggccggccgaggtcgagaggttgagcaggaacgcctcgcccttgtcgcgcaacgcgtcgaccgcgtggtccatctgcagcgccggctccggcggcagccaggttccgaaggcgaggatgcgttgcggcgagccctcctgcgacatcaccagcgagatatcgcccgagatctgcggccggttgtcgccggcggcccaggagatcaggacctgcggctcgacgaacagcaatgcgcgcagccggtcggattgcgcctgcaggtccgtgatctcggattgcagctgctgctcgttgcgggtcgcgcgcaggcgggtgcgcatcaacaggatcgcggcgacgacggagaagccgaccagcgcgaacgaggtcgcgagaaccgcaacctcctgatggttgaaaccgaaatgctccgacatcgcctgggccaccaggccctcggcggcgaacgagctgcgggccggcagcaatgccgacatggcgagcccaagcatgccgtcgcgcgccagtgaggtgcatgacagcagggttcgacgcattgccgcgactacgcccgacatatgttgccccagaacgcacaaaccttaaggcatgatccggaaacgaggagaccggtgttcccctacggcaaacgtttcgcgtttgtccggggatcatgcccaagcaagatcagacagcccgacgaagaccccccgtcgtgctcgaatcaaagcagaataatcccaacgggactcggcgagtaagagtccagaccgtgaacgcagaatccgctgtgaaaaaatgcggccggctggtgtggatttttacgcgaattgactccgtaatcgtgcggggagcgcgcgcgaagcgtgatctccgcacagttcgcgtgcttaacggccggtcgagccgaagccgccgctgccgcgctcggtcgacgacagcacgtcgaccggaaccagctcggccctcgtcaccggcgcgatcaccatctgcgcgatgcgctcgccgcgccggatcgaaaacacctgctcgccgtgattgatcagcagcacgttgatctcgccacgataatcggcgtcgaccgtgccgggcgaattcagcaccgtgacgccgtatttggcggcaaggccggagcgcggccggatttgcgcctcatagcccgggggcagcgcgatcgtcagcccggtcggaaccatctcgtagcggcccggcagcagcagcagcggcgccgaccgcggcaccgcggccaggaggtcgagcccggctgcgccgtcggtctgatagatcggcagcaggaggtccgcgccgtgcggcaattggtggacttcgaccttgatggtggcgctcacgatccggttcctacttctcttgcgatccgcgacaccagcgcggtcgcgacttcttccttggtcatcaccggccaggagtcgacggtgacctccttgccctcgcgcgacagcaggtggacggtgttgcggtcgccgcccatcacaccggtcgccggcgagacgtcgttggcgacgatccagtcgcagcccttgcgcgcgaatttggccttggcgttctcgatcaggtgctcggtctcggcggcaaagccgatcaccagcggcggccgcttctccttcagcttcgcaatcgtcgcgaggatgtcggggttctcgaccagctgcagcggcggcatgccggccgcggtcttcttcagcttctggctgccttcgctggcgacccgccagtcggcgaccgcggcggcgaagatcgcgacgtcgaccggcagcgcggcctcgacccggtgcagcatgtcgcgcgcggattccacgcgcatcacggcgataccctgcgggtcgtcgagctcgaccggaccggtcaccagcacgacctcggcgcccgcggcacgcgccgcggcggcgatcgcaaagccctgcttgccggacgaacggttggcgatgtagcggaccgggtcgatcgcctcatgggtcggcccggcggtgatcagtacgcgcttgccggcgagcgggcgcggctgcggcgggcgcagcatgcggtcggcggcggcggcgatctcgacaggctcggccatccgcccgaccccggcctcgccggcctccgccatctcgccggcattggggccgatcgtatgaacgccgtcgcggcggagctgcagcacgttgcggcgggtggcggggttgttccacatcagcgggttcatcgccggcgccagcaggatcggccggttggccgccagcagggtcgcggtggcgagatcgtcggcgtggccctgcgccatcttggccatcaaatcggcggtggccggcgccaccacgatcaggtcgcagtcgcgcgccagccggatatggccggcgtcgaactcgctctcggcgtcgaacaggtcggtgtagacgcgctcatgcgacagcgcgctggcggccagcggggtcacgaactgctgggccgccttggtcagcacgcagcggacctggatgtgccgctccttgagccgccggatcagatccagcgccttgtaggccgcgattccgccgccgatgatcagggtcaccctgggctcgccggccacgctggcggcccgtggtgcctgagctgcaggcgtctgggaaccggcactgggcgccccggcgggctccgcaccgccttctgcgagttcccggaggatcacccggacctcctcctcgaccgagcgcccgttcttggcggagcgcagccgcagataggccttcagcgtgtcgtcgagtttacggatggtcaggctggccatggcgtgccccgggcatcatgctcaagcaatgatagcgatgctatcacacgatgcatgcattgcaatcaatgcgcgcggatggcgaagaagattccgatcagcgctgcggcaatgacccagaggccgacggtctggatgcgtgccttcttggcctcggcgcgggccatttcgtcgatcgagtccgatgacagcatgtggccctcccgggtcatggtctcgagctgctccagcaccgtcacggcgcggctggcgatcgacggcaaattggcgagcacgcggccgagctcgcccgcgcccgagagcgcgccctggatccggccggccgggccgagattgtgcgtgatccattcgcgcaccacggggtcggcgatcttccagatgtcgagcttggggtcgaagccgcgcgccacaccctcgaccaccaccatggtcttctgcagcaggatcagttcgggccgcgtctgcatgtcgaacaggccggtgacctcgagcagaagcgaaagcagcttcgccatcgagatttcctcggcggtgcggttgtggatcggctcgccgatggcgcggatcgcttgcgcgaaattctccaccgaatggtggcccggcacatagccggcctcgaaatgcacctcggcgacgcggcgatagtcgcgggtgatgaagccgagcaggatctcggccaggaagcgccgctccttcagcccgagccgtcccatgatgccgaaatccaccgcaacgaggcggccggcgtcgtcgaggaacagattgcccggatgcatgtcggcatggaagaagccgtcgcgcagcgcgtggcgcaggaagctctggatcaccttgcggccgagatcgggcaggtcgacctgggcctgcgccaggcgggcgtgatcgttcagcgcgatgccgtcgatccattccatcgtcagcacgctgtgcgcggtgcgatcccaatccaccgtgggcacgcggaaatccggatcgtcgcgcgtgttctcggccatctcggacagcgcggccgcctctaaccgcaggtccatttccatcgcgaccgagcgcgacatcgtgttgatgacttcgatcagccttaagcgccgcgcttcggcggaatgcgcctcggccttgtgtgcgacgaagaagaagtcgctgaggtcgcggcggaagcgcgcggcgacgttgggccggagcaccttgaccgctacctgctgccgcctgccgtcgcgctcgacctcggcgcgatgcacctgcgcgatcgaggccgcggcaaccgcgggaccgaggtgcacgaaggcttgcgccagcggccgttccagcgattgcgcgatgacggcttcggcttcctgctgtgcgaacggcggcagccggtcctgcaggctttcgagatcgcgcgccatcgcgacgccgaccacgtcgggacgggtcgcgaggaattgcccgagcttgagataggcgggcccgagccgggtcagcgcgcgcgacagccgcgggcctgacttggccgagcggcgctcgatcagtcgcgccattttcagcgcgagctgtcccggcggcggcaccagcacgggatcgacgacgccgaacacgccttcgcgcgcaaatacgaaaccggcgcgggcgaggcgcgcgatgtgggtcagtgcagagatcacaaacgccagcccgaatgcagcgccacgatgccgccggagaggctctgccatttcacgcgggcaaagccggcggcgctgatcatctcggcgaaggcgttcggccgcgggaatttgcggatcgactcgacgagatattgataggactcggcatcgccggtgacggcgcggccgagcggcgggatcaccttgaaggaaaacaggtcgtagatcttgtcgagaccgggcacgtcgacggtggagaattccaggcacaggaagcggctgcccggcttgagcacccgataggcctcgcgcagcgccagctcgatctgcggcacgttgcggatgccgaacgcgatggtgtaggcgtcgaacgaacggtcggcgaaagccaatgtctcggcattgccctcgacgaacgacacgcggtcgtcgaggtgctgcctggcggcgcgctcgcggccgaccgcgagcatctcggtgttgatgtcgcagacggtggcatggaagccggtgcccgcggccttggcggcccggaacgagatgtcgccggtaccgccggcgacgtcgagcagcgcgaacggccggtcgcccttcggcggatcgagcgtcgtgatcatgacgtccttccaggcccggtgcaggccgcccgacatcagatcgttcatcaggtcatagcgcgacgcgacgctgtgaaacacctcgttcaccagcgtctgtttctcgcccaggggcacgtccctgaagccgaaatgggtggtctgctccggccgatccatcactcagaactcttaccttttcggtcgcgttttcttcacgcgaaccggtgcccgcttcgctcgaaatcgctccagccaaaccatagcgcggcggccgcaatggcgctatcacgtcagtcccaaaaggtgaatgcctgccatgccggaattacccgaagtcgagaccgtccgccgcggcctgcaaccggccatggaaggctccaaaatcctcaaggccgaggcccgccgcaaggatctgcggtttccgtttcaaaaagactttatcgcccggctcgagggccagaccatcaccgggctcggccgccgcgccaaatatctgatggcggacctcaactccggcgacgtgctgctgatgcatctgggcatgtcgggctcattccgcgtgctgaagcaggaaggcgcggcgacgccggggcaattccatcatccgcgcagcgacgaccgtgcgcatgatcatgtcgtgttccacatgtcctcgggcgcggccgtcgtgttcaatgatcccaggcgcttcggctacatgaagatcatcgcccgcaacgccatcgaggatgaaccgctgctgaaggggctcgggcccgagccgctcggcaacgaattcgacgccgcgatgctggcgcgttcctgccacaacaagaagaccagcctgaaggtcgcgctgctcgatcagcgcgtggtggcgggacttggcaacatctatgtctgcgaggcgctgtttcgctcgcatctgtcgccgcggcgattggccgccacgctcgcgaccaaaaaggccgagcccaccgatcatgccaagcggctggtcgacgcgatccattcggtgctcaaccaggcgatcaaggccggcggctcctcgatcagcgaccatcgcctgaccaacggcgatctcggttatttccagcattcgtttcaggtctacgaccgcgagggcgagacctgccgcacctcgggctgcgagggcatcgtccggcgcttcacccagaacggccgttcgacgttctggtgcccgaagtgccaaaaataacaacaagggagtgcggatgatgaacggcaattggcgcgatcgcgccgcgaccaccttccagtgcgagaagcagccggcgacctccagccgcggcatggtggtgagcaatcacccgctggcatcgagcgccggcgccgagatgctggcggccggcggcaatgcgatcgatgcggcgatcgccactctgttcacgctgaccgtggtcgagccgatgatggtcggcatcatcggcggcggcatggcgcatatccgcctcgccgacggcagccatcgcttcatcgacggccagagcacggtgccgcaggcggtaaagccggatacctacacctcgaagcccggttcggcgcatgacgtgttcgacacggtcggcaacgagaatctgaacgggccgaaggcggtcgcggtgccgggctcgctgaaggcgtggtgcgaaacgctgcgccggttcggcaccatgagtctcgccgacgtgatgcagccggcgatcaagcatgccgcgcgcggctatgcggcgacgccttatctgcacgaatgcatcaccgacggcgccgcggagatgctgaaggacaagccgatctcggcgatctatctgcccaacggcacgccgctgaagcctggcgagcgcgtggtgcaggcggaatatgccgagacgctgaaatacatcgccgatcacggcgacaacgcgctctaccaggggccgctcggcgacatcctggtcgactacatgaagaagaatggcggcttcatcgcgcaggaggatctcgcgacctacaagaccgtcgagcggcagccgatccgctgcgactatcgcggctgggaaatcctcgggccgccgccgccggcagcgtcaggcgtgcatatcacggagatgctcaacatcctcgaaggctacgacatcgcccgcctcggctttggcacgacggagacgatccattatctcgccgaagtgctgaagatcgcttttgccgatcgtgaagccgcgagcggcgatcccgcctatatcaacgtcccggtggagcagctgacctcgaaggcctatgccgaggagcgccgccgcgccatcgatccggaccgcgcacaggcgtggggtgccggcgtcacgcagcttgaaagcgcgcacaccacgcacatgaccgcggcggatgcgtttggcaatgtggtcgcgaccacccagaccatcaacaatctgtttggggccaagatcctgatcccgggcctcggcaccgtgccgaacaattacatgaacctgttcgatccgcggccggggcacgcgctgtcgctcgcggcaggcaagcgcgtcaccacgtcgatgtcgccgatgatggcgctgcgcgacaacaaactggtttacgcgctcggcctgcccggcggaaagcgcatcttcccgagcgcgatgcaggcgctgatcaatctgatcgaccacggcatgagcctgcaggaagcggtcgaggcgccgcgggtctggaccgagggcaatgcgctggaagtcgagcaggcagtgccggaggccgtgcgtacggcgctatcggcgaaaggccacaaggtgcaagtcgtgccgaccgttgccggcggcatgaacgcgatccagttccacgccgacggcaccatgtcgggtgcagcctgctggcgcgccgacggcacgccggtcggcatcgccggtggtcttgcccgcgcaggcgtgcggttcatgctgcggtaacgccgactaggctgtttggcagattgaagcgagcgccatcctcaacgtcgtcccggcgaaggccgggacccattaccccaaacctcaatgttgtgccgcgctggggccgcgatccggtttcatcgccgagtgcggtggctatgggtcctggctttcgccaggacgacgtgtgggaagagccgtggctgaatcaaaggagccttgcaatatccgatcacccgcatgcgcgcgcgatgaattacttcctgacgcagatcacacgcaccacggcggccttggcgtccgccgattcccccgccgcgttgatgccgtgcgccttcaggaaattgcgtaccgtgtcggccggcaccagcgtggcctgcgccggcggcgctgcgtttgccgggccggcaacgatgacaggtttcagcaatgcgatgccggcgaacttgccgccaccgtcctgcgccgcggcgccggagaacccgatcgcaggtgccggcgacagcgtggcatcgccgccgccgagttgcgccaccgcagccttgacgctgctcgccgcggcgccgccgccctggctctgcggatcgacgatgccggtgatgtcgagcgcggtctgcgtcgcctggcccgcgatgttgagcggcttcagcccgcgcgcgccgtagatccgcagcaatgcgagctcgtggtccttgtcttctgcgacccggtcggcattgccgtaacccgggatcgtcagcgcgaggcaatcgccggtcgccacgcgatcggcgacaatggtgccgtcgtcgctgaccacgacgccggtgctgtattccacggtcttgcgcggcggcgggccggcctgcacggtggacggaaacgcgttgaaggcgctcgacatcgcgatcaccaccggttcgaccgtggtctgcgtcgcctggtcatagaggatggtgaggatgcggacctcgtcgcccttcaaggtgccgcgcaaatagaacttcttcagcccctgcatgcccgacagcacgaagaaatccggcttcaccacggtgtagtcgatggtgcggccggccggctccttcttttcctgctcggcaagcttggcggtcgtcggactggcttccttgcgccgggtcagcagcacctggacggtgccggtcggcgaggtccatttggcgccggaggcatcgctggtgagctgcggcaccagttttgtcggaatgccgagccgcgccccggtggcgggctcggtgacgatccgccagccgacgctctcctgcttccgccgcgcggtgtcggcgagcacgccgcgctcctgcgggttcagcacgccggtcggcttgccgccgcggttcttctggaattccttgatcgcattgaccatgcgctcgctgacgtcgccggtaatcgcgccgttatattcgccgacccaggcaaggtcggattgcagcgccagccgctcggcctgcgccatcgcgcccgcggtatcctccggcttctgcaacgcggggcgaaccggcaccgtcgtcacgatcttcggcttggcccccgcggtcgacggcggcgtcatctgggcgtgcgccgcaccgatggttgcgaacatcaacgttgccgaaagcaccgatctcatgacaaatccgggggaaatgactgataccattgacgtcgacgcaattaagcacatctgcttggtcggcaacaaccgcgctccggttcagggaacagcgcgcaggacatcaagatgctgagtgccgacgagctcgaacgctatgcccgccacatcgtgctgcgggaggtgggtggccccggccagaatgcgctgaagcaggcctctgtgctggtgatcggcgccggcggcctcggcgcgccggtgctgatgtatctcgccgccgccggcgtcggccgtctcggcgtgatcgacgacgatgtcgtgtcgctatccaatttgcagcgccagatcatccatacgacgtccgacatcggcaagcgcaaggtcgacagcgcggcggcgcagattcacgcgctcaatccgcacgtgacgttcgaggcgcatccgatgcggctcaccgcctacaatgcgatggcgctgatttcaaactacgatctcgtgctcgaaggctccgataatttcgagacccgctatctcgtcgccgatgcctgcttcctggcgaagcggccgctgataacagcggcgctgggccagttcgacggctcgctgaccacgatccgcgcccacgagaagaatgcggacggcgtattcaatccgacctatcgctgcctgttcccggaggcgccgccgcccggcacggtgccggcctgcgccgaggccggcgtgatgggcgcgctggccgggctcatgggctcgatgatggcgctggaagcgatccgcgagatcgtcggcttcggcgagggcctggtcggccgcctgctgatggtggatgcgcgcgcgatgcggttcgagaccctgcgctacgcgcgcgacccgcagaacccgctcaatggtgatgcgcctggcatcaccgacctgagcgggcatcggtagagttcatcaggacgctgtcgcggacttctcgctgtccatgtgccgcagatgctcctccggatagcgtccgccggcggcggcgccgggcggaaatgcgtcggcgagcgcggcatggatggtggcgatgctctcgctgcggtcggcggggtcgtagaagtccgacacgcccatgcagccgaggccgagctgttcgggatgctctggacaatcaagaatgggttgttcactataccgaacaatgcaggatttcgatcttcgcgacctcgacgccttcgtggcggtggcacgcacccgcaacttccggcgcgccgcgctggagagccgcgtctcggtctcgagcctcagccagcggctgcgcgacatggaggagcggctcggcgtccgcctgatgaaccgcaccacccgcagcgtcgcgctgaccgaggccggcgaactgttgctcgcccgtgtcgcgccggcgatcgccgatgttggcgatgcgatcacggaggtgcgtggcttgcgcgcggagccgtccgggcgcctgcgcatcaacgcgccgccgcctgcggtcgatctcgtgctggcgccgatgatcgcgccgttcctcgccagatatccgaaggtcgaccttgacctcgtggccgagagcgcgttcgtcgacatcgtcgcgcagggcttcgacgcaggcgtgcgctatggcgagcatctggcgcaggatatggtcgcggtcccgctcggcgcgccgcagcgctacgcggtcgtggcgtcgcgtgactatgtggcaaagcatggccggccgatgcatccgaaggatctgctggcgcatgcctgcatccgcacccgcttcagcaacggcgtgatattcgattgggagttcgagaagaacggtcgcgtggtgaagatttcgccgccggccaagctgatcgcgacccatctcggcctcgcgctgcgtgcggtccatgacggcgtcggctattgggcgacattcgagggctatgtccgctacggcgtcaagtccggcgcgctggtcagcgtgctcgacgactggtgcccgccgttcgacggcccgttcctctattatccgagccgccgccagccgcggcccgcgctcgccgccttcgtgtcgttcgtcgccgactggcgtaagcaggcgaggcggaagacgaggaagtcgagctagatccacaccgtcgtcccggcccccgtgcgcaattgcgcactaggccgggacgacactgaatgcgtgattccagcgtgcccggcagtcgccgtgacttcacccgctacctttgccgggcgtgccgagttgcctggccggccgcaccggctgctttgcatggggttgttttcgatattttgctggcagctccatcccggctgcaggttcccctacagcatgctgggcagcacgcggtccggcggcttgtgggcgtcgaggaaggtccggatgttgatgatcaccttttcgcccatctcgacgcggccttcgatggtggccgagcccatgtgcggcagcagggtcaccttgccggccctggcgagccgcaccagcttcgggttcaccgcgggctcgtgctcgtagacgtcgaggccggcgccgccgacatcgccggcttcgatcagcttgatcagcgtgtcctcgtcgatcacctcgccgcgcgcggtgttgacgatataggcctctttgcggatcagcttgagccgccgcgccgagagcagatgataagtcgccggcgtgtgcgggcagttcaccgagatgatgtccatccgcgccagcatctggtcgaggctttcccaataggtcgccccgagctcgtcggcgatcatgggcgccaccgggcggcggttgtgatagtggatctgcaggccgaaggcacgggcgcggcgcgccaccgcctggccgatgcggcccatgccgatgatgccgagcctttttcccccgatgcggtggccgagcatccaggtcggcgaccagccggcccagtgctgcttgccctcggtcaggatcgaggcaccctcgatcatccgtcgcggcaccgcgaggatcagcgccatcgtcatgtcggcggtgtcctcggtcagcaccttcggcgtgttggtcacggtgatgccgcgggcatgcgcggccgcgacgtcgatattgtcgacgccattgccgaaattggcgatcatcttcagcctgcagtcgggctggttgatcacgtcctcgcggatcatgtcggtcacggtcggcaccagcacgtcggcggtccttgccgcttccgcgatctgttccggcgtcatcggcgtgtcgtcgagattcagtctggcgtcgaacagctcgcgcatccgggtctcgatcgagtccggcagcttgcgggtgacgacgacgagtggctttttcttcaccgacatgtcctgctttcatgaggcgcacggctcgccaaaaaccgagccgttgaggcctcattaacccggttgttcgacactgctgatagccgcgcagtcccggcgtttccttcgcgtttcctagggttccccgatacttgccccagctttcgtcgggggaaattcgggtgttctggcgctttggcgttccgtcctctctagcagaaggccgggccaagacaagaacccctcggatcctcgaatgccggaacgaatggcgcagggcctgcgggcgcgggtctggatttgagttgcagctcgccgaatgcgggttgggcatctcggcaggagacgagttgatggtgtggcgtttcggttcattggtggcgctggtcgggagcgtgctgagtgcgtcggtcagccccggacattccgccaaggatttgagcccgaccaccagcggcctgccgatcccgcgctatgtcagcctgaaatccgatcacgtgaacgtccgcgccggcccgaccaaggacaacgacgtcgcctgggtctacacgcgttcggggctgccggtcgaaatcaccgccgagttcgagaactggcgccgggtgcgcgattcggaaggagcggaaggctgggtctatcactcgctgctgtccggccgccgcaccgcggtcgtcacaatgaagaacaaggacgacctggcctcgctgtacgatcgtcccgatgccaccagcgccatcgcggcgcgcctgcaggccggcgtcgtcgcgcaggtcaagaaatgcgccaacaactggtgccgggtcaccggcagcgggttcgacggctggattgagcagcagcgcctgtggggcgtctacgccgatgagaaagtggactgaggcagtcctgaaacgacaatggccgggacgagcccggccatcacgtcttaatccgtaatagatcgggtcagcgcttcttgcgcagccgcaccaccatgtcgacgcgggaaatctcgtagccttccggcacgtcgggcatcttcgacagcacgaggttcgggtcgggaatgtcgaccagctcgtggttatgctcgagatagaagtggtgatgcgtcgacacgttggtgtcgaaataggtcttggtgccgtcgacactgacctggcgcagcaggccggcatcggtcagctggttgagcgtgttgtacacggtcgccagcgacaccggaaccttggccagcgtggcttcctcgtacagcatctcggcggtcaggtggcgcgcgcccttgccgaacagcagccaacccaacgccatgcgctggcgggtcggccgcaggccggccgactgcaacatctcgttgacgtcatgccacggacagccggtcagggcagggtggtgcccgccgccacggacggtcgggtgcacgacatcatcgttcacagccggtacttcctcgttcatatccactctatgcacccaactcaggcaatattcctcataaatataaaaaggatgcctgtcagatgcaagtttttcgcaactagaacaaatccaagcagcggtagaaacctattggatgacggccatttgtcatcggaatgccgctttgccgcccagttagccctatgttagagagcgcgcggaccacatatgcgctttcggcagagataacaggccggtagcgtacccaggtagcgccaagatgcgggacaggttattccggttcccgtgggtagattaaggtccgaccaagcaaaagcgcttcatcgggatatcagaggtggatagaggatgctggatcggcgcggcggttacgaatacgaggatttgctggcttgcgggcggggcgagctgtttggtcccggcaatgcccagttgccgctgccgccgatgctgatgttcgatcgcatcagcgatatctcggagaacggcggcgagttcggcaaggggctggtgcgcgccgagctcgaagtgaagccggatctctggttcttcggctgccatttcaagaacgatccggtgatgccgggctgtctcggcctcgatgccatgtggcaaatggtcggcttttaccttggctggatcggtggcgaaggtcgtggccgcgcgctcggcctcggcgagctgaagttctccggacaggtgctgccgcacgcgcgcaaggttgtgtacaacatcgatatcaagcgcgtgatgcggtcaaagctcgtgctcggaattgccgacgggtggctttccatggacgacgagattatctatcgcgccaaggacttgaaggtcggtttgttcaagcagggcacggcgccgtcttgagcaggatcatcatgcggcaacataaaggcagggcgaggcgaacatgaggcgggttgtcatcacggggatgggtatcgtctcgtccatcggtaacaacacccaggaagtgcttgcgagcctctatgaggcgaagtcgggcatttcacgcgcagagaaggccgccgagcttggcttccggtcgcaagtgcacggtgcgccgacactcaatcccgccgaggtgatcgatcgccgtgcgatgcgattccttgcagaaggtgctgcctggaatcacgtcgcgatggagcaggcgatccgtgattccggcctcgaggagaacgaggtctccaacatccgcaccggcatcatcatgggatccggcggaccgtcgacgcgcacgctggtcgaggccgccgacatcgcgcgcgccaagggcccgaagcgcgttggtccgtttgcggtgccgaagggcatgtcctcgaccgcatcggcgacgctcgcgacctggttcaagatcaagggcgtgaactactcgatctcctcggcctgcgcgacgtcgaaccactgcatcggcaacgcctatgagacgatccagatcggcaagcaggacgtcatcttcgccggcggctgcgaggagctcgactggacgctgtcggtgctgttcgacgccatgggcgcgatgtcctcgaaatacaacgacacgccggccaccgcctcacgtccctacgatatcagccgcgacggcttcgtgatcgccggcggcgccggcgtcgtggtgctggaagagctcgagcacgccaaggcgcgcggcgcgcggatctacggcgaggtcgtcggctacggtgcgacctcggatggatacgacatggtggcgccgtcgggcgagggtgccgagcgctgcatgcgcatggcgatgtcgacggtggacacgccggtcgactacatcaacccgcacgccacctcgacgccggccggcgatccgccggagatcgaggcgatccgcaaggtgttcggcaccggcgacaagtgcccgccgatctcggcgaccaaggcgctgaccggccattcgctcggcgccaccggcgtgcaggaagcgatctactcgctcttgatgctgaacaacggcttcgtctgcgagagcgcgcatatcaccgagctcgatcccgtgttcgccgacatgccgatcgtgcgcaagcggatcgacaacgccaagctcacgaccgtgctgtcgaactcgttcggcttcggcggcaccaatgccacgctggtgttcaggcggcttgacgcctgatttcgcctctcttcgcctgctgagggaggtccgcagccggcgcatggggatattgcaacgatccggaatggggtgggaatgattattgaaccgcgcgtgcgaggcttcatctgcacgacggcgcatcccgtcggctgcgccacgaatgtccgtgagcagatcgcttacgttctgaagcagggcccgatcgcggactgccccaagcgcgtcgccgtgctcggctgctcgaccggctacggcctcgccagccgcatcgtcgcgaccttcgccggcggcgccgatacgatcggcgtgtcgctggagcgcgagccttcggaaaagagaagcgccagcgccggctggtacaacaaccgcgccttcgagatcgaggccgagaagatcggacggtctccgctcacgctggaaggcgatgccttctccgacgagatgaagaaggacttcatcgagcgcgtgcgcgagaagttcgggcagctcgatttgctggtctacagcatggccgcgccggtccgcaccgatcccgacaccggcaagacctatcgctcggtcatcaagccgctcggcgcgccggtcgagatcaagacgctcgacaccgagaccggcgaggtgttccagaccacgctcgagccggcgaacgaagagcagaccgcggcgaccgtcgccgtgatgggcggcgacgactggaagcgctggatcaaccagcttgcggacgccggcgtgctggcgccgggcttccggacgctcaactacacctatatcggcagcgagctgacctggccgatctactggaacggcacgctcggccgcgccaaggtcgacctcgacagcaaggcgcaagcgatccgcggccggctcggcgcggacgccgctcgcgtcgtggcgctgaaggccgtggtgacccaggcgagctcggccattccggtggtgccgctctacggcaccgtgctgttcaaggtcatgaagcagctcgggctgcatgagggctgcatcgagcagatcgatcgcctgttccgcacccggctcggcaaggacgtcgcgctcgacgatgcgcagcgcatccgggtcgacgattgggagctgtcacccgaggtgcagacggaagtgtcgcggcgctggccgctgctcaccaccgagacgctcggcgaattggctgatctcggcgagtacaagagccagttcctgcgcctgttcggcttcggcatcgacggtgtcgactacacccaggacgtcgacccgcgcgtcgtcccgggctaggccgttcggaaaatcacacgagtagccacggacctgtcttttccttcccctgaaagggggaaggtcgggatgggggttagccgcaggcgatgctgcgagcagagagagcagatccccacccgctttgctctggcgagcaaagcgacctcccccttttcgaggggatgttaagagtgaccccgcgattgcgctacgcgagatggcaaattggccatgtcatcgtcgttgccttggtgctcgccaccgtgcgtaaagcctcgcggtgcttcgcggggtcttcaattctagcgcagctatgcgtaatgaacggccttaccggctcataccccgagcgtcccggccttcgccgccgcataacgctcggccacggctttccagttcaccgcattccaccacgccttgagataatccgcccggcgattctggtaggtcaggtaataggcgtgctcccagacgtcgttgccgagcagcgcacgcttgccgtccatgatcggattgtcctggttcggccgggtctcgatcgcgagcttgccgtccgtggtcacggtgacgaacacccagccggagccgaacacgcggccgcctgcggcgttgaaatcggtctgcagtttctcgatgccgccgaggtcgcgatcgatcgcggtcagcacctcgccatcgggcttgccgccgccgggtcccatgatctgccagaacatcgtgtggttggcgtggccgcccatgttgttgcgcacgccggtgcggatcgtctccggcacgctgccgagattggcgagcacgtcggtgatcggcttctccgcgatctgcggattgtccttggcgaaattattgaggttggtgacgtaggcctgatgatgccggtcgtgatggatttccatcgtcctggcgtcgatatgcggctccagcgcattggtgggataggtcagcggatcgatcttgaatggcccggctggggcctgcgccgtggcctgggcgaaaacgaagcgtggcgcggctgcgaccgcggcagccgtggttgccgcaagcacaagatggcggcgggatatgggtgacatcgattcctcctgacctgaagcgctatcgtcgtctacgacagcgcatggcgagatacgtgcaagcaaccttaaggcgtttcaaagacggtcattgtgacgctgcgtcggaatctcgcattgtcccggcagaggccgcgtgcgtcgaagcatcggacaaagcaaaaagggcggcctttcggccgcccttcgtcgtttcgtttcaggcaggcttactcgccggcggcttcgcgcggcgccggagcgtcgctcttctgcttggcctcgaggtcctcgccggtctcctggtcgaccgccttcatcgacaggcgggtcttgccgcgatcgtcgaagccgagcagcttgaccttgaccttgtcgccttccttgacgacgtcggaggtcttctgcacgcggctggcggcgagctggctgatgtggacgaggccgtccttggcgccgaagaaattcacgaacgcgccgaactccatcaccttgacgacggtgccctcgtagatctggccgatctccggatcggaggcgatcgacttgatccacttgatcgcagccttcatcgcctcgccgtcgttggaggcgaccttcacggtgccgtcgtcctcgatgttgaccttggcgccggtcttctcgacgatctcgcggatcaccttgccgccggtgccgatcacttcgcggatcttgtcggtggcgatcttgaaggtctcgatgcgcggagcatattcgccgagctcggcgcgcgccgcggtcagggccttggacatttcacccaggatgtggatgcgcccttccttggcctggccaagcgcaaccttcatgatctcctcggtgatgccctcgatcttgatgtccatctggagcgaggtgatgccctggtcggtgccggcgaccttgaagtccatgtcgccgagatgatcctcgtcgccgaggatgtccgacagcaccgcgaagcgctgaccctcgaggatcaggcccatggcgataccggcggtcggccgcttcagcggcacgccggcgtccatcagcgacagcgaagcgccgcagaccgaagccatcgaggacgagccgttcgactcggtgatctcggagaccacgcggatcgtgtacgggaactcgtgatgcggcggcagcaccgggtggatcgcgcgccaggcgagcttgccgtggccgatctcgcggcgcttggtgccgccgagccgaccggtttcaccgaccgagtagggcgggaagttgtagtgcagcaggaacgtttccttgtacgtccccgacagcgcgtcgatgtactgctcgtcctcgccggtaccgagcgtggtcaccaccatcgcctgggtctcaccgcgggtgaacagcgccgagccgtgagcgcgcggcagcacgccggcttcggcgatgatgttgcgcacggtcttgacgtcgcggccgtcgatgcgcttgccggtgtcgaggatgttccagcgaacgatcttggcttccagttccttgaacaccgcggcaacgcggagcttgtcgtatttcggctcctggccttccgggaagaagtgcgcgagcaccttctccttgacggcgccgaccgcggcatagcgttcctgcttgaccgggatcgcgtaggccttgcgcagctcctgctcggcaaggccgagcatttccttctcgatctccgaattgtcgatcgtggtgacttcgcgcggttccttggcggccttctcggcgagctcgatgatcgcgttgatgacaggctggaagtggcggtggccgaacatgaccgcgccgagcatcacatcttcgttgagctccttggcttccgactcgaccatcagcacggcgtcggcagtgccggcgacgacgaggtcgagctgggtctcggtcatctcgtccagcgtcgggttgaggatgaactcgtcattggcgaagccgacgcgggcggcgccgatcgggcccttgaacggggcgcccgacagcgtcagtgcggcggaggcggcgaccagcgacacgatgtccggatcgttctccatgtcgtgcgagagaacggtgacgatcacctgggtctcgttgcgccagccgtcgacgaacagcggacggatcggacggtcgatcaggcgggagaccagcgtctccttctcggtcggacgaccttcgcgcttgaaatagccgccgggaatgcggcccgcggcgtaggtcttctcctggtagtcgaccgtcagcggcaggaagtcgacgccttcgcgcggcgtcttcgccgcgacgacggtggcaagcaccacggtctcgccgtaggtcgccatcacggcgccgtcggcctggcgggcgatcttgccggtttcaagtttgaggggacgtccaccccagtcgatctcgacggaatgcgaattgaacatttcggtttctttcatggtttcacgaaagcacggcgccctggaacacaaagaccatgccaagacggcgagacactgacgcgctgctgcggtcagcatccggcgatcctgccatggtccctggatttcggatggcgtccatcctttcggtcatttgggcatcttgcccggtccagcggccggattgctgctggacgctagttggcatggcgcgactgccatgctgcgcatgatcatctttcgacaattcgaaagcccgggttcacggacgaccatgcgaaaacgcgcgcgaaccttcgcgcgcgtgcttctcaaatcaacgacggatgttgtgcttttcgagcagcgccttgtagcgcgcctcgtccttgcgcttgatgtagtcgagcagggagcggcgcgtcgacacgagcttcaggaggccgcggcgtgaatggttgtccttcacatggctcttgaagtgctcggtgaggttattgatgcgttccgacaggatcgcgacctgaacctcgggcgagccggtgtcgccggccttgttggcattcgtcttgatgacttccgctttgcgttctgcggtaatcgacatcgtcagttactttcattgttgcgagccggaccggcagtcagtccgttcaggttgaacacgcgcttggggatgagttcgccattgccaatttcggcaagcgcgagaagtcggcctgccaccgtgacatagactgtgccgctggtattgggcgcatcccgtccgcgcaacaaaacggcttggccccggtggagccttgccgcatcagcccgtgtgacggccagtgccgggatgtcgtccagcgcggtctcaacgggcataagcgcgtcggcgaggctgccctcgccagacgcggctctattgcataaagcctccaaatgttccagcggaatcatgtccgcttcggtaaacggaccgaccagggtccgccgcagggcgcagatatggccgaaacagcccagaatccggcccatatcgcgggccagcgctcggacataggttcccttgccgcactcggcctcgaacacggattgtccgttatctccatgttccacaagggctaattcgtgaatctcgaccgggcggggctttagttccacggtctcgccgtcgcgtgccagatcgtaggcccgctcgccctgcaccttgatcgccgaatattgcggcgggatctgctcgatcaccccggtgaagcgcggcagcagctcgcggatcgaatcggcagtcggccggctctcgctggtccggaccggccgcccctcggtgtcgtcggtgtcgcgctcctcgccccagcacaccgtgaagcggtagcgcttgcggccgtccatcacgaacggcaccgtcttggtggcctcgccgagcgcgatcggcaggccgcccgaggcgagcggatcgagggtgccggcatggccggcgcgcttggcctggaacaggcgcttgagcacggcaaccgcctgcgtcgaggtcatgccgatcggcttgtcgagcaccacccagccatggacgtcgcgcttgtcgcggcgcggttgctggttctgccggccctgcttctggcgcgggtcgttgttggtgcggcgcgcatcgtcgctgcgctgcccggcaaaggcatcccgctcagcgtcgcgcgcgtcggcatccttcgcgtcgataacgctgttggtcgtcatcacagtcattcctcgtcgtccgaatcgggtgcaaggtctcgctgcaccgcaggtgtccgcagtagtttctcgatgcgcgccgcctcgtcgaaccgctcgtcgacgcggaagcgaatgtcgggtgcaaatttcaggttgacgcggtgcgcgatctcgccgcgaaggaacttcttgttgcgctcgagcgctgtgatcaccgtgtcggtgtcgcggccgccgagcggcatcacgtagatcgtcgcgagcttcaggtccggcgacatacgcacctcgggaacggtgatgatgtggccttcgagatcgggatcgtggacctcaccctgcgacagaatctcggcaactgcatggcgaacggtttcgccgacgcgcagctgacgttgtgagccgccggggctggaactcttcttttgacggggcatgaccttcttccaaaaccgtcgcgcccgcaggccgtggccgcgggcatcaatgtcctgactttgctttcaatcgggcaatgcgctggtggccggaccagagtccggccacgtcggcgcatttcagttaaatggacccaacgctgagcttcgtaagatttggacttacagagagcgttggatcgtctcgatacggtaacactcgatcacgtcgccgacgcgcatgtcgccgtagttctcgaaggccatgccgcactcctggccggactgcacttccttcacttcatccttgaagcgcttcagcgtcgacaacttgccttcgtgcaccacgacgttgtcgcggatcaggcgaacgttggcgccgcgttccacggtgccgtcggtgacgcggcaacccgcgaccttgccgaccttggaaatgttgaacacttccaggatctgcgcgttgcccagcatggtttcgcgcagcgtgggcgcgagcaggccggacatcgcctttttgatgtcatccacgaggtcgtagatgatgttgtagtagcggatttcgatgccgttgcgcttggcggcggccgcggcttccttgttggctcggaccgagaagccgatgatcgcggcgttgaagccttccgccagcgtgacgtcggactccgagatgccgccgacgccggcatgcaggatgcgggcggcgacttcgtcggtgccgagcttctccagcgagcccaggatcgcttccagcgagccctgcacgtcggccttgacgatcagcgggaactccttgcggcccgcggtcttgagctgcgacatcatctgctcgagcgagccgcgcatgccggagatcgaggcagccgcattctcgcgcttctggtgcgcgcgatagctcgtgacctggcgggcgcgggcttcgttctcgaccacggcgagacgatcgccggcttccggcggaccgttgaagccgagcacctcgaccggcacggacggaccggcctcttcgagattctcgccctggtcggagatcagcgcgcggacgcggcccatctcggcgccggccacgatgatgtcgccgacgcgcagcgtgccgcgctgcaccagcacggtcgcgaccggaccgcggccgcgatcgagcttggcttcgatcacggtgccttccgccggacgctccgaattggtcttgaggtcgaggatttcggcctgcagcgcgatcatctcgagcagcttgtcgagattggtcttgttcttggccgagacctcgacgtcgacgacgtcgccgccgagcgattcgacctgcacctcgtactgcagcaattcggtgcgcacgcgctccggccgcgcatcgggcttgtcgatcttgttgatcgccacgatcatcggcaccttggccgccttggcgtggttgatcgcttcgatcgtctgcggcatcacgccgtcatcggccgcgaccaccagcacgacgatgtcggtgaccttggcgccgcgggcgcgcatcgcggtgaatgcggcgtggccgggcgtgtcgatgaaggtgatcttggtgccggtctccggcgaggtcacctgataggcgccgatatgctgggtaatgccgccggcttcgcccgacaccacgttggcgtggcgcagcgcgtcgagcagcgaggtcttgccgtggtcgacgtgacccatgacggtgacgacaggcgaccgcggctcggtatcggtggaattgtcgacgacgtcgaacaggccttcttccacgtcggacgcggcgacgcgcttgacgctgtggccgagctcttcggcgatcagctgcgcggtgtcggcatcgatcacgtcggtgatcttgtgcatcgcgccctgcttcatcagcatgcggatgacgtcgaccgcgcgctccgacatgcggttcgcgagttcctggatcgtgatcgcttccgggatggtgacttcgcggatcagcttttccttgggttcgttcgacgcatggcccttcaggcgctgggtgcggcggcggaacgaggcgatcgaacgctcgcggacgtcgtcggcgttgagcgcagtggtcagggtgaggcggccgcgctctttctgcgggccgggcttgtgggtggtcttcggagccgcgacggggcgcacggcgccgccggggcggcgcaccatgcgcggaccttcgtcttcgtcgggcccggccgcaaccgccgccggcctcggcgcagaggccggtgtgcgggcggttgtggtggtcgtcgggcgtgctgcgggcgcacgggcggccggagcagatgcagcaggtgctgatgtcgcgggtctggccggtgcagcggcgggcgccgcgccgggcttcgcctcgccttcgccgaagcggcgcttggcctcgacctcggccttgcgcttggcctcttcctcgtggcgatgacgttcttcttccgccttgcggcggacctcggcggcctcgcgctctgccttctccgcagcttcgcggacggcacggcgcttggcctcctcttcagcctggcggcgctcctcgatgtcgcgctggcgggcatcggccagcgcgctggcacgcgcggaacgctcgtcttcagtcagggtcggcagcaccacgccggagcgggtgttgcgctgttgctggccgggaggcgggccggaggggcggccctgcggcggccggggggccggagccaccggctttgcaaccacgggctcgggcgcatgcgcctcgccgggaccatcgccaccgacgcggcgcttgccgcgcttctcgaccacgacctgcttggtccttccgtggctgaagctctggcgcacggtgcccgtctcgacgcgcggcttcagcgacaacgtcttgctcgggacactcaaagtcttgtcgccaggggtcttggtatcaaccattcagcagtcctaatctcgtttcgctgtgcgtttgccgcacaaatccttcaacgtgtcgtcgtttgctgagcatggtccggtcggaaagacggcgtccgccttcctggatcacgctctggaatttctggccgcttcggcggtcttgtcgtcgtcggccatccggtatcggaccagcatctggcagcgcgacaggaacgtcttgctcgctgggcccgcgagcagcgcagcatgtatcacatttgaccgcccaagtgccaaatccaattcttccgacgtcaaaacattgacgacggccattaccggcgattcaccacgtttttcgcccctttgcctgacgatcgcgtccaatttgcggattccgtccgctgcgccgtcggaagcgtggatcagggctgcagtttcgttccggttgagtgcgtcctcgaccttgccgaagcccgcgacgacctgaccggccttggcggccatcgccagggcctcagtgacgctgcgcaccagcagtgcctcggtgtcggtgggaagggtcggcgcgacacggacatcgcgcttgaatcccttgctaaattggtgacggcggaccgcttccgcaacgctgcgccgcgacgcggaaatccataatccgcggccgggcagcttgcgcttcagatccgggatcacctcgcccgtgggcgcgacgacgaaccggatcagctcgtcgatcggacgcacctcgcggctgaccgcgcacatccgcgtggtcgcggacttctgtgtccgcggcccatcgtcgagatcggggtcagcctgagcgagcatccgtaggtcatctccttacgacgccgtttctgcttcggcggcgtcggcctcctcggcaggcttggcgaggtcggcctcggtgatccagccggccttgaggcgggcctgcatgatcaacgactcggcctcgtcgcgcgaaatctcgatgccatcgaggaacccggcatgcttggtcggctcgccgccttccttgcgctcggtccagccgaccagatcgtcggtggcgcagccggcgagatcctcgacggtcttcacgtcgttctcgccgagcttcaccagcatcttgccggtgatgccggggacgtccttcatggcgtcctcgacgccgagttccttgcgcttggcttccagttcggcctcgagctgctccagatattcgcgggcgcgggtctgcagctcggtggcggtctcctcgtcgaaaccttcgataccggccagttccttgacgtcgaccatcgccagttcctcgaccgaggtgaagccttcggaggcgagcagctggccgaccacctcgtcgacattgagcgcttccataaatacgcgggtcgagttctcgaagtcggcctggcggcgctccgactcctcctgctcggtcaggatgtcgatgtcccagccggtcagctgcgaggcgaggcggacgttctggccgcggcggccgatcgccagcgacagctggttgttggtgtcgggaaccacgacctcgatgcgctcgcggtcttcgtcgatcacgaccttggcgacttcggccggcgccagcgcgttgacgacgaaggtcgcgatgtcgggcgaccacggaatgatgtcgatcttctcgccctgcagctcgttcaccacggcctgcacgcgcgagccgcgcatgccgacgcaggcgccgaccgggtcgaccgaggaatcgcgcgagatcacgccgatcttggcgcgcgagccgggatcgcgggcgaccgccttgatctcgacgatgccgtcatagatttccggcacttcctgcgcgaacagcttcgccatgaactgcggatgggtgcgcgacaggaagatctgcggaccgcgggtctcgcggcggacgtcgaagataaaggcgcggacgcggtcgccgttgcggaacacttcgcgcggcagcatctcgtcgcggcgtacgatcgcttcgccacggccgaggtcgacgatcacgctgccatattcgacgcgcttgacgatgccgttgacgatgtcgccgatgcggtccttgaattcctggtactgccggtcgcgctcggcctcgcgcaccttctgcacgatcacctgcttggcggactgcgccgcgatgcggccatattccagcggcggcagcgtgtcggcgatggtgtcaccgacctgggcgcccggattggcgcgctgcgcgtcgaacagcgaaatctggttggaggagttctcgacgacgtccaccaccagcatgtggcgggtcagccgcaattcgcccttcttggcgtcgatctcggcatggacgtcggtctcgctgccgtagcgagcgcgggcggccttggcgatggcgtcttccatcgccgcgatcacgatggagcggtcgatcgacttttcgcgcgcaactgcgtctgcgatctgcagcagttcgagtttgttggcgctgactgccatggcttagtctccttcgaatggatcgatctcgccacggcgcgcgcgctcggcggccaggcggtgctttttggtattggtcggggccggcttcttgtcgggcttgtgaccaggcttttgatcgggcttgggtttcggcttctggctcttcgccggatcgctcttcttggcgtgggccggctgcggcggcgcgaggccgagctcgcggcgcagctcgcgctcggcggccttgccgcggcgcatcgattcctcgatcagctcgtcggtcagcaccaaccgcgcgtctgaaatgtcttccatcaccagcaggacttcagcgtcctcggtcggacgcggatcgtcgcgcttgacgcgtactgcattgccctcgacgccggcgagcaggccgcgaaaccgcttgcggccctggtgcggcaccgccatctcgatcttgacgagatgcccggtgtagcgctcgaagtcggagcggcgcaccagcgggcggtcgatgccgggcgacgagatttccagccggtaggcgcgctcgatcgggtcggcgacatcgagcaccggcgacagcgcgcgcgagatcgcctcgcaatcctcgagctgcatcgagccgtcgggccgttcggccatgatctgcacggtgcagccggcgtcgcccgagaccttgatgcgcaccaggcgatagcccatgccctgcagcaccgggactgcgaccgcggcgacgcgcgccgcgaccccgggctcgacgacgagcctcggctcggcgagcagttcggtgtccacggacgtggcggtcggatcggtcatatccagtgtcaaaggctgtctaggtctacaggtttgtctgaggtctgttgtgttgttcaggtggccttaaggggccgctaacgctacccaaactggatccggcctcgctgggtcccgtcaggtaataaaaaagagcgggtcccggggggcccactctcctacgcgatcgtatgagataccataagttgcgctggatatagcccttttgccggggtccggcaaggcctccggaccgggcggaaggcgattttgcccctccccgggtgcaggttcgacctaaccctccgtttacgaacgggaccatagattgccgaaaatcggcagaagtcgccggttggacaaggctcatgacgacagcgcccgcgctgatcccggaactcgacgacatcgttcgccgtggcgaccccaagcgccgcgccgaggccgcgcggcggctcggcgaattgttcctgcagggcgctgcgagcttccgtcccgaccacatcgacctgttcgacggggtgctgaccagtctggtgccgcacgcagagctggcggcgcggatcgatctcgccgaacggctcgcgccgcttaccaacgcgccgcgccacctggtcgggcaactcgcccgcgaggacgaggtcgcgatcgcggggccggtgctgcgcaaatcgccggtgattgacgacaaggtgctggtcgagatcgccaatgccaagggccagggtcatctgctggcgatggccgaacgatcccggctttcgaccgcgctgaccgatgtcatcgtccgccgcggcgatcgcgatgtgatccgatgtgcggccggcaatgaaggggccgcgttctcggacgcgtcctttacgacgctggtgcggcgcgccggccaggatggcgtgctgacgctgcggatcggccgccgcgacgatcttccgcccgaacatctgaagagcctgctggccggttcgatcgacgtgatccgccggcggctgcaagtcgtcgccaagccggagcggcaggccgagatcaagctggcgatgagcgagatcgagggcgtcgtcgcgcaggtcgagggccgcgacttcgccgccgcgcagcgcacgatcctggcgctgcatcgcgccggcgaattgaacgaggccgcggtggcaggcttcgcaaaggccttcaaatatgaggaatgcgtggccgcgctcgccgcgatgaccgccgtgaagatcgtcacgctcgatcgcctgatcgccggcgaccgctacgacccgatcctgatcgccagcaagacgatcggcttcgaatggccgaccgtgcgcgccctgatcctgatgcggctcgggcccaaccgcgtgccgtcgccggccgatatcgaaggtgcgcgggtgaacttcgtccgcctgatgccatccactgcgcagcgcgtcgtggatttctggaagtcgcgataaatcgttcgcgtcgcaattcattttccgcgcggcgacaaatggattgctgccgtcaaggcgctttccaagcctccatgccgacagctatgctttccgcaaggcgcgacacagcgccaacgggagatcgccatgctgacggacgccgacattcaatcgcacgccgcacggatccgcgacgacggatacaccgtgatcgagcgcgccgcctcgccggagctggtcgagggattgaaggcggcggtcctgcggatcgagcgcgagcacaatctcggccttgcccggacctcgttcgagggcttcaagacgctgcgcatcaacaacctcctggcctatgacgatctgttctgggaggtgccgctgcatgagaacgtgctgccggtggtcgaacgcgtgctggacaaggaatgcctgctgtcgtcgttctgctcgctggtgctcggccccggtgaggtggcgcagccgattcatgaagacacccaattgattccgctcccgcggccgcacatcccgatcacgatcaacgcgatctgggcgctgtccgatttccgcgacgacaacggcgcgacgcggatcgtccctggcagccacaaattcgattcgtcgccggaatatggcaagcactacgacgcggtcaccgcgaccatgccggccggcagcgtgatgctgttcgactctgcgctgtggcatggtggcggtgccaacaccagcgacaccaggcgcttcgcattctcctgcgcctattgctggggctggatgcggcagcaggagaatttgcagctcggcattccgcgcgagaccgcggcgcgcttcccgcgccgcttgcaagagttgtgcggctacagcgtctacaagggccagttcggccacatcgacaatcacgatccgatcgaactgctcggtcgcgagcgcggcaagcgcatggtgtgggaggcgaccgacgtcaggaaggcgcggatggcggggcagggataatctcgtcattccggggcgcgccttttggcgcgagcccggaatccatttctccgtcggcgcatgtggcgcaatggattccgggctcgcgacttcgtcgcgccccggaatgacgattagcccaatcgccgaaacctcagatacgccgccttgcgcccttcgcgctcggccttggcgccgtagcgcgtcatcgtgtagttcggccacggctcgagccagtcgatcgcgcgctcggcgagccaggcgaagtcgggcgagcgcatcaggtgcgcgagcgtccaggcgcagtaatcgtcgatgtcgctgacgaagcggaactcactgccgggcggcagcagccgcgtcatcgcggcgaccgtcgcatcctgcacgaagcgccgcttccagtgccgccgcctcggccagggatcgggatgaatgaggtcaatgcgcgtgagcgagcgcggaggggcccaggccagcagttccgccgcatcgccggcgaacaggcggatgttgccgatattctgtgcctcgatctgggtcaggatcttcgccatcccgttgacatagggctcgcagccgatgaagcccatgttcggaaaggcctgcgcttccgcgatcagatgctcgccgccgccgaagccgatctctagcctgacattctcgatgccgtcatcgaacaattcggtcagcgccgcgggcgcgggcgccgaaatgtcgatcgaaagatgcggcagcagattgtcgatcaggtcggcctggtgcgaacgcagcttgtggcccttgcgccgcccgaagaacgagccgcgcgaatgggccatcgcgccgtcctccgggcaatcgcgatcgttggtgtcgttcggagccggtgtcatcgcagcgtctgatagagccggtagagcaggcgcgcgcggggctcgatcgaggagatgtagagctgctcgtaatgggtgtgtgcgcccttgccgtcgacgccgaggccgtcgagggttgcagtatgcggtgcggtgaaattgccgtcggagccgccgccggtgaacacatcgagcagctcgaagccgagttcggtcgcaagctcccgggcgtgttcgtagagcgctgcgccggcattgctcttctcatagggcggacggtttagttccccggtcaccttcacgctgacgccctcggtgcgcgaggtgatgccgaggatcttcggcaccagctcgtcggcgtcggccatggtcggcacgcgcatgtcgacttcggcataggcctcttcggcgatcacattcggcttggtgccgccgcggaccacgccgacattgacggtgacgccgcgtttgagatcgttcatcgcctccagcgtctggatcacattgccgagttcccggatcgcgctgcggccgtcttcggggcgggtgccggcatgcgcaggcgcgcccttgatggagacgtcgaaccgcgcgacgcccttgcgcccggtgacgatcttgccgccgtcgcgcgccggctcggtcaccagcacgtatttcgccttgcggccctcggcctcgatcagcgcgcgcgaggtcgggctgccgatttcctcgtccgacacgtagagctgggtgatgccgagcggcgggcgcgcgtcatcggcgcagatccgccggaacgcatggtaggcgagataggcgccgcccttcatgtcgtagatgcccgggccgaacgcgacgtcgccgtcgatcttgaatggtaaccgttcgatgaatcccatcggatgaactgtgtcgagatggctcaacaccaggatgcccggggcgtcctgcccccaggacgagcgcgcgacgagatgatcgccgcagccgtcgcgtcccgcaacgcggtcgacggtggccggcaggtcgcgatagcccgcggcgacgagatcagccaatctgttgacctgatccggccgctccgtcggcgattcgatctcgacccagcggcgaatgccgtcgaggatagcagcggtttcgaacgggttgctggacatgctgttgtcgtcgcctgcgaattgctttgtcattcagcgcacgcctcggcgtgcgccggaatgacatattccagatttgatgatctctcaaacggataaggctgaatcagacctgttcggcagcctcgcgcgccgcgatctgctcgaccagttcgacgatgctgcggcggagcttggcgtccgcgatccgcgtgaacgcgcgggtcagggccaggccttcggcggttgccagaaaatcggacacataggccggcgaggagccctcgctgaagccgtcggcggtcttgacgccgctcgggccgccgtcgaacaggaaagagaccggcacctgcaggatctcggagatctgctgcagccggctggcgccgacacggttggtgcccttctcgtatttctgcacctgctggaacgtcaggcctaacgcctcgcccagtttctcctggctcatgccgagcatgatgcgtcgcatacggacgcggctgccgacatatttgtcaacaggattgggcgctttggtggacatctccaactctcctaagggattgcgcgcccgggggtgaggcaagttggacgtggagtatgcctcaggcgccggtgccgtcaaatcctgcaaggaggatcgggacgaaatgcggacaatttgcgcaaaggggctgacttggcttgtgatttcgcgtggacccgtacaatgcgaagtgcacggtcgatctgtcaactggtggaatcgcgctgaggtaaatttcgacgttttttcgggttcgcgacaaccggcgatatgcaggatcaggcttttcgcctgacaaaacgtctccgcaatacgattgcgagggcaaccaacacaatcacggcggccgggatgttcccggcacgcgcatagatcgtcggcgcgatcgccgccggcaggccggcatcgagcacgccttcgacgccgagcccgagttgcgcgacgatccgcccgagcgggtcgatgacggccgagacgcccgtgtttgcggcacgcaccagcggcaggccttcctcgatcgagcgcagccgggcctgttgcagatgctgataggggccggtcgaaatcccgaaccagccgtcattggtgacgttgacgatccagccgggacgctcgtcgcggctcacgacattgcctgggaagatcgcctcgtagcagatcaagggcagcgcgcgcggcgcattcggaatgtcgagcgtgcggcggatcgtgccgggaatgtagccgccctgcaccttggtgagctgcacgaggccgagcttctccatccagtcctggaacggcagatattctccgaatgggacgaggtgcagcttgtcgtagaccgcgagcacgctgccgtcatggtcgatgacatagatcgaattataggcgcgggtgatgcggacgttcggcggcagatcgggcgcgcgcaccgagccggtgatcagcacggttcccttcggcaggagatcggcgatctgcgccatcgcgtcggcttccttggtcaggaagaacggaaacgcggattccggccagatcaggatggtggagtcgctcacgccggtcgaatgcggtccggaggcgcgatccgacagagtgagatatttctgcatcaccgccgccttggcggagtagttgaacttggcatcctgctgcaaatcgggctgcatgatgcgcagcttgaccccggcgaccatgctggtcggctgctgcgagaggcggactgcgccgaatgccagcatcgcggcgaggaccagcaccgctgccaccggcgcacgccacggcttgcggccgcgtgaggcgccgtcgatcagcacggccgggcttgcgaagatcgcgacggccaggaacgtcatgccccacagtccgatcagcgacgcggcctgcgcgagcgccagcggctcggtcagcgcgtagccgaacgcattccacggaaaaccgctgagcagatggccgcgcaaccactctgaaatggtcaagccgaccgcaagcgccagcacgcgcgaggcgtcgcgcggccagatcagccgtgccagcgcgaagccgaaggcggtgaacaaagcgagataggcggggaggccgagcaccgcgaacggcgtcagccaggcgaaggtgtcggcatcgacgaagaaagcgtagccgatccagtacagccccggcacgaaatagccgaggccgaaccagaagccggacaacgctgcggcgggcacgccgcgccagcgtccggcagcagcgccgtcaatcagccagaccgcgatggaaaaggtcaggaacagcaccggccaagcgttgaacggcgccatcgccagcgcggacaacgcgccggctgcgagcgcgagcaccgcgcgcttccatccccaggtcaaaatgatcgcaagcccgaccgagcggagtttgtctgacagcctcactgcggaccggctccctcgccgggcggcggcatgttgtcattggcctgcgggtttccggagtccggtgcctgctcgcggcgccgctcgcgttccttgcgcggcgccggccgttccttgcgcgtcgtgatccgcacccgcttgacccgccgcggatcagcatcgagcacctcgacctcgtaattgccgggaccggaaatcacctcgccgcgcaccggcaggcggccgacgaacgacaccagatagccgcccagcgtctcgacctcctcgccggcctcgccggtcacgaagtcttcgccgatcaccgaacggacatcgtcgaggctcgcgcgcgcgtcggcgatgaaggagttgtccggctggcgaacgatggacggcggctcgtcggaatcgtgctcgtcgtcgatctcgccgacgatctgctcgacgatgtcctcgatcgacaccagcccgtcggtgccgccatattcgtcgaccaccagcgcgagatggatccgcgaggcctgcatctgcgccagcaggtcgatcgcgcgcatcgacggcgggatatagagcagcttgcggatgatatgggcctcggccagcggcagcgcgagatcgacgctgcgcaggtcgagtccggccggaaacggcttcttgcgcttcgtcttggtcgcatcggtgacgcgcgccttcgcggtcatgaaggcgagcaggtcgcggatgtgcaccatgccctcggggtcgtcgagggtttcgttgtagacgacgagccgcgaatgcgccgcgctctcgaacaggctcatcaattcgccgagcggaatgtcgcgtttgaccgcaacgatgtcggcgcggtgaatcatgacgtcggcgatccgccgctcgttgagcgagagtatgttgcgcagcatggtgcgctcgattgccgagaagccgacgtcgtcgggcgtcgaggcgtcgagcaccacctgcagatcgtcgcgcaccgagccggccttccagccgaacagcgtgcggatcgcgcgtaccagccagccttcggctgccgggcgctgcacctcgccctcatgcaccacggcgggcaggttgctcacgttgcgcggattgtcgtgggtcggttcggaatccggcatgtcaggcgttccgatccgcataggggtcgggaatgccgagggaggacaggatctcgcgctcgagcgactccatgtcctcggcatcgtcgtcgttctcgtggtcgtagccgatcagatgcaggaagccatgcaccgcgagatggctcaaatgatggtcgaacggtttctgttcgtcatcggcctcccgccgcgtcgtttcataggcgatcgcgatgtcgccgagcatgcgcggggcatcgtcgggtccgccgccgccttccggctgcagtgccggaaacgacagcacgttggtcggcttgtcgatacttcgccagttggcattgagcgtgcggatgccggaatcgtcggtcagcatcaccgcaagctcggcgccggcgacatcggcgtcggcgatttcggcggcagcctcgatggcgcgatgaatcaccgcgtcggcattgggctcggcctgccagcattcggcggtgaccagaacctcggtggcaggaaaagcggacacgttggtttcaaaatccgcgttatggccggaacccgcatcgtgcgggctcgcagccgaagctattgggctcaagatctggcgtttgccggcttttgcggcaatccctcataggcggccacaatgcgcgccaccaattcatggcggatgacgtcctcggccttgaaatgcacctgcgcgatgccttcgacgccgtcgagcagcttgacggcctcggcaaggccggaggtctggccgttcggcaggtcgatctgcgaggggtcgccggtgacgatcatccggctgttctcaccgagacgcgtcaggaacatcttcatctgcatcgaggtggtgttctgcgcctcgtcgaggatgatggcggcattggtcagggtgcggccgcgcatgaaggcgagcggcgcgatctcgatctcgttgccctgcaatgcacgctcgacgacgcgggcgtccatcaggtcgtacagcgcatcatagatcgggcgcagatacggatcgaccttctccttgaggtcgccgggcaggaagccgagccgctcgccggcctcgaccgcgggccgcgtcaggatgatgcggtcgacctccttgcgctcgaacagctgcgcggcatgggcgactgcgagccaggtcttgccggtgccggccgggccgatgccgaacaccagctcatgccgcttcagcgcgcggatgtaagagtcttgcgccgcggtgcgggcgcgcaccggacgcttgcgcaggttgatggtctcgaaggtcggcttggcggtcttgttgtcgaattcgaacagcgagccctgcgcgatcacggcgcggatcgcgccttcgacttcgccctgatcgaggtcatggcccgcgacggcctgggcatagagcgtttccagcacgcgacgggcagcgtcgcagccgtcgcgggagcccgcgatggtgacgtggttgccgcgggaatcgaccacgacgccgagccgccgctcgatcagcgccagattctgtccgtaggggccgaccagcgcggatgcggcacggttgtcgtcgaaatcgatgacgacctgagtctcaggaggcatttgcatgtcgcggtcaggtttgcggctgggagcaagcgaaggcgaatccgatgcgcttttgggcaaggatttcaggctccaatggtctgcgaaatgaggccgggtgcgggttgcgttgcgagttcgccgatcaggctgtagcgctcgaggctgtcgatccgcacggagcggacctggccgatgatgtcgggcgaagccatcacatgggcgggctgcagataggcagtgcggccgacgatctggccaggattgcgcgcggcgcgctcgaacagcacatcgactgttgtgccgatcgcagcacggttgaaggccgattgctggctgtcgatcaattcctgaagccgccccaagcgctcgtccatctcggctgctgacaccgtctcccgcatctccgccgccggcgtgcctggccgtggcgaatacttgaatgaatacgccgcagcgtacccgatttgcgtgacaagcgcgagggtggcggaaaattcttctctggtctcgccggggaagcccacgataaaatccgatgaaaaagcaatgtcttgccgggcagcccggaaccggtcgatgacacggcagtagtcatcggcggtatgcttgcggttcatggcggcaaggatccggtccgcccccgattgcaccggcaggtgcacgaacggcatcagctggggcaaatcgcgatgcgccgcgatcagcgaatcgtcgacgtcgcgcggatgactggtggaatagcgcagccgtgtgacgcccggaatctccgcgagccgctgcagtaatctgccgagcggccagacgccgccgtcggggccttcgccgtgataggcgttgacgttctgtccgatcagcgtgaattcgcgtacgccgttgtcggcgagctgcttcacgtcgtcgatgatcctggcgaccggacgcgagacttccgcgccgcgcgtatagggcaccacgcagaaggtgcagaacttgtcgcaaccttcctgcaccgtgacgaaggcggagatgccgcgggcgcggatcgcatccggcttcggctgcggcaggaagccgaacttgtcctcgaccgggaattcggtctcgaccgcgcggccgttttcctttgcgcgcttcagcagttcaggcagatgatgatagctctgcggtccgaccacgatgtctacggtcggggcgcggtggatgatctcggcgccttctgcctgcgcgacgcagccggcgaccgcgatcttcatctcgcggcctgcccgtgcggcctcgtccttggcgacgcggagccgtccgagttcggaataaaccttttcggatgccttctcgcggatgtgacaggtgttgaggatcacgaggtcggcgtcctcagcactcgcggtctcgacaaagccttcgccggccagcgtgtccaccatgcgctgcgcatcgtagacattcatctggcagccataggacttgatgtgcagcttgcgcggcgtcgtcatggaaccctgaatacgataaggaaacggcgccatccgcgcgccggtgctgaaatatagcctaaaccggcgaaaatccagcgatcgagccgtgtttttggccggctttggcgatcaaatcgggcaattggcgcatatcggagaaggtgaaggccgcgccggcctggcgcagcgtggcctcatgttccgccgtgcaatggctgccgccgtggaaaccgagcacggtcatgccggcggcgcaggcgccggtgacgccggccacgctgtcctcgatcacgacgcagcgttccggccgtgcgcccatctgttcggccgcaaacaggaacagatcgggcgccggcttgccgcgcgtgacctgggtggcggagaaaatgtgcggcgcgagctggtcgtagagcccggcgcaggtcaggccgtgatggatcttctccggcgtgccgctggaggccacgcatttcggcaagccgagcgctgtgatcgcatcgccgacattcgcgatcgcgttgagatcgtcggcgtacaagctcagtgtcgcgtgcttgacctcggcctcgaacgtatcgggcaacgcgcgaccgatttcgctttcgacgatccgccgggcctcgcgatcggacacgccgaggaagcgcttcagcacgccgtccggcgtgatcggaaaaccgtgccgcgtcagcgtgtccgcatgcgcgcgacaggagatcacctcgctgtcgacaagcacgccgtcgcaatcgaagatgacgagatcgaagctcatggtgtggcgacgtgtggcacgcgcctacgacttgctgtcgtcgtcgagcggcacgcaatacagctcgagccggtgatcgaccagcttgtagccgagcttgcgcgcgatctcggcctgcagcttctcgatctcctcggaggtgaactcgatcaccttgccgtcgcgcagattgatcagatggtcgtgatggctctcgggcatctgctcgtagcgcgcgcggccttcgcggaaatcgtgacgctcgatgatccctgcatcctcgaacagcttgacggtgcgatagaccgtcgagatcgagatcttgtcgtcgaccgccacgcagcggcggtagagctcctcgacgtcgggatgatccatcgcttccgccagcacccgcgcgatcacgcggcgctgttcggtcatgcgcatgccggtcgcggcgcagcgcgcctcgatgccggtattcttcggcgcaggcgggattttcaccgtggtcatgggtctcaggccgtattcttcaaaccttgggcagcagagcagggcgctgttctgccatcgcgccgatgttacgacaagtcgcgccgcatcagaagcgcgttcaaatgttccccgccgggctgcttgtaatagcgttcgcggcggccgatcacgccgaatccggccctttcatagagccgtcgcgccggcgcattgttctcttccacttcgaggaagatggtgcggatgccgcggccggcaagatggccgagatgggtcaacagcaggtcgcgcgacaggccgcgcccgcgctgattggaatcgatcgcgatcgacaggatttcggcttcgtccgccgccatccgcgacaccgcaaagccgatcaccttgcggccctgccgcagccggtgcaccagcgtgttgcgctcggtcagcatcgcctcgaattcgccttcgccccagccgcgatgaaacgacgcgccgtgcagttgggcgagtcgcgccgcatcacgcagggatgcgggctcgaccgcgggcgtagcgccgccccaccatcgcgacagaaagccgatcatgtcgaaggcggcgcgctgatgacgaggcgatccttcggcggcttcgcatcgggtgcgcgcagatagaacggacgcggcggcgcggtgtcgggatcgatcgccgcgccgacccaggcgacccagatgatgtcgggcgccggctgccggtcgaccatgaccggcggcggtgtatccgcaggccagcgctcggcgagaatattggcggcgttgccgaccagatgcagcgcgccgtattgagaggccgcgagcgcttccgcgatcggcgcaaccttcggcttgaggatcgggccaccgtcgccggccaccagctggaaatagacgtgatcatgccgcgcatcgatcgccgacaggatcgcgggtacgccattctcggcaaccacgggcgcagcgtaggcggtgagcgtcgacagcccgaccaccggtttcgcggctgccagcgcgatgccgcgcgccgccgagaggccgacgcgcaatccggtgaaactgccgggaccggtggtgacggcgatgcggtctagcgcggcaaagccgatgccgctcgccttcatcacccgcgcgatcagcggcatcagcgcctcggcatggccgcgctgcatcgcctgcgattcaatggcgatggtattgccggaggtggtgtcgagcaccgcagcggagcaggcgtcgagcgcggtatcgatagcgagaatcatcatgggagggcgaatggcgagtggcgaatagcgaaaggactatcagggtggacccctattcgccattcgctacccaccattcgcctccatcacatcggccggacttcctgcacgtcgggcacgaagtgccgaagcaggttctggatgccgtgctgcagggtggcggtcgatgacgggcagccggcgcaggatcccttcatgttgagatagacgatgccgtccttgaagccgcggaaggtgatgtcgccgccgtcattggcgaccgccggacgcacccgggtctcgatcaggtccttgatctgctcgaccgtctcggcgtcggcctcgtcgaagaactcgtcttcctcatcacgcgcatcgtcgttgccaatggtgccgtcggcgagcagcggcgcgccggacatatagtgctccatgatggcgccgaggatcgcgggcttgaggtgttgccagtcgccgtccgccttcgtcacggtgacgaagtcggcgccgtagaacacgctggtgacgcctgatacggcgaacagccgttcggcgagcggcgagcgcgcggcggattcggccgacgagaattccatggtgccggtgtcgagcaccgtgcggcccggaatgaatttcagggtggcgggattgggggtggcttcggtctgaatgaacatttgctgtctccggcgtcgccggttcaaggccggcgcgttgggttcccctaccaaatggcaactaaaaagccgtcgatcaagccgcaaaaccgcggttccggcccgcgatccatgccctgggaggggtttcaggtcgaaaaccttacgacagggcgtcgatctcggcgtcggtcagcccgcccggcacgatggtcacggggatcgggaacgcgcccatggcattggccatggtggtgatgatcggcccggggccctcggcgcccggattggcggccagcaccagcatcgcgatatcgacgtcctggtcgatcacgtcgaggatctgctcggtcgggtcgccctcgcgaatcacccgctccggggtgatcgcggcgatcccgttggcgcggccggcggcgcggtcgagcgcctcgttggcggcttcctcggcctcggcgcgcatgatgtcggcgaccccgagccattgctggttctggtcctcggtctcgatcacccgcagcatcacgacgccgccgccgacccggatcgcccagcggctggcgtaatacaccgcgcggtcccattccgccgtgtcatcgacgatgacgaggcatttcggcttgtgacctgtttcgtagctgcgtcgctgggtggtcatgcatgtcccggtgctgaaccaagccaacccatgctgccacactccctcgccgtttgggagagggagcgcgcagatctgccggtgatgtcagcgcgctcggatgaagccgacgatgtccttggtcatccgcatggtctcgtcggcgatgacccgtgcgcggtcggcgccgtgggccaggatcgaatcgacatggccgggatcggcaaccagccgcttcatctcaccggcgatcggcgccagtttcgcgacgcaaagctcgaccagcgcgtttttgaaggtggagaactggccgccgccgaactggttgagcacctcctgtttggtgatttcggcgagcgccgcgtagatgccgaccagattgtcagcctcgggacgcgcctcgaggcccttttcctccgacggcagcggctccggatcggtcttcgcccggcgaattttctgcgcgatggtctcggcgtcgtcggtgaggttgatgcgcgaattgtccgacgcatccgacttcgacatcttcttggtgccgtcgcgcaggctcatcacccgtgtcgccggacccgtgatgaacggctccggctgcgggaaatagaggccttcgttgaagccgcggctgcggatcgaatcgccgaaatcgttgttgaacttctgcgcgatgtcacgggacagttcgagatgctgcttctggtcctcgccgaccggcacgtgggtggcgcggtacagcaggatgtcggccgccatcagcacgggatagtcgtagagaccgaccgaagcgttctcgcgatccttgcccgccttctccttgaactgggtcatccggctgagccagccgacacgggcgacgcagttgaagatccatgtcagctcggcatggccggcgacctggctctggttgaacacgatgtgcttgttcggatcgatgccggcggcgatgaaggccgcggtcacctcgcgggtgttgcgcgcgagctcggccgggccgccccagacgtccgctccttgcgtgatcgcgtgcatgtcgacgacgcaatagatgcagttatgggtctgctgcatcttcacgaagttgacgatggcgccgagatagttgccgaggtgcagattgcccgtcggctggacgcctgagaaaacccgttcaacgaacgccatggtctcgattcccggaaatggggctgcttttgcagcgtcgtttgccatttaagccctgcctgcgcaagtcaggcggggcgcctttgcctgacggcgttaaccgcctcgcgccagccggcgacgccgaaaagctgcaacaggagcccataaccggcgatgccggccgcgatcagcacaacgagcgacgccgcctgcacgaaaccgtgtgcgcccgccgccggcagggccgtctccgcgagccacagcagggcgcccattgcgagcgccgcggccaggatgcggggcagccggcggcgcgccgcggcatcgattgaaaagccgaatgttgtggcccccttgcggatcagcgccagcgcattgctccaggcgccgaacgcaatgccggcggcaattccgctggcgccgaagatatggccgagcaggaaggccgccgcaatcgcgaccacgatggccttcagcgtcgcaaacagcggcgtcagcgtgtcctcgcgcgcaaagaacgccggcgacagcgccttcaccagcacgtgcgccggcagcgccagcgtcagccaggtcagcgcctgtgcggtggccgcgctatcctcggcggtgaaagcgccgtgctcgaacaacatccgcacgatcggtccgctcagcaccatcaggccgagcgtcgccggcagcgccagcccggccgcgagctccagggcgcgtgattccgcatgcgcgatggccgactgctcgccgccacgcacggcgcgggtcatctccgggatcagcacggtgcccatggcgacgccgacgatgccgagcggcagctcgagcagccggttggcgaaatagagccaggacaccgccgatggcgaggtggaggcgatcaccgcgcccgccaccatgagccattgcggcgcgccgctcgcgaccatgccggggaccgcgcggccgagaaagccgcgcatctcgggatcgaaggagacgcgcagcggtgcggcgagctttgccccgcgcagcgccagcatcgacagttgcaggaagccggcgacgccgatcgtcgcggccatgacgagcgcggcctgcaccgggtcctgctgccgcaccagcagcaccgccatgaccgcgatcagcgcgatgttgaacagcagcggtgagaacgccgtcaggacaaagcggccctgcgcgttgagcagcgccatcatcacggtgaccgggccggcgaaggcgagatagggcagcatcagccgtgcatcgtcgacggcgaattgcagcgtgtagcggccgacgaagccgggcgcgatcgccgtgatcaccagcggcatcacgacgccgatcacgagtgcggctgcgatcacggcggcgctgacggtgccgagcacgcggccggcaaacgctgttgccgcgtccatgccgtgcgcatcgcgcgccttcagccatgcgggcaccaaagcggcgttcaaaccgccctcggccagcagccgccgcacaacgttcacgagctgaaacgccgccaggaacgcatccgccaccggccccgcgcccagcagcgccgcgatcacggaatcgcgcacgaaaccgagcagtcgtgaagccagcgttcccgaggagacggtgaggaaggagcggaacatcgggcctgtatagcagccgcttcccttgctggcgctagccgtaacgtgataggccgcgctcttgttggtggcgttcacacagggcaagttgatggctgacgcaaaatatgacgttctcgggataggcaatgcgatcttcgacgtgctggtgcaaacggatgaggcattccttgcccgtcacggcatgaccaagggctcgatgcagctgatcgacgaggcgcgcgccaccgcgatctacactgacatgggggtcgccaccgagatgtcgggcggctctgccgccaacacgatcgtcggcgtcggcaatctcggcgctcgcgccgcctatgtcggcaaggtcaaggacgaccagatcggcaagctctacacccacgacatccgcgccgccggcgtcaccttcgacaccgcgccggccaagaccggcccggccaccggctgctcctacatcctggtgacgccggacggcgagcgcaccatgaacacctatctcggcgccgcgcaggacctgacgcccgacgacatcgatccggctcagatcgccgccgccggcatcatctatctcgaaggctatctctgggatccgaagaacgccaaggacgccttcgtgaaggccgcgacgattgcgcatggcgccggtcgccaggtcgcgctcacgctgtcggattcgttctgcgtcgaccgctaccgcgacgaattcctcgacctgatgcgcaagggcatcgtggatctggtgttctcaaacgagtccgagctgcactcgctgtaccagaccgccgatttcgacaccgcgctgaagcagttcggcaaggacaccaagctcggcgtcgtcacccgcagcgagaagggctgcgtcgtgatctcaggcgacggcgtcgtctcggcgccggcctatccgatcgacaagctcgtcgacaccaccggcgccggcgacctgttcgccgccggcttcctggtcggtctcgtccgcaatgtcggtcatgagaacgccggccgtctcggcgcgctcgccgccgccgaagtgatccagcacatcggcgcccggccgctggtgtcgctgaaggagctggcgaaggcgaaggggctgctggtttaggcggccctgtccttcaacctcccctgcggtggagggatagcgatagaaacgtcgctccaccctcgtcattccggggctcgccgaaggcgagagcccggaatccatcgggccgcatcacgcgtggagcaatggattccgggttctcgcttcgcgagccccggaatgacggcgcggcaagcgagagagggagaagcgagcatcaagccgtcttcgcggccttcaatcccagccgctgctccacggcgtcgcgcatcacgaatttctggatcttgccggtcaccgtcatcgggaattcctcgacgaactcgacatagcgcgggatcttgttgtgggcgatctggccctggcagaaggcgcgcacctcgtctgccgtgagcgtttcgcctgaccgcacgcgaacccaggcgcacagctcctcgccatagcgctgatcggcgacgccgaagatctgcacgtcctggatcttcggatggcggtagaggaactcctcgatctctcggggatagagattctcgccgccacggatcaccaggtccttgatgcggccgacgatgttgcaatagccctcgtcgtcgatcaccgcgagatcgccggtgtgcatccagccattggcgtcgagcacatcgccggtcttctccttctcgtcccaatagccgagcatgacgctgtagccgcgggtgcacagttcgccgcgttcgccgcgcggcaccaccttgccgtcgagatcgaccaccttgacctcgacatgcggatggatgcggccgaccgtagagacgcggcgctccaagggatcgtcggtcgcgctctggaagctcaccgggctggtctcggtcatgccgtaggcgatcgtcacctcgcgcatgttcatctcggtgttgacgcgcttcatcacctcgatcgggcagggcgcgccggccatgatgccggtgcgcagcgaggacagatcgaagcgagagaactccggatggtcgagctcggcgatgaacatggtcggcacgccgtagagcgtggtgcatttctcctgcgcgatcgtcgtcaatgtcgcgagcggatcgaagccctcgccgggatagaccatggtggtgccgagcgtgaccgaggcgagattgcccatcaccatgccgaagcaatgatagagcggcaccgggatgcagatgcgatcctgctcggtcaggcgcatggcgcggccggtgaagtagccgttgttgaggatgttgtggtgggtcagcgtcacgcccttgggcgagccggtggtgccgctggtgaactggatgttgacggggtcgtcgaattgcaggctcgcgccgagcgcgacaagctgctcgcggtggcgttccccgcccatctgcgcgacctgctcgaacggaatcgtgcccggcgccgccggtccgccgatctggatcacggcgcgcaattgcggcagccgcgccgagcgcagctggccgggctccgcgctcgcaagctcgggcagcagcgtgttcagcatctccatataggccgaggtcttgaacgcggtcgccgtcacgatcgcggcgcagccgaccttgccgagggcgaattcgagctcgctcaagcgatacgccggattgatggtgacgaggatcagcccggccttcgcggcggcgaattgcgtcagcgtccattccggccggttcagcgaccagatgccgatccgctcgccgcgttgcagtccgagcgcgaggaaacctgcggcgaccgcctcgacccgttcggcgaattcgttccaggtccagcggacattgtggctgggcgagaccagcgcctcccgatcgccccagcgcgcgcgggcgcggtcgaggctgcggccgatggtttcgccgagcagcggcgtatcggaaatgccgcaaacatagctgtctgccttgctgtctcccttgggggtgggtgccaaattcgtcctcctcacggtcatgttcgtgtcgtcgcactttttgcgcgatcttagtcgtttggcgccgacgggacaggcccgacctatggcgggtatgaaaaatccctccccgcgagaggagggatttcgcgttgcttggctggaaccttacgccgctcgctgctcgctgccggcatcgagcccggcatagatgcccttctcgaagcctgcgaaggcttccaggctgtgcttgtcggcgaacggcagcagctgggtcaggatcacgccgcagacatcgcgcgacggatcgatccagtaataggtgttggcaaggccagcccaggcgaggctgccggggctgcggccttccggcgtcttggcggtgttgataaggaagctcagcccccacttcttcacctggtccggatagaggtcgacatcgttggtgtaaggcggcgccgccgtcgtcatcttgctgacgctgagatcgcccatctggttctgccccatcgccgcgacggtctcgggcctcagcagctggttgccgttgcctttgcccttgttgaggatcatccggcagaacttgatgtagtcggccgcggtcgaatacagcccgccgccgcccatgtggaattccggattctgctcgagctcgaacggcatcgccgccagcgctccgtcctcgccccgcgcgtgcatgccgaccagccgcttgcgcatgtcgtcggagatcttgaagcccgtgtcgctcatgccgagcggcgcgaacatgttgtcacgcagataggcatcgagcttcttgccggatgcggcttcgacggccttgccgacgaagtcgatattgatgccgtattcccagcgggtgcccggatcgctcgcgagcggcgtcttcagtgcggcattcaggcaggagatgatcccgggcgtgccggtcttctccatgtatttccccatgtcggcgttccacaggtcgtagcagaagccggcggtgtgggtcatgagcttgcgcagcgtgatcggcgccttcgccggccgcagcttcggctcgcccttggcgtcgaagccctcgagcacctgcggtgcggcgagatcgggcagcagcttgccgatcggctcatcgagcgacagcttgccctgctcgaccagctgcatcgcgccagctgaggtcaccgccttggtcatcgatgcgatccagaacacgctgtcggcggtcatcggatcgctcttggagaggtcgcgcttgccgaaagcgccctcgtagatcacgtccttgccggtggccgcgaccgcgaccacgccgggaatctcctttgcctcgctcttctgacgcaaaacctgatcgatctgagccttgctctgcattgggcttcctccggtgggtttatttgttttgaagtgggcggatcatcctcccgctcgtcgggtctcgcaaggcgggcaagcgatgcgattgtgtcgcgatgtcgtgaaagcccgggtcgcgggaacgaagacgttcaccacgagcgcagattttgcggtggactccgcgcaagtcccggtgacccgcaggggtggccacggtaacgtgatcggcagactgattttcggacctgattttttgcattaacgcattcagatcgctgcacaaacggcgcggcggattgggcctgatttgacgaaaaggctcgtcattttcggcccttgcggggacgcagcaatgatttcgacatggagtgaatggaagcgctatccgcggccgggccgcggcgagaacatcgaggcgccgatcagcccgggcctctatgaggtgcgctacgcaggtaccggcgcgctgcactcgttcgaggcagtcgacaatgtcgcacaggcgctggcgctgctgcagaccggaaccaggtcgtggttcggccgtcgcgatgcgcgggccgaggccgatctcgagtatcggacctgcgcgacctcgaccaaggcggatgccaaggctgcggccgagcgcatgatcggccgtcgtgaaacctacatgtccggcggcgcgatctgacgacattccccagtgcgcaaattgcgcagctgcggttggatgccctgcatcgccggggaacaacagctcgcaacggtgtcgcgtttgagtccaagcagggtcgcgccggcggccagtgcatcgcagcggctttccgcctatataggcggccaataccctccaaagacattccaggagtaacgccatgaccccgcccgctgccgtacgcgccacgcaatccgccgcttccctgcacgaccgcctgaaggatccgtcactgctgcgcgaccgctgctatatcgacggcgcctgggtcggcacccccgaattcgccgtcaacaatccggccaccggcgtcgaactgatcaagatcgcgcagctgggcgccgacgatgcaaccaaggccgtcgaggctgcgcagcgcgcgtttccggcctgggccaagctgaccgccaagcagcggtccaacatcctgcgtaaatggttcgacctgatcatcgccaaccgcgaggatctcgcgctgatcctgacttccgagcagggcaagccgctcgcggaagcgctcggcgaggtcgacatcggcgccgcctatgtcgaattcttcgccgaggaggcgcgccgcgtctatggcgagaccattccgacccagcgtgccgacgcgcgcctgcttgcgatccggcagccgatcggtgtctgcggcgccatcacgccgtggaactttccgaactcgatgatcacccgcaaggtgtcgccggcgctggcggccggctgcacggtggtgctgaagcccgccaacgagacgccgctgtcggcgctcgcgctcgcggtgctggccgagaaggccggcgtgccgaagggcgtgctcaacatcatcaccggcgatgcgcctccgatcgggcaggtgctgtgtgagcatccggcggtgcgcttcgtcggcttcaccggctcgaccaatgtcggcaagatcctgtatcggcaggccgcggtcggcgtgaagaagctcggcctcgagctcggcggcaacgcgccgttcgtggtgttcgacgatgccgacatcgacgccgcggtcgaaggcgccatcgtctcgaagtaccgcaacatgggccagacctgcgtctgcgccaaccgtctctatgcccaggacaagatctacgaccagttcgtctcgaagctgtcgaagaaggtcgccgagatgaagatcggcgacggcacggaggccggcgtgacccaggggccgctgatcaacatgaaggcgatcgagaaggtcgagcgtcacattgccgacgccgtgaagggcggcgccaagatcgtgaccggcggcaagcgctccgcgctcggccgcagtttcttcgagccgacggtgctgtcggacgtgcggcccgacgcgctggtggcgcaggaggagaccttcggcccgctcgcgcctgtgatccgcttcaaggacgaggccgacgtgatcgcgatgtgcaacgcctcgccgttcggtctcgcctcctacttctattcgcgcgacatcggccgggtctggcgcgtcgcggaagcgctggaatcgggcatggtcggcgtcaactccggcctgatcacgaccgaggtcgccccgttcggcggcgtcaaggaaagtggcctcggccgcgaaggctcgcgccacggcatggatgaatatgtcgagatcaaatacgtgatgatggccggcgtctgatcgccgtcatcgtgtgctcgctcaagcccggctctgattgaatcagggccgggcttttgtttgatcacacgctcttgtcgatcgtttgccgacattcagaggctgcgacaattcaccgcgttcgaccgcgacggcgatcgcatcgagaatctctctaatctcgaaatggttgtctgaaggccgcataagcgcgcagccttcaacgaaacaatgatccaagcgtggaatcttccacatcgatgtcgcagcgtgcggccaagcttcgtcccctctcttagatgcgttctagttggcgtcacagcgcatgctgtttatgccccggtgggtcgcgctcgaactctgacgatgttcgacgcgaaaccaagaagaagactctggggacttcatgctcgtcacctcaaacgttccatgcgcattccgactggcatgcgcatctctgctgctgactgcaattccttcgctcgcgcagacgctggagcagccacccgcaagcggtgccacgtcccttccgccggtcgtcgtggccgcgccacagcatcgaagcacgccggttcgcaggccgtcatcgtcgcggtcggcgcgctcgtcggcatcgcatcaggcgagcaggcgtgagcacgcgccgacaccagcggccacaccgaccgccggtgcgcagcaggcggcgttgccggtgccctatatcggcggccaggtcgcgcgcggcgggcaactcggcctgctcggcaacaaggactatatggacacgccgtacagccagacgagctacacggagaagacgatccgcgatcagcaggcgaccagcgtcgcggaagtgctgacgaattccgatccgtcggtgcgcgcagcgatcggcagcagcaaccgctacgatgcgttgaccatccgcggtttccggatcgagaacagcgaaatcgccttgaacgggctctacggtctggtgccggcctatcgcgtcaacccggcgccgctcgagcgtatcgagctgctcaagggaccggctgccttcctcaacggcatggccccgcaggggagcatcggcggcacggtcaatgtcgtgaccaagcgggcagcggaagacctcacgcgcctgaccgccggctacatctcggatggacgattcggaacggagctcgacctcgcgcgccgctacggcgaacagaaggagtggggcgttcgcttcaacggaggaatcgacggcggcaacaccaccatcgaccggcaatccgcgcgcaacggcttcggctcgcttggcgtagactatcacggagagcgattccgctggtccgcggacatcatctcccaggacgactggatgaaggcggcgcagcgcggctatacgccggtgtccggcatagcccttccgaacgcacccgatccgcgcatcaatctggcgcagccattcgactacgcgcggtcgcgcagcctgaccggactgacccgtgcggaatacgatctgagcaacaatgtcaccgtgttcggtgcgatcggcggcaacgaattccgctacgacaagcgggaagatccgggcgcgacgatcctcaacacagcgggcgatgcgttgggcacatcccgcttccagaccggcaagtccgagtcgatctccggtgaggccggcgtgcgcgcgcgtttcgataccggcccgatcggccatgaggtggtggtcagcggcagcgcgcagaaccggaccgattggcttggccagaccaactacgggacctatctcaccaacatctacagtccgaccctgctggcgaccgcgggcacgccggtatcgacattccccgagggcaagtccggcttcctcgggctgcgcagcgtcggcgtcgccgatacgctcacgacgatgggcgggatgctgcaactgatcgtcggcgcacgccagcagcaggtgatcgcaaacagctacgcgccggtcagcgggctggagacaacgcattacgaccagagcgcgacgtcaccgtcgatcgccctcgtggtcaggcctgtcaagcagctgtcgctttatgcgaactacatcgaaggcctgtcgcccgggccgacgccgccctccggcgcggtcaacaccagcgcggtgtttgcgcccttcaagactcggcaggtcgaggtcggcaccaagctcgatttcggcggcttcggtgcgagccttgcggcgttccagatcagccaaccgagcggcgtgatcgacccgctcaccaagatctacagcctcgacggtcagcagagaaatcgcggcatcgagctcaatacctttggcgaggtcgcgccgggcgtgcgcgtcctcggcggcgtgacctggctcgatgcccggctgacccagacccaaggccatctctacgacggcaatcatgcgatcggcgcgcccggcctgcagggcaatctcggcgtcgaatgggatacgcccttcgtgcccggcctcaccgcgacggcgcgcgcgatctacaccagacgggcctatgtcagcgccgacaacacccagagcgtccccgactgggcgaccttcgacatcggtgcgcgctatgcgacgacgctcgcggggcgtccgaccacgttcagggcgcagctgaccaacctgttcgacaagcattactggatcggcaatccgaccggctatgtgatcagcggcatgccgcgcacgttgtggctgtcgatgacggtcgatttctaggagaaatgcctgtgaccatcgcacgcgaccgtgcgatggccggtcacacgcccttgtcgttcgggttggccaccgcgtccttcagcggcgccgtcatcgggaaattcaggttcacgttcttcggcggaatcggccgcgtgaaccatttggcgtagagctcctggaattcgccgctcttcatcatcgcggccagcgtcttgtcgaccagcgccttgaactccggatcgcccttgcgaaggatcagtccgtagggctcggtgcgcaggctgtcgtcgatgatgcgccagtccgacggggtggggctgccggcgatcaggctcgccagcaaaatgtcgtccatcacgaaggcctcgctgcgcccggtggtcagcgcgaggaacgacgcggcatggtccggcgtcaggatgttcttggtctgaaagttgttcgcttgggcgcgcgcactcaacagcccgatcgaggtcgagcccgaggtcagcgagaccggccggccgccgaggtcctcgaaggccctgatcggcgcgtccttccgcacgacagcgcggatgctcgacacgaagatcgtgtcactgaaggcgacgaccttctgccgctccagcgtgttggtcgcgggtccgcagacgatatcgatggtcccgttctcgatcagcggtatctgggtggagagctggatcggctgcagcctggtctgcagcgcgggcagcttcagctcgcccttcaccgcatcgacgatccgcgcgcagaggtccatcgcgaagccaaccggcttctggttgtcgtcgagataggagaacggtaccgagacgtcgcggtgcccgagccggatttctccggtgtcgcggatcttggccagcgtgccgttgggggactgcgcctgcgccggagcggagaccgccgctgaaagaaatgctgtataaatcaatgtcttgacgggtcgattcatcaggcgctcgcagatctcgatagttctggatacgatcggtcaagattttatacacagcattgcataatcaccaaacagattttatacaatcctggctcagtcggatatctcagtccgagctcaccagcgagacgccgcatggaacctgtaaccgccgcaagccatcgaggagccgggccccacggttccgcgccggacaccgtgcgcgaggcgctgcgggttgcgatcagctccggcgagctggcgcccggattgcagctgcgccaggacgagctcgccgcgcggttcggaaccagccgcatcccggtgcgcgaggcgttgcgccagctcgaggccgaaggttttgtcaccttcctgccgaatcgcggcgctgtcgtttctgacctgtcgatcgacgaggtgatcgagctgcttgagatccgtatcgcgctcgagtgccatgccttgcgcttggcgatccccgcgatgggcgtgatcgatctcgaggaggcaacgaagatacttcgtgcctacgacgccgagcccgatcccgcgcaatggggcgccttcaactggaaattccacgccacgctctatgcgccgtgcaatcgtccgcgcctgctctccatgatcgaggcgaattacggtcatgtcggccgctttacccgggcactggtgtcgcaggcgaccggcaaggagcgtccgcagcgcgagcactacaggctgcttgaattctgccgcgacggcgaggtcaagaaggccgtccggctgctgcgcgatcatatcgaggagacgcagaagacgttgcgctcggcgcagcgccaggcgttgcgcgatgctgctccggtctgatcgacatcaggacccaatgaactattgccggcgccgccgcgggccgatcggagaatgcgtgtgaagaccaatgacgtcgaaatcctggtgatcggtgcgggcattgtcggcatcgccacggcctactacctcgccgtccagcacaagcgttcgcgcctgttgatcgtcgatgagggacagccgatggcgctgacctcggcgcagtcgggcgagaactaccgcaattggtggccgcatccgacgatggcggactttaccaatcactccaccgatctgatggaggagatcgcgcgccgcagcgacaaccgcatccacatgacgcggcgcggctatctcctggtcacgcgtgagacgaagtccgacgagctgttgcagcagctctacgccggctatggcgcacaggccgccaagctgatccgcctgcatgaaggcgcaagccgcggctatgtgccgccgcattcggcggactggcagaccgcgcctgacggcgtcgacgtgctgctcggccgcgacctgattcagccgcactacccgaccttcgacaaggaggtctcgaccgcgctgcatatccgcagggcgggtgacatcagcggtcagcagcttggccagtacatgctggaaaccatgcggccgttgggcgcgcaattccagcaggccaaagtggtcggccttgcgaaggccgatcgcttcgccgtcgaggtgctggccgatggcgtgcgacagaccatcagggccgatatcatcgtcaatgccgcgggcccgttcgccgcgcaggtcgcggcaatgcatggcgagcggcttccgatcgtcaatgtgctgcagcagaagatcgcgttcgccgaccgtaaccgcgcggtcgatcgcaagatgccgtttgcgatcgatctcgacggccagacgttggcatggtccgacgacgagcgcgcggagctcgcggcggcgccggaattcgcgcgcctgctggcgccgatgccgggcagcatccattgtcggcccgacggcggcgatcacggcgagtggatcaagctcggctgggccttcaacgaagagcagatcaccgcgccggtccgcgagccggagctgaattcctatttccccgaagtcgtgctgcgggcggcgagccggctgcagccgcgccttgcgcagtatctcgctgcgttgccgcgcgaccgggtgcactacggcggctactatccgatgacgaaggaaaactggccgctgatcggcgccgcgaagacgccaggcgtgttcctcgccactgcgctgtccggctacggcacaatgggcgcctgcgctacaggcgatctctgcgcctgtgccgtggtcggcgcgccggtgcccgccttcgcccgcagcctctcgctcgcgcgctatgacgacaaggcgctgatggatcagctcgcggcgagcgaaagccggggactactttagcgccgcagcaccgcgatggtgcggttcgcgaaagtcagccgctccgccatgaccgacacgaaataggtcagcagcttgtggctgagctcggggtcctcgtcgcggatcgccgcgaactggcgggtgttcagcacatagagcacgctcggcatctcggcctggattgtggcgctgcgtggagtgttcgcgacgaggcccatctcgccgatcgtggtgtagcggccgaggctgcgcacgcgcgtggtgcggccgtcgtcggcgggcaccatgatgccgacgcggccgtcgaggatgaagtgcatggaatcggcggcgtcgccggcgtgcacgatgacctcgccggcgtcgacctcgatccgctggcagcgccggatcaacgtatcggcatcgccttcattgtcgagcagcccggtgaaccagccgcgcagatcggcctcttcctgcgcgaggtcctggtgctgtgcgatgatctggttctcgcaccattccagcgcatgatcgagctcgtcgatcacggagacgccctcggtaatgaaatcgctggcgcgcagcacctgttcggccttggccgacagatgcaccagcaccagctcgacgccgacctcatgcgcgctgcgcttgatctgcgcaaagctgtaggccgccgatgaatcgacgccggtgacgagcttgaagtcgaacagcaggtagcggcactccgcccgctcgcgcagcagcgccttgacgtgctggtacagccggttggcggagccgaagaacaggtagctctgcaaggtcagcccctggatcttgccgccgtgcgcctgcagcacgttccggtcgtcgcgcgagcgatccagcgagctgcggtactccgagccgtcgaaaccgtatttgatcgcctcgacccgcgctgcgctgagcgcaaaggtggcgcagccgatgatgacgccgatcaggatgccgggcacgaagccccaggccacgatgatgacgatgatcgcgagcagcgagacatactcggtcttcgacagccgcttgcgcgattcgatcatccatttgtgcagctggtcggcgccgagatagatcagcagcccgccgagcacgaatttcggcatgtagccgggcagctgcggcgccaccgccagcatcagcagcgagatcgcggcgaccgtcagtcccgacagcgggccacgcccgccgctggagaaattgaggatcgagcggctgaccgagatgcagccggcatagccggccagcgcgccggtcaggatattggcgaagccggtgatgttgagctcgcgctcgagattggcctcgcgatgcaccgcgacctcgatgccggtggtgttgaacagcgtgctcgccgccgtgacgaagaccacggcgatcaggttgccgagcagatccggcaccgccgaccacggataatgcgcaatctccgccgcgtgccacggcagcatgaaggtcgatgccggcggcggctcgaaggtccagccggtcaggtgagcttcctctggcgtgatgccgatgatccagaacaccagatgcgccacgatcaccccgccgaccaggatgatcggcagcccaaacggggtgcgcgatcgatgccaggtcagatacagcaccagcgccatcgcgcaggcggcgctgagctcggagatcgtgatgatattggtgaagtggatgagggtgccgagctgcacggggtaaccggtgatcaccctgattgcgccgagcacgatcaacaggccggtcgcgccgaggaatccgccgaccacggggtaaggcacgtagcggatggcgcggccgaaccgcgtcagcccgaggcagcacaacacgatgccggtgacgatggtcgagagccccagcgtgatcagcactggtgtgagcagcggcgcagtcgggttggcggcgccgatgcgctcgaccagcgaggccatcaggatgccggtcaccgccgcggtggagctgtcagggccggcgactgcgaacggcagcgagctgccgagcgcgatcaaggtcgcaagcaccgccgacgagatgaatgtcgccgcgatgccgtatgacagatagggcgccaacggtccggcgaagatcagcaacgcgtaggacaggccgaaggtgatgccgagcacactggccgcgctgccgccgagaatgtcatgcatggcccgccgcgctcgcgaaccgaaataaagcgatcgaccaatcacgttgaaaaatgtcctgaacttccgacgccagtggtagacgagcccggcgcaggacgacaacaggatttttgtgacaaccgcttctcaatgcgcgcattttcagcgtcgccctgcttgtgggccgacgatcgcaacgcgctgctcgatgccgggctcgtcgagcagcgcacgctgggtcgcgacgatgtcgccgacggtgatggcagggaagcatggcctgcagtgccttcccgtccgcggctcgatgcgcgccgggttggtcgagccgggctacccgttcccgtcctcggtgccgaacgcgccgtgacggccgatgcccgaggcaaagcgcgtcgcccccgacagcgtctcgcctgaggcgatcacgtcgagcccgccgcgcatttcgttcctgatcgcctcttcctcgtcgaggtcccattgccgcagtgccgacagccggtcggcccgcatgcaggtctgcgggaatttcgcgatgtccttggcaagcgcgacggcgtgcgcgcgcgtctcgcccttcggcaccagccggttggcaagtcccatgcgatgcgcctcggggccaccgaccgggcgtccggtgaggatcagatcgatcgcctgcgaatggccgatcaatcgcggcaggcggatggtgccgagatcgatcagcggcacgccgaagcggcggcagaacacgccgaaggtcgcgtcctccgcgaccacgcgcatgtcggcccacagcgcaagctccatgccgccggcgaccgcaaagccctcgatcgcggcaatgactggcttcgagagccgcagccggctcggccccatcggcgcgatcgtgttgtggccgccgacctcgcgcttcttctcgggatcgcccgccgccaccgctttcaaatcggcgccggcgcagaaatagccgccggtgccggtgaacaccgcgaccgatgcgctggcgtcggcgtcgaaggcgaggaatgcgtcatacagcttgcgtgctgtcgcgccgtcgaccgcgttgcggttgtgcgggcggttgattgagatgatggtgacgggaccatcgcgctcgacgagcacggtatctgcatcggacatgggtcgctccctggcttgttggttggagcgagcctaacggtccctctcaggcaatgccatcgcgaacgaaggcgacgcgaatggtcgggtcgccgatcgcctcatgcgcgtcgtcgaaacggacgcggcgcgtgatcacatgctcgggatggtaatgacctgccgcaacatgggcgacgcaatcgggcaaatcggcgcggacattgacacgcgagaccctcaaggtgatgccgacgccgtacatgtgccggagcggcaccggcgtggtctcggcgaagtcgccatacatgcgctggcagacgccgttcggttccgtcgcgcggaatgccagcaggatgctggcgtcggtcgcagccgcatcgatcacgatcggaaacaggccgggcggctccatcatgaggccggccggcgcttcgacgacgtcggcgccgagcgacttcgcctttgcgaggcgcggcgcatgatcgtcgagatagacgacgcggcccgcgccatgcgccaccgccgcctgcaccgcgaacatcgcgagcgattgcgcgaagccgccgatcaccagcacatccgcgccgggccgctgctcgagccagcgtgtcaccgcgctgaagccgtcggtcgcgccgtcggccaacccggcggtttgcgagaggggatggccttcgggctggcggaccagcatgtgatcggcgaacggaacgcggatcaggtcggacagtccgccgccatattcgacgccgcagaccggcttcaatccgtaagacgaccggaacggcaccgccgcgcaggcattggtgtggccgcgccggcagcggtcgcaggcgccgcaactgatctggaacggaacgatgacgagatcgccgggcgcgaaattcttcacctgatcgccgacggcggtgatgcggccggcggtctcgtgcccgagcgcaaacggaccgggcagccgcgatcggccgtggacgatcgcaagatcgagatcgcagcgcgtcaccgcgagcggctgcaccagcgcgtcgcgatcatcttgcagatggggctcgggaacgtcccaccattcgaccttgttgccgccgacataagtcaattgccgcatcgcgtgctctccgctttggacggagagtgccgggaggcaggtgcggcgacaaaaggtttgtcttcaacggagatgaatggaattcacctgtgccgtcgagcgaagcggcgcggcgtgtctaacccgtcatcttgaggagccgcgaagcggcgtctcgaaggatgcacggccatcagcagggccgtcgccccttcgagacgcgctcctcagagcgtgtgaatttttgtggcttgggcgaaagatgtagcgggagggatgggggatgtgattccctgcaatcgctgaattgcgggagagcgggagatggctgaagaccagctgtttggagaactgccggagcagccgaagccgcaaactgatgcggcgccagcgggtttgccgcgtctgcgcgagccgcagcgcgatcagattgaactgcgggcggtggatatcgatagcctgatcggggaagatcatccggcgcgggtgatctggtgctatgtcgacgggctcgagctgcgcgagcttgaagatcggatcaaggcgcggggcgagaggccgggtcatccggcgacgtcgccacggcttttgctggcactgtggctctatgcgaccagcgacggggtaggaagcgctcgcgccctggagcggctgtgcgagagccacgatgtctatcgctggctgtgtggcggggtctcggtgaactaccatacgctggcggacttccgggtcggatgcgccgatctgctcgatcggctgctcgccgaacatcttgcggccttggcggaggtgggcctggtcgacctcagc

SEQ ID NO: 10 - DNA, 181118 bp, Bradyrhizobium enterica
cgcgcaggcaatacgatggtccgttgttcgatgctggtcatggcctcgctggccgcatacaggccacagccatccgccagcttgcgatcatgcatgctccgggcaatgacgtggaactggtgttctgcggcgcaggcgtagagcgcgaagatgtcgctctcgcggtcgcccagcatggtcaccatcgcagccttcgccaacagcggcttggctgccagagcggtcgcgatccagcgttgcgattctttgtccttcagatcgcgattgtcgtgcgagacggtgcggcggccctggcgggtccagatctcgccgtgcaacaggccaaggcagcagccgctttccgcgtctgcggccagcatcgggtgcagcaacaccccgcgggtgttgccatgaccgatctcgcccaagccacgccggttttgtgccttggtggcaaaattgatctcgctggtatcctggatcgccagcacatggcggccttcggccgccattaccgtaccatcgctccagctttcgattatccgcgtcgtcgtcaccttggcattgccgagaaagcggttgaagcgcacctcccgggcacgcatgcctcctgccagccgtcgcaggcagacatccttgcccgcgaccatgcattcgacgagcgccgcccccctttatcgaggcggagatccccgaaccgacctaatgaccagtcaatttgcgccagcatgtcgacacctccgccaaagccgaagtgccgcaatatgaatcacacgaaataccgattcgggaatccccacccaactagatgtgtgcatgccctagggccttcgccgggacgacggcgaggtttgcggcgctagatcctccgccccgcccgctcccaatacgggtcacgcagccggcgcttgaagatctttccggagtcctcgcgcggcaggttggtctggatctcgatgtgcttgggcaccttgtagtcggcgagcgcggtcttcagctgggcacggaccgctgcgatgtcgagcgtgacacccggttgcggctcgaccaccgccatcagcgcctcgccaaattcggcgtcgggaatgccgaacaccgcgcagtcgtgcacaccgggcaccgcatgcagcacggcctcgatctcggccgggtagatattgacgccgcccgagatcaccatgtcgcgcttgcggtcgcagatgaagacgtagccgtcagcgtcgatataaccgacgtcgccggaggtgatgaagccttcgcggtcgatctcggcacgcttctcggacttgttgtgataggtgaaatccggattgccggcgatccgcgaatagatctcgccgatctgcccctgaggcacctccttgccgtcgtcgccgatgaagcgaagctcggcgccgggcgagatcttgccgaccgtgccgggcttcttcagcgcatcttccgaggtcgcgaacgtcaccgcgcccgactcggtcgagccgtagaattcgtagatcaccggtccccaccattcgatcatggcgcgcttgacatcggccgggcacggcgccgcggcatggatgatatggcgcagcgacgacatgtcgtatttcttccgcacctcttcgggcagcttcatcaggcggatgaacatggtcggcaccatgaagatggtgtcgatccgctcgcgctcgatcagcgccagaaattcctccgcgtcgaagcgcggcatcagcaccagcgcgccgccgagccggccggagcgcagtccgaaggaattcggcgccgaatgataaagcggtcccggcaggatcgcgcgtgccccgggcttcagcccgtagatcatcgcccgcatcgcttccgcattagcggtctgttccggcgtcggcgcgaaacggcggacgcccttcggatggcccgtggtgcccgaggtgtagatcatgttctgcggctgcggcacgacggggccgtcgtaacgcgggaattgcgccagccaggattcgaaatcgatcgcgaaatccggggttccgagatgatcgggattgatcttgtagctggagagaatttccggcggcgtcggcacgctgagcacggtgacgtcaggcgggatcgcgccgcgcagcggatgcagcatgtcggcatgagcgatcaggacccgcgtgccggaatccgtcagcacgtagttgatctcctccggcttgaagtgccagttgaccggcacgccataggcgccgagccgcatcgcagcgtaggcggcctcgatgaaggcgatgtcgttgcgcatcagcatgcagacgctgtcgcccggcttgacgccgagcttggcaaggccgctggcgatacggtcgacccgttcggcgaccgcagcgtgatcacgcctgcgctcgccggagatgatgccgaggaagggctgggacgtttcgctcattttgttcttgttctttgttgtcggttagcagggttggttgtgtccgccatagccgagagaacccggccatgacgccagctcgtcatcacgcatccgcgaatttcggcgcgcgcttctccagattggcgcgcacggattcggtctggttcggactgccgagcagcttctgctgctcgacggattccgcgagcagcgcggccgccggatcgaccgacagattgttcagcaggcgcttcgcggcacggatcgcatccgggctcttgccggcgatctcgcgcgcgacctcgagcgcagcggtgcgcgggtcgtcgcagacgcgggtggcgaggccatagctctgggcctcctgcgccgagaagatgcggccggtataggtaagctcgcgcaggatatcgtcgcgcaccaggctcgccaggatcggcgtgcccgccatgtcggggacgaggccccacttgatctccatgatcgacatccgtgcgtcggttgagaggaaacgcatgtcggcgccgagcgcgagctggaagccgccgccgaacgcaacgccatggaccgcggcaatcaccggcaccgggagctggcgccagccccacaccgcctgctgcggaaaattggccttgccgtgggtgcggatcgtgagatcgcgcttctcgccgcccggcactccgttaccgccatccttcatggcggcgaaccggcccatgtcgaggccggcacaaaacgcccggccctcgccggacagcaccacgacccgaacccctttttccttggaaagccggtcggttgcggcgaccaatgcctcgaacatcgcggcatcgagcgcgttcatcttgtccgcccgcaccaggcggacatcggcgataccgtctgaaatcgatatcgaaacgcgatcttccattgaaatctcctccgctgatcctcgttggcgctttacagaaaggccgttgtccgcttttagtcaatcgaccaattaactgacaacccccgtggaggaaacgatgtttagcaatcagcttcttgccgggcggcgcatcctggtaaccggcggcggcaccggcctcggaaaggccatggccacccggttcctgcaactcggggccgaggtccatatctgcggccgccgcaagagcgtttgcgacgagaccgccaccgagctgatggccgagcatggcggacgcgtggtcagccacggcgtcgatatccgcaatgccatggcggtcgacgagatgatcgacgcgatctggaccaccagcggtcccctcaccgatctgatcaacaacgccgccggcaatttcatctcgcgctcggaagagctttccgcgcgaggctttgatgccgtggccaacatcgtgatgcatggcaccttctacgtgacgcacgcggtaggccggcgctggatcgccggcggccatcgcggcaacgtggtgtcgatcacggtgacctgggtgcgcaacggctcgccctatgtggtgccgtcggcgatgagcaaatcggcgatccatgccatgaccatgtcgctcgcggtcgaatggggccgtcacggcattcgtctcaacaccatcgcgcccggcgagattccgaccgagggcatgagcaagcgcatcaagcccggtgacgaggccggcgcccgcaccaaggcaatgaacccgatgggccgcgtcggcaccatggaggaattgcagaacctcgcggtgttcctgatctccggcggctgcgactggatcaacggcgagaccatcgccatggacggcgcgcaggcgctcgcgatgggcggcaatttctaccagctccgcgactggagcgacgacgactggaccaaggcgcgggagtcgatcaaggcccagaacgagaaggatcgcgcggcgcgagggtaaggcccgcgttcttgctgcaatcaccgccgtcgtcccggcgaaagccgggacccataaccaccgttgcgcgtcgtgaagctcgctgcggccctagcgtcgcgccacattaacattcgtggttatgggtcccggctttcgccgggacgacggtgtggacgcgtcctgcaccatcccccgtattgtttttcccgcgcgatgcagccacactccgcgccaacaaaaaacatcacgggggaaacatgtccaacgcgccgaaactgagcaaccttgccgacatggtgcgcgaccgcgcgaagagccgcggcgatgcgctggcctatgagttcgagggccggcagacctctttcgccgaattcgacgtcaagaccaaccgcgtcgccaacgcgctgattgcgatgggcatcaagaagggcgagcgcatcgcctatctcggcaagaacagcgacttctattttgaattgctgatgggtgcgatgaaggccggcgtggtgatggcgccggtgaactggcgcctcgcgggccccgaggtcgctttcatcgtcgacgactgcaaggcgccggtgctgttcgtcggccccgaattcatcacccaggcgcgcaacatcaaggacaagctgccgagcgttcgcagcatcatcacgaccgagggcggcgcgccggaatggcctgacttcgtcgcctggcgcgacgcgcagagcggcgacgatccgcgcgtcgtgatcgagccgagggacatcgcaatccagctctacacctccggcacgaccggcaagccgaaaggcgcgatgctgtcgcacgccaacttcctcaacctcgtgcagagcggcaacgaagccgacaagcccgactggaacaaatggaccaccgacgacgtctcgctggtcgcgatgccgatcttccacatcggcggctccggctggggtgtgatggggctgtaccacggcgcccgcggcgtgatcgcgcgcgagttcgacccgaccaaggtgctcgacttcttcgagcagtccgggatcacgaaactgttcatggtgccggcggcgatgcagttcgtggtgcggcagccgcgcgcgcgacaggtcgatttctcacgcctgaaatacatgctctacggcgcttcgccgatcccggcggcgctgctgaaggagtgcatcgaggtcttcaaatgcggcttcgtgcagatgtacggcatgaccgagaccaccggcaccatcgtcgcactaccgcccgaagaccatgtcgaagggctcgagcggatgcgctcggccggcaaggcggtggccggcgtcgagctcgcgattctcgacgagaacggcaagccgctgccgccgcgcgaagtcggcgagatagccacccgctccggctccaacatgaccggctactggaatctgcccgaggccaccgcgaagacgatcgacggcgacggctggctgcgcaccggcgatgccggctacatggacgaggatggttatctctacatccacgaccgcatcaaggacatgatcatctccggcggcgagaacatctatccggccgaggtcgagagcgcgctgtgcgatcatcctgatgtcgccgaagccgccgtgatcggcattcccgacgacaaatggggcgaggcggtgaaggccgtcgtggtgatgaagccgggcaagagcgcgaccgcgaccgacatcatcaacttcacccgcgagcgcatcgccggctacaagacgccgaaatcggtcgacttcatcccggcgctgccgcgcaacccgtcgggcaagatcctgcggcgcagcctgcgtgaaccgtattgggcgggcaaggaccggcaggtgaattagcccacactgtcgtcccggccaagcgaagcgcgagccgggacccataaccaccgctgtccgttgcggcataatgctggggccacagcttaccgcatcaacgacctctcttggttgtgggtccctgctttcgcaaggacgacggcggagagagtcatcacgccttcttcttcctccccccgcaacacccgcccgcgctcctgcgcctcctccgcccaggctcagtgcttgctggctcccatgtagccgaacaggaagcccgccaccttgcgcttctggatctcctcgctgccttcggtgatgcgatagcggcgatggtggcggtagatgtgctcgaacggcttgtggcgcgaatagcccatgccgccatgcacctgcatcgcgcggtcggcggcctcacagcacagccggtttgcccagaaattgcacatcgagacccggtccgacagcgtgtgctcgacctgggcctgggtcagctgatccatctcccatgcggtcttgcggatcaaaagcctgagcatctcggcctgagtcgcaagctcgaccagcggccactgaatcgcctggttctcggccagcgccttgccgaacggttttcgctcacgcgcgtacttcacgctctcgttgatgcaatagaccgcagcgcccagcgagcttgccgcctggcggatgcggttctcatggacaaagcattgcgccagcgacaggccgcggccgacctcgccgaactgcgcatcctcaggcacgaacacgtcggtgaagctgacccgcgggtgatcggtcggcatgttgaaggtccacatatactcctcgaccttcacgcccggcgacttcgccggcaccaggaagcagctgatgccgcgggcgtcgccgtcattgcccgaggtgcgggcgaacagcgcgcagtgcgtggcgacatgcatgcccgtcgtccacatcttctcgccgttgatgatccagcccttgacgttgtcgcgcgtggcctggaccgccttggtctccatatgcgtcgcatccgagccgtggtccggctccgtcagaccgaacgtgatgcggtacttgccggtgatcgagccgtcgatcatcgccttctgctcgtcggtgccgtagcggtcgagcatggtgacgatcggcaggttgccgacgatcgaatgctcgttctgcagatcgttgtgcaggccaagccccttcgaggcgaaatgctcgcggatcacggccatccagagattggagccgtccttgccgccgtaacgcttcgggatcgcaaagcgcagatggccggcggcgtcggccaggttcttgaccttgcgcagcaacagctcccattcatggcgcggcaggccgcccttgtcgaaatcggtgcgcgcccattcgcggcgatgatcgaagaagcggatgttgtcgtcagccgcttccagcggcttgatctcgcgttcgatgaattggtcgagctcggcgagataggctgtcaggtcagccggcaggttgaaatccaaggcggtctctcccgaagatattgttgattctggttttgcgtttaggcgctactgcgcatccgcgttcggatcgattaaggtgagaagcgcgcggccaagtcaagcagtcgagtgaggcttgcacgcgcggtcgccttgcgcaattggatggcatggaacggcacgcaggcgctaggatatcgcccatattcttcgccgcagaaaatcgacgggagcaaacatggatctgaaattctccaaggtgacgcgcaagggtcccatcaccatcgtgacgctgtcgcggcccgaggtttacaatgcgctgcatatcgacgcgcatttcgagctcaacaaggtgttcgacgagttctccgccgatcccgagcagtgggtcgcgatcgtcaccggcgccggcgaaaaggcgttctgcgccggcaacgacctgaaatggcaggccgccggcggcaagcgcggctgggacaagggcggcttcgccggcctcaccagccgtttcgactgcgacaagccgatcatcgccgcggtcaacggcgtcgcgatgggcggcgggttcgagatcgcgctggcctgcgacctgatcatcgccgcagagaatgcgaccttcgccttgcccgagccgcgcgtcggcctcgctgcgctcgccggcggcgtgcaccggctgccgcgccagatcggcctgaagcgcgccatgggcatgatcctgaccgcgcgccatgtcagcgccaaggagggcctcgagctcggcttcgtcaacgaggtggtgccgcagggcgaggcgctcgccgccgccgagcgctgggccgagaccatcaccaagaactcgccgatgtcgatccgcgcctccaagcaggcgatccagaagggcctcgaagtctcgctcgaacaggcgatcgccgagcagcgcgaatatcccgcggtgaaggcgatggccgcctcgcaggattacatcgagggcccgaaggcattctcggagaagcgtccgccgaagtggctggggcggtagctgctccctccactcgtcgtcccggcgaaggccgggacccatacgccgcagccagtgttgtgaacgggatcgtcgttccggcagtgcgagacaaccggaatttgtggttatgggtcccggccttcgccgggacgacgtcggatacattgcggccaattgagcgcagcgatacccatcctacgtttcgagttccctcttgtaggacgcgtagttcggctgatcgacggcgagcttgtccatcgtggtctgccagagatgttctgtcagccctggcgttgtcagatcgacctcgccgctggcgatcttctccgatagcgcgcggttcagctccatcagcgtgccgtcggcgccgagcagttgcttcaaccgcgcagcctcggtcgcatcgcctgcctcggcgagcgcgagctgccgcgtcaccaggtccagcgcattgatcccgacgcgcagcttgaagctgttgtggcccttgatgacaggcgcgatctcgttgcgcaggaaatcggcaacggccttgatcagttcggtgggtgtcggttcgtcctgcatctcaacgacctctcggtgcgagtagcctcagcagatcgatctcggtctccgatgcgcggcgcccgatcatcgcgcgctccatcgagtgatcggggccggagcggaagcgctgcatcatgccgcagcacatcacgccccagcgcagcgtgcccatcacttcccagaacatcacgcggtccggatcggccttgcgaccggcctcctcgtagcccgcgaacagatcctcgcgcgtgccaaaaccgccgactggcttgtcgatctcgccgaagcgccaggaattgacgcagatccagccgagatcttccatcgggtcgccgaaatgcgcgagctcccagtcgaggaccgcacgtaccccgtcgggggcgatgatcaggttgccgtggcgaaaatcgccatgcaccagcgtcacctcggacgacgggccgggatcgtgatcgcgcagccagcgcagcgccagctcgaacaccggccgcggccagttgaagctgcgatactcgcgggagagatcctcgatctccttggtcgccgtcaggctgcgcagcttcggcagtctcgcctgcggcaggccatggatgccggcgatgacgcggccgagctggcgcgccaggatcggccgcgcggccgcatattcctcgtcgcgcaaaattttccgcgcgatggtttcgccttcgacccgcgccatgatgaagccgcggccaaggccgtcctccggcctcaagacgtgcatcaccttcggcgacggcaggcccgcgtcatgcgcgagctgcatcagcatggcctcggcatcgaggccggcggcgcggccgggcgcggcgccgtagcccggcggcgcgcggcgcaggatcgcgccgatcgtgccgtccggatgcacgatgtcgaacgtccaggtctcctggctggcgccgccggagagctttgccgcgccggtgacgccggtcgcgccgggatgaaacgtggcgacgcagcggctgagttcggtctcgatcatttgcccttgaacttcgccggccgcttctcgaggaacgcggtgacaccttccttgaaatcctcggcgcggcccgcgatccgctgcgactcgcattccagattgagctgatcctcgagggtgttttccgggctgtcccaatagagcttgcggatcagcgacagcgcgatcgtcgggccgttggcgagatcgtgcgcgagcttcatggtctcctccatcagcgcggcgtcgtcatagacgcggttgacgaggccccattccaacgccttctcggccggcagccgctcgccgagcagcgacagctcgaccgaacgcgccttgccgatcagccgcggcagcagccaggtcgaaccgcaatccggcaccaggccgatgcggcggaacgcctgcaggaaataggacgagcgcgcgcacaggatcagatcgcccatcaatgcaaaactcatcccggcgccggcggccggtccgttcaccgccgtcacgatcggacagtgcagcttacgcaatcggcgcaggaacggatggaacgcggtctccagcgccgcgccggcgttgctccggccgggcttagcctgcgtgttgcggccctgcagattggcgccggtgcagaaggcgcggccggcgccggtgatgaccaggcagcgcacctcgtcgcgcttgtcgtcgatcgcatcgagcgcctcggcaaggccgcccagcatgtcgatcgagaccgcgttcatgacttcctgatggtcgagtttgaggatcgcgaccgatccgtcgaagtcgagcgtgacgtgcttgaactgcatggtttcctctttacgttgttgcggccgttggtaccgcggcaggtcgatgtttcgacccatatttgatttttgtgccgggcttgtccatggtcgacggcaagcccatccgtgaacgcgtgattagcgcgcaccaaaccaaatggaaaccccaatgagtggcatcttcgatctcaccggccgcgtcgctgtcatcaccggcggcaatggcggcatcggcctcggcatcgcgcaggcactcaacgccgcgggctgcaacgtcgcgatctggggccgcaacgcggaaaaaaacgccaacgccgcaacgtcgatgaaggccggcccaggcaaggtcgcaacccaattctgcgacgtcagcgatcccggctcggtcaagaccgcgatgaaggcaaccctcgacaccttcggccgcgtcgacggctgcttcgccaatgccggcatcggtggcggcggacgccgctccttcatcgaccgcaccgaggaggaatggcgacggatgttcgcgaccaatctcgacggcgtgttccacgtattccaggctgcggcacgccacatgaccgagcggtccgaggccggcgacaagttcggccggctggtcgcgacctcgagcctcgcctcgctgttcggcactgcgcgcaacgagcactatgcgggcaccaaggccgcgttgaacgcgctgtgccgcgcgctcggcgtcgagctcgcccgccacggcgtcaccgcgaacgcgatcctgcccggctggatcaagagcgacatgaccgccggcatcatggccaacgacaagttcgtcgccaacgtgatgccgcgcatcccggtgcgccgcttcggcgagccgagcgatttcggcggcatcgccgtgtatctgatgagcaaggcgtcgtcctatcatacggcggattgcttcgtgatcgacggcgggtacaccgcgttctgagttttcgcggcggcatctccaactgtcgtcccggcgaaggccgggacccataaccacaggttttcttgtgggagtgagttgtggccccagcgtcgcgtaacaattcgcattcgtggtaatgggtcccggccttcgccgggacgacgctgaattgttgcaccgtctgtgaaacatacatccacatcatcgatgcgcgactcagcgtcgcttccgtcgcggcaaaactgctgctaagcgttcgagccgtaaggacgcacagggcggctttcataaccaagagggaggatatttcggatgttttcacacgtgatggttggcaccaacgatctggacaaggccaaggcgttctatgatgcgctgcttggcacgctcgatgtccggccggcccggctcgacggccaccgcatcatgtacctcaccaaggccggcattttcatggtgtccaagccgatcgacggcgaaccggcgacgcatgccaatggcggcacgatcggctttgcctgctcttcgccggagcaggtcgaggcctggcacgccgccggcgtcgccaacggcggcaagccgatcgaggatccgccgggcgtgcgcgagggtaacggcatcaagctctatctcgcctatctgcgcgatctcgacggcaacaagatctgcgcgatgcaccggttgccctgacgatcaatccagcgtcgcgagcggcggcgttcaaacaacgtttgaaacgccgtcgctaaattccgcgatgcggtagcgatcctgcgaaaatcggtgctcgcgcttcgcgccgcacgcgtctattgtccgccgcgaaacgcgccttcgcgagggagaaacgacaatgaaacatgcctatgtgccgcgcaccacgaactacacgctcaatccgggcgacgagctcaacgatctcaggatgtcggacaaggtccgaccgctctacgaccatgtgaagcagttcatccgcgacaccgtcgacccgatgtcggtcgagttctatcgcgccggcgagaagaagaccaaccgctggagcttcaccgacgagcagctcgcgatcctgcagaaggccaaggacaaggccaaggaagtcggcctctggaacttcttcctgcccgacgccgagaccggcgaaggcctcaacaacctcgactacgcctatatcgccgccgagctcggcaagagcccgctggcctccgagaccatgaactgctcggcgcccgacaccggcaacatggaagtgctggagcgcgtcggcaccaaggcgcagaaggagaagtggctgaagccgctgctcaacggcgagatccgctcggcctatgcgatgaccgagccgaacgtcgcctcctccgacgccaagaacatctcgaccaccgccaagctggtcggcgacgagtgggtgatcaacggcgagaagtactacatctccggcgccggcgacccgcgctgcaagatcatgatcgtgatggtgaagacgaatcccgatgcggcgcccagcaagcagcagtcgcagatcctggtgccgatcgacacccccggcgtcgagatcctcgggcccatgcacgtgttcggccatgaccatgcgccgcgcggccacatgcatctgcgcttcaacaattgcaaggtgccgaaggagaacatgctgctcggcgaaggccgcggcttcgagatctcgcaggtccgcctcggaccgggtcgtatccatcactgcatgcgcaccatcggcaaggccgagaaggcgctcgacatgatggtgcagcgcggcctgacccgcgaagcgttcggcaagaagatcgcccatctcggcggcaacatgcagatcatcgcccaggcgcgctgcgagatcgaggcgatgcggctgatggtgctgaaggcggccaaggcgatggacgtgctcggcaacaaggaagcccgcgtctgggtctcgatggtcaaggccatggtgcccgagcgcgcctgcaaggtgatcgaccaggcgattcagatgcacggcgccaccggcatctcgcagtggtcgccgctcggcgagatgtaccaggacgtccgccacctccgcttcgccgacggtccggacgaagtacactggatggtggtcggccgccacgagctgagcatgacgtagttcctctcccccttctccccgcgcgcggggagaaggtcgggatgagggggagtctccgcgcggacagtgagagacgggactcgcggagagtccccctcacccggaattcaagctacgcttgaattccgacctctccccgcaagcggggcgaggcaagcaagcgagagctcccatggaatattccgcaagcgacctcacccaacgcgaacgctacaaggtgctgacctccttcgtgctgccgcggccgatagcctgggtcacgagcctcgggccggacggcgtggtcaatgcggcgccgttctcgttcttcaacgtgttctgcgaagacccgccgctctgcatgttcgcggtcaatcgccggccggatggccgtgagaaggacacgatggtcaacatccagcgcctgggtgaattcgtggtcaacctgaccgatgaaccgctggcgcgcgcgatgcacgagagctcgggcgacttcccgcccgagatcggcgagccagactacctcggcctcaagctcgcgccgtccagcaagatcgcggtgcccaggctcgcggacgcgccgtttgcgatggagtgcaggacctggaagctgatcgacgtcaacggcgaccgcgagctgatcatgggcgaaggcatccacttccacatccgcgacgaattgtgggatcgtgatgccatgcgcgtgcacatggagcgctatcacccgatcggccgcatgttcgccgaccgctactgccgcaccgacgaccgcatggtgtttcccgcggccgagggcgcaaagacgaaataggagagaccgcgatgactgaagcattccgcgacaacgctgcgcagagccggttcgagctcgcagtcgacggccacaccgccttcgtggtctaccgcaagacgccggatacgatcacgctcgtccacaccgaagtgccgccggagctcggcggccgcggcatcggctccaagctcgcccgcgccacgctcgatgccgtacgcgcgcagaagatcaagctcgtcgtgaaatgcgagttcatccagggcttcatgaagaagaacccggagtatgatgatttgctggggtgatgcatggtgaggagcgcggaacgcgttcctcataacggatcatcgtcattgcgagccacccggtcggcgcgaagcgccgccggatgacaggcttcgcgaagcaatccaccgcgccgcatacgcggaagaatggattgcttcgtcgcttcgctcctcgcaatgacgacggtgaaagcttcagaatctctcaggatgacgggtcaaatcgatcgcgcagactacgacgccgcctgctcgctgatcttgtcctgcgtcctggtctcgaaatcgctggcgtcatggcgctcgtggagctggctcgacggctcgccccaggtgcggttgaccatgcggccgcgcttcaccgcgggccgtgccgcgatcgcgtcggtccagcgctgcacgttcttgtagtcctgcaccgagaggaattcgccgccgccgtaaagcaggcccttggcgagcccgccataccagggccacaccgccatgtcggcgatggtgtagacgtcgcctgcgagatattcgttgtcggcaagcctgcggtccagcacgtcgagctggcgcttcacctccatcgcaaagcggtcgatggcgtattcgatcttggtcggcgcataggcatagaaatgcccgaagccgccgccgagatagggcgccgagcccatctgccagaacagccaggagaaggtttcggcgcgggtcttgacgtcggtcggcaggaaggcgccgaacttctccgcaaggtagaccaggatcgagcccgactcgaacacccggatcggctcgggcccactgcgatccatcagcgccggaatcttggagttcggattgaccgcgacgaagccgctgccgaactggttgccgtcgatcttgatcagccaggcgtcgtactccgcgcctgtgtgacccgccgcgagcagctcttccagcatcacggtgaccttgacgccgttcggcgtcgccagcgaatagagttgcagcggatgccggccgaccggcagctccttgtcgtgggtaggacccgcgatcggccggttgatgctggcgaagcgcccgccgctctccttgttccaggtccagactttcggcggctcgtaggcagaggtgtcggtcacgtcggtggctcccggtttccaattttccatggcgcggcaaccgccgtgcccatccacatatccgcactagatggtgggcaaacttcgctttgcccaccccggcagatcgcattttctatccagcggaatgcgctgcgagcgatgcagccaagcgacgcctgcacgcaagtcgccgcagccgaaacccgcttggcttcgttgaccgtgatgcgctagcgttgcaggggctgatgccaacaagcacaaaaagcggccatcgggagaaaaccaacccatgaaatcaccgatctgcgacatgctggggatcgaatttcccctgctcgctttcagccattgccgtgacgtggtggcggcggtcagccgcgccggcggcttcggcgtgttcggcgcgacccggtatctgccggaaacgctggagcaggaattgaaatggatcgacgatcatgtcgacggcaagccctatggcatcgacgtgctgatccccgagaatatctcgacggccggcgagaagaacgtcacctggaagagcctcgagaagcgcgtttcccaggagcatcgcgacttcacccgcaatctgctgaagaaatacaacatcgagctcacggcgcagagcgtcgccgacaaccagccgcagccgttcgatgccaagactgcgctgcaattgctcgaggtctcgttccgccatccgatcaggctgatcgccaacgcgcttggcgtgccaccgcgggcgatgatcgagatgggccgccagcacaacgtgccggtcgcagccctggtcggctccaaggaacacgcgctgcgccaggtcgcggccggcgtcgacatcctggtcgcccagggcaccgaggccggcggccattgcggcgaggtctcgaccatggtgctggtgcccgaggtgatcaaggcggtcagaaagatccgcgacgtgccggtgctcgccgccggcggcatcatgaccggcagccagatggcggcctgcatggcaatgggcgcagccggcgcctggacgggctcggtgtggcttgccacggttgagtcggagacctctgaaatcttccgcgagaagatgatcgcggcctcctcgcgcgacgcgatccgctccaagggccggaccggcaagcccgcgcggcaactccgttcggtctggaccgacgcctgggaccgctcgccggacagccccggcgcgctgccgatgccgctgcaaagcatcatcagccgcgacgctttcaacgcgatcgaccgcgccgccgcggccggcaacgagaaggcccgcgatctcgtcagctacttcgtcggccagggcgtcggcctggtcgacagcgtgaagtccgccggtgccgtggtgcaggagttcaaggaagatttcgtcgaagccgtcgagcacatgaacgcgctggtggcggagtgataccccctccccgtcattgcgagcgaagcgaagcaatccattgcaccgcgtatgcggatagatggattgcttcgtcgcttcgctcctcgcaatgacgcctcaaacaaacatcgattccaatatcgcagagtgaagcaacaagaatgtcgaacagcatccccgaagaccgcattcccgtcatcgtcggcgtcggcgagatcgtcgaccgtccgaaggatatcgcggccggcctcgagcccctcaccttgctcgaggaagcgctgaagcgcgccgaggccgacagcggcgcaaaactgctcgccgacctgcagtcgctcgacgtcgtcaacttcctgagctggcgctaccgcgatccggagaagcagctggcacagcggctcggcattgcgccggcgcatctctattatggcccggtcggcggcgagagcccgatccgctatctgcacgaggccgcgcagcgcatcgcccgcggcgaatgcagcgtggcggcagtttgcggcgccgaggcgcaatcgaccgcgaccaaggcgcagcgcgcgggcgtcgaattgccgtggacgccgttcgcgcatgacgtcgaggagccgaagcgcggcgccgcattccagaaaccgatggcggtgacgctcggtgtgttcaggccgatcacggtctatccgctctatgagagcgcgacctctgcgcattggggccagacgccgcgcgaggcgctgaaggaatccggcgagctgtggtcgacctatgcgcgggtcgccgccgacaatccgaactcctggctgaaaaagcgcttcaccggcgacgagatcacgaccgcgacgcccgacaaccggatgatcgcctggccgtataccaagctgatggtggcgaacccgaccgtgaacatgggcggcgcgctgatcctgaccagccttgccaaggcgcgcgccgccggcgtgcccgagcacaagctgatctatccgctcggcggcgcctcggcggaggagccgcgcgactacctgacccgcgaccagttcgtcgagagccacgcgcagaccgcggtgctgaaggcggtgatggacctcgtcggcggcgatggcaaaaagttcgatgcgatcgagctctatagctgcttcccgtgcgtgccgaagatggcgcgccggacgctgggcttaggtgccgatgtgcagcccaccgtgaccggcgggcttacgttcttcggcgcgccgctcaacacctacatgacgcattcggcctgcgcgatggtgcgcaagctgcgcaacggcggcacgctcggcctgctctacggccagggcggcttcgtcaccaagcaccatggcctcgtgctgtcgcgcgcggcgccgacggccgcgctgaaacaggacacctccgtgcaggcggaggccgacagccatcgccgcaacgtacctgagttcaccgatgaggcaggcggcaagggcaaggtcgaggccttcaccgtgatctaccgcgccaatggcgaggtcgagcatggcgtcaccatgctgcgcaccgaagacggccgccgcaccctcggccgcatcccagcgagcgacaccgcgacgctggcgcatctgcagaatatgaaccgcacgccggtcggcagtatcggcagcatcgtcaccgccggtgacggcatgcttgaatggcgggtgggataggtctccaagctccctcgccccgctcttgcggggagagggttggggtgaggggccgcttccgcgagttctgcacgccgagagacctgtaccccctcacccggatcgcatctaccgatgcgatccgacctctccccgcaagcggggcgaggtaagaaaggacgccctaccccttcacgtcctgcttttccgaggccgtggtcggcttgcccttggcgccggcgccggtgacgcggacatgatcgccgtcggcaagaccgtccggcggggcggtgatgatgcggtcgtcgggcgcgaggcccgaggcgatctcgatctccttgccgaggtcgcggccgatcttcacggtcttgaacagcaccttgtcgtcagggctgacggtcgcgacccgcaggccgctgctgttgaagatcagcgcactggcgggaatgctgagcggcgtggaatcacgctgcaggttcagcttcacgctggcatagcttcccggcatcagctcgccggaggaattgtcgagcccgagctgcatccgcgtcgtgccagaggcgacatcgaccgcctgcgaggaggcttccaccgtcgcctggaagctgcggttcgggtaatccggcaggttcagcgtggccttggcgccgatcttgatcgccggaacgtagttctgcggcacgttgacatagacgcgcagcttggtgatgtcggagaccgtgaacatcgccggaccggagttgccgccggcattgatcagcgcaccgacatcggtgtcgcgcgaggtcaccacgccgtcgaacggcgccgtgatcttcttgtagccggcaagcgcttccagccgctcgacattggcctggcccgccctgaccgcgccgttcttgttggagaggtcggcggtgcgctcgtcgatctcctgggccgagacgaagttcgaggccaccagcgtcttgcgccgggcgagcgtcgcctcggacagcttggccgaggcctgggcgctggcgagatcggcgcgcgcctgcagcaattgctgatcgaggtcgggcgcctcgatctcggcgatcacctggccggccttgacgcgggcgccgatgtcggcgtcccaggtcttcagataacccgacacccgggcatagatcggcgcgcgggaataggcctcgaggcggcccggcaggtcgatcgtggggctcagcgccttggcgttgggcagcgccaccgcgacggtcggaatggcctggtcgtcagtccattccttcagcctggtgtcctgctcctcgcgcgcgcggatcccggtgccgacgatcagtccggcgccgaccagtgcaaccacgccgaatatgcccaatctccggcgggacaccggcgggcgctgttcagtgggctgcatgcggaatctccgatgaggcggcgactttggcgccttgcttcttgtgtaccatactgaataccacgggaacaaacatcagcgtcgcaaaggtggcgaagatcaggccgccgatcacggcacggccgagcggcgcgttctgctcgccgccctcgcccagcccaagcgccatcggcgccatgccgatgatcatcgcgagcgcggtcatcagcaccgggcggaaccggacgaaaccggcctccagcgccgccgcgacgggatcgccgagctcctcatagcgctcgcgggcgaagctgatcaccagcacgctgttggcggtcgcaacgcccatgcacatgatggcgcccgtgagcgccggaaccgacagcgtggtctccgtcgtgaacagcatccagacgatgccggcgagcgctgcgggcagcgccgtgatgatcacgaacgggtccgaccaggactggaagttcacgacgatcaggaagtagatcaagacgaccgcgccgagcaggccgaacaagaggccggtgaaggcggagttcatcgtctgcacctggccgagcagcaccacggacgagcctttcggcacctccttggcggtgtcggcgatgagttggcgcacgtcggtcgcgacgccgccgagatcgcggccctgcgtcgtggcgtagatctgcaccagcgactggatgtcgtattgcgacaccaccgcgctggaggtcgcgcgcttgatgtcggcgatgccgccgaggatcggcgcctgggtattgccggccgcggtgatcggcaaggtctgcagcgcgctcagcgaatcgatctggtactgcggcgtctgcatcacgatcgaataggacacgccgttgtcggggttgaggtagtaggtcggcgcgacctgcgaggagccggcgagattcaccaccagcgaattggtgacgtcgcgctcggtcaggccgacatattgcgcgcgggtgcggtcgacatcgatgttgaaggtcggattgttcggcgactgctggatccgcgcgtcggcgatgccgggaatgcgcttgatcttcgccagcagcttgttggcataggcgtagttgccctcgagattggcgccgcggatctgcagatcgatcggcgccggcgcgccgaagttcaggatctggctgacgatgtcggccggcaggaaggagaagctggtgcccgggaacagccgcggcaactgctcacgcagcgtgcggacatgctgttcggtcggcttgtgaccttccctgagcttgatctggatgtcggcatcctgcggcccgatcacgccggtgttgttgtaggtcaggttgatgctggagatcggcatgccgatgttgtcggtcatggtgtcgatctcgcccgggatcagcttgcggatcgccttctggacatccgccatctggttggcggtctcctcgacgcgggtgccgacctgggtgcggacatgcatcaggatgttgccggcgtcgactgccgggaagaagttgcggccgaggaacggcaccagcaggaacgacacggccaccacggcaaggaagccgccgacgaacaccttgcggtggccgagcgccatcgcaagcaggccatgatagccgccgcggatacgttcgaaccgggcttcgaagccgcgctggaaccagacgaagggattgcgcgacttcggcggcgcgccctcatgatgcacatgcggctgcaacagatagttcgccatcgtcggcaccagggtgcgcgacaggatgaacgaccagatcatcgcgaacatgaccgcttcggccatcggcacgaacaggaagcgcgcgacgccggtgaggaagaacatcggcacgaacacgatgcagatacagagcagcgagacgaaggccggcgtcacgatctggttggcgccgtcgaggatcgactgctcgaccggcttgccctgctcgagatggtagttgatgttctcgatcgtcaccgtggcgtcgtcgaccaggatgccgaccgcgagcgcaaggccgccgagcgtcatgatgttgagcgtctcgccgatcagggacagcatgatgatggcgccgagcaccgacagcgggatcgacaccgcgatgatcacggtcgagcgccagctgccgaggaacaagaggatcatcacgctggtcagcagcgccgcgatcacgccctcgaaggcgacgccggtgatcgcaccgcggacgaacaccgactggtcgccgacgaagccgatcttgagcgcgtccggcagctggtccttgacgtcgatcaccttctgcttgatgccggcgatgatatcgagcgtcgataccgcgccggccttcagcaccatcatcagcaccgagcggttgccgtcgacatggacgatgttggtctgcggcggattgccgtcgcggacggtggcgacgtcgcgcacatagaccatcgcgccgttgacggtcttgatcggcaggtcgccgagctcctcgatcttgagcggcgagttgttcagattgatggtgtattcgaaactgccgatcttctgggtaccaaccggcgtgatcaggttctgcgcggcaagcgcgttggcgacgtcctgccccgacaggccgcgcgcctgcagcgcggtcgaattgaggtcgatctggatctggcgctgcttgccgccatacggatacgggatcgcggccccgggcaccgtgaccagcggcgtgcgcagctggttgatgccgatgtcggcgaggttctgctcggtgaggccgtcccccgagagcgcgacctggatgatcggaaccgtcgaggcgctgtagttcaggatcaagggcggcgtcgcgcccggcggcaattgcttcagcaaggtctgggcgatcgccgtgacctgcgcgttggcggtgcggatatcgacattgggctggaagaagatcttgacgatgccgatgccgttataggagttagcaacgatgtgctcgatgtcgttgaccgtcgtggtcagcgtacgctcgaacggggtcgtgatacggccggacatctggtccggcggcaggccggtgtactgccaggccacgccgatcacggggatgcggatttcgggaaagatgtcggtcggcgtgcggagcgccgccagcggtccgataatcagcagcaggatcgcgagcacgacgaaagtatatggccggctcagcgcgatacgaaccagtgcgatcataaaagcagcattcccgaaatgaagcccgccccgggcagaggaatcgacattgcaaaagccgttccgatagcggccgatttacccgatgccgtgcgaaacgccaacccgcggagccgcggcggccttcacttccttggcatccttcgtgaggccgcggacgcgccggacaaggcgcagccggtcacgatcgcgtcgtcatcaaaaagagacagccctgctgcaaaagcgggctggccgaggatgcggtttcggccgccgcgggctagcgcatcgctgccctgcaaaaatgcaaaacgtggtgagccggtcggcccaccacgcttgtgttcgttgcccgatgcagatcgttcgggccgcgggatcaggccgcgcggacggcgtcgaggaacttgccgacctcgagcttgaggcggttgctgtcacccgagagcgactgtgccgccgacagcacctggctcgaggccgagccggtctcattggcgccgtgctgcacgtcggtgatgttggccgagacctgctgggtgccctgcgccgcctgctgcacgtttcgggatatttcctgcgttgctgcgccctgctcctcgaccgccgccgcgatggtggacgagatctccgacagccgctcgatggtcgaggagatttccttgatggcaccgaccgactcctgggtcgcggtctggatgccggcgatctgctggccgatctccccggtcgccttggcggtctgctcggccagcgccttcacctcggacgccacgaccgcgaaaccgcggccggcctcgccggcgcgcgccgcctcgatggtggcgttcagcgccagcagattggtctggccggcaatcgtgttgatcagctcgacgacgtcgccgatccgcgcagcagccttcgacagctcgctgacgcgatcgttggtggtacgcgcctggccgacggcgtcaccggccatccgcgccgattcctgcacctgacggctgatctcggtcaccgacgacgacagctcttcggtcgccgacgccaccgactgcacgttggtcgaggcctcctcggacgcggccgcgaccgaggtggtcagctcctgcgaacgccttgcggtcgacgacagggtgctcgccgaggcttcgagctgggtcgaggccgacgacacggtctgcacgatctcgccgatcatctgttcgaaattgcgggtgatggtgtcgacccggcggccgcgctcgatcttggcttcggcatcggcagccgcggcttcgtcggccgccttcttggcgaccagggcttccttgaacacctgcaacgtatcggccatggcgccgatctcggtcttctcaccctggtgcggcacgacggcggtgaggtcgccgcggccgagcgcctgcatcgggctgacgatcgaggcaatgcctgccgagatgtcgcgaaccgtgtagaggctgacgccgacgctgatcaggatcgccaagccgaggatcaccgcgaccatcatcagggccgagctgtagttgctcgcggagtcctgggcggccttttcggcaccgacattgttgagctcgatgtccttgttgaggatttcgtccgcctcgaggccgatcttgttcacgaccttggtattgagctcgtgcgcctcatggggaagcttgccggcttccttgcgcgagatggccatcacctcctcggtgcccttcctgtacttgtcccaggtctcggaccactgttggtagagcgcgcgctcctccggagtggcaatcatcggctcgtacttggcgcgggccttcgcgctcatctcgacgacaccggcgagcgtcttttccgccgccagcttctcttcgagcgtttccgagagcatgtgctcgcggatcacgttgcgataggtgatcaccccggcgcgcagctcaccgagcacgcgcacgctcggcaaccaattggtcgtgatgtcgaccgtgctggcgttgatcgcccgcatattccaaactgcaagcaggcccatgcccgtcagcgcgacgagcaggaacgcaaccgcggcaatgatcttggcgcggatcgagaatttggcgaacattatgatgtctctggggtgccgggctcgcgaggcccgttcgtgcgggaagatgactgatggcgctgcgggacgccgcagatatcaaagccagcccccctccttaagtagggttaatttgcttacccgttgaactacggagatacccgtcattgccgtgacatgacgcgcgaaaggcgcatcaagatgcgcgagcggcgcatcagggcatcaatgccaatgcatcggagaagaactccggcccgccgaaattgcccgatttcaaggcaagcaccatctcgccactgccagcaccgaccgcgcgcagaaccggcacgcctgccgcgatttccgccccgaccagaaatcccgggatgcgcaggcgatcgaccacggcgcctgaagtttcaccaccggcgaccaccatcctgtgcacgccggactgcaccagcccttccgcgatgtcggccatggcctgttcgatagcatgtccggctgcatcgcggccatgacgcgattgcagagctgcgacctgatccggggtcgagctgctggcgatcaggaccggccccttgccaagccgctccttggcccaggcgagcgcgcgctgtgcctcgtccttgccggcgatcacccgctccgggtcgaggtgcaacaccggcatcaccttctcggcgccggcgatctgacgcagggtcgcctgcgagcaactgccggcgaggcaggccgccggcccgccgatcgcggccgtggagattgcctctccgacagccgatttggccttgcccgtggcgaccagcgcccgtgccaatccaagcccgatcccggaggcgccgaccgacagacggtgatccagcgccacctgcccgatggtctcgaggtcgcggtcgaacaccgcatcgacaatggcagcgccgatgccgccccgcgcaaggtcggcgagcttcgcccgcacggcctcggcgccgcgggcgagcgtcgccagatccaccaggccgattttggtctggctctggcgcgccagcacgcggaccaggttggaatcatgcatcggattgagcggatggtccttcagcgggctctcgttcagcggcacggagccgacgaacagattgccctgatagacggtgcggccggtttccgggaacgccggcgtcaccagcacgatgctgtccttggaatccgcgcgcagcgcgtccatcaccgggccgatattgccggcgtcggtggaatcgaaggtcgagcagatcttgaacaggacgtgcccggcgccgcggtcgcgtagccaggcctccgcggcacgcgaccgtgtcacggcaagcccggcttcaatcgaacggctcttcagcgacaccacgacggcgtcgacctcgggcagcgcgagatcgtccgccggcacgccgatggtctgcaccgtgcgcaggccggcgcgggtcagcgtattggcgaggtcggaggcgccggtatagtcgtcggcgatgcagccaagggccagcgtcacgatcttgctccggcatagggcttgaaccaggccagaccgtccgtggtcttgccgcgcggattgtattcgcagccgacgaagccgccgtagccgagccggtcgagctcgccgaacaggaacggatagttcagctcctcgtcatcgggctcgttgcgcgaggggatcgaggcgatctggatgtggccgatgatcggcatcatctcgcgcagccgcatcgtgacgtcgccatggatgatctggcagtgatagatgtcgaactgcagcttgaggttcgggattttgagttcacggatcaactcgtacgcgaagttgaagtcgttgaggaaatagcccggcacgttgcgcggattgatcggctcgatcacgacgtcgaggccgtgcggcgcgaagaattccgcagcgtaagcgaccgatttgtagaaggcttcgacggcatgccgatcattgcgatcggcaatccccgccatcagatgcacccgcttgacgccggtcgcctctgcatagggcagcgcggtcttcaggctcgcttgcagatcggcgaagcgatccggcagcgcggcaaatcccttctcgccggcgttccagtcgcccggcggcaggttgaacagcgcctgcgtcagcccggcgcctttcagccgcttgccgacctcctcggccggatggtcgtagggaaacaggaattcgaccgcggtaaagcccgatttcgccgcggcgtcgaagcggtcgaggaacgggacttcgttgaacatcatggtgaggttggcggcaaagcgcggcattgcaggatcctcttatttcgcgccgggaagcttggtgccggtgacctgggcatacatccgcgccaccgacgcatcgtcgtcgcggcccatgccggcggccgccgtcatcagaaacatctgcagcgccgcggccgagaccggcaccgggaaccgcgcattgcgcgccatgtcctggatgatgccgaggtccttgacgaaaatctcgaccgcgctgcgcggcgcatagtcgccgtcgagcacatgcggcatgcggttctcgaacatccaggaattgccggcggaggccgtgatcacctcgtagactttccggatatcgaggccctgcttggcggcaaaggcaatcgcctcggaagcggccgcgatgtgcacgccggccagcagctggttgatcatcttgaatgcggcgccctgcccggcggcatcgccgagttcgtagagctttgccgccatcgcatcaagcgccggccgcgccttcgcgaacgccgccgcactgccggaggcgagaatggtcaactcgccctgcgccgcgcgctgcgcgccgcccgagatcggcgcatcgagataatgccggccggtggcttcgagctgcttggcgagacgccgcgcgatctcgggatccatggtcgccgaggagatgaagacagcgtccttggccagcgtctcggcggcgccgtccttaccgaacaggatggcctcggtctgcgccgcattcacgacgacgctgacgacgatgtcggcatccctggccgcctcggccggcgtcttcgcacccttcccgccatcggccacgaagcgcgcgacggcatcggccgacacgtcgcagccggtcacgacgaagccggcgcgcttgagcgaggtcgccatgccgtatcccatcgaacccagtccgatgacggcgacgtgcagtgttgcggaactggacataaggcgatccctgaggatttttggttgtttgagcattttcggaaaaccggctttcgcctttcccgatcaagcgcgttgctgcttgcctatcacggcttggccgcgctgccaaagcatgagacaaagctgaaaacggatggcggcaaagatgacgccgaaagcgaaacccggatgagcgaaacaaagcttcgtgaagacatctgccgcttcggccgctcgctgttcgagcgcgggctgacgccgggctcgtcgggcaatatcagcgtccggctcgacgacggcggctggctggtgacgccgaccaatgcctcgctcggcttcctcgatccggcgaagatgtcgcggcttgacagtggcggccgcctcgtctccggcgatgcccctaccaaggaagtgccgctgcacaccgcgctctaccagacgcgcacgagcgccggcgccgtggtgcacctgcactcgacccattcggtcgcactgtcgatgctgcccgagatcgatccgcgcgcggtgctgccggcgatgacggcctattacgtcatgaagtgcggccagaccgcgctggtgccctattatcgccccggcgatcccgcggtcgccgacgcgatcagggggcttgccgggcaatattcatcggtgctgctcgccaatcacggccccgtcgtctccggcgacacactggaagcggccgtgttcgcgaccgaggaactcgaagaaaccgccaaactctatctgctgctgcgcgggctcaacccgcgctatctctcgcccgaacaggtggcggatttgaccaaggtgttcgggctgacgttgccggagcatgggcattagctttcgtcgtcctggcgaaggccaggacccattaccccaggatgcagttgcggcgcgacatgcccggacataccacgcaccacacggacgacggtggtaatgggtcctggatcgcgctcgcttggctcgcttgtccaggacgacggagaaactacagccccagatacgccttgcgcacgtccgggttaccgctgatctcggccgcggtgccctgcatcagcacgcggccggtctgcagaatgtaggcgcggtcggcgatctccaaacattcggccatccgctgctcgacgatcaggaccgtcatgccggcgtcgcggatgcgtttcacggcttggaagatctcgtccaccagtttcggcatgatgccctgcgacggctcgtcgagcatcagcagccgcggccgcgtcatcagcgcgcggccgatcgcgagcatctgctgctcgccgccggacaaggtctcggcgcgttgctcgagccgctcgccgagccgcgggaacagattgaacaccagatcgagcggcgcatcgcggtcggactggctgcgatagagatagctgccgagccgcagattgtcgcttaccgaaagccgcggaaacagccggcggttctccggcacgaaggcgatgccgccggccgtgatgacatgctgcggctggccgtcgatgcgcgtgccgtcgaaggtgacggtgccggcgcgcggacgctcggccccggcaatcgatttcaacagcgtcgacttgcccgcgccgttggcgccggcgacgcagacgatctcgcccttggtgacgtcgatcgacaccgaggagatcgcaaccaggccctgataggcggtggtgacttcacgcaccgacagcatgacgatccccgagataggcggaaatgacttccggattgcggacgacttccgcgggcttgccctcgaccagcaccttgccgagattgagcacgatggcgcggtcgaccagcggcatcacgatttccatgacatgctcgaccatcagcacggtgacgccggtggcgcgcaccttgcgcacaagctcgacgccggtctgcgcctcgaccggcgtgagcccagtgaggacttcgtcgagcagcagcagcttcggctcggtcgccagcgcacgcgcgacttcgagccggcgcttctccgacggcacgagatcggccgccagcttgtcggcgcgcgccgcaagaccgcagaactccagcacctcataggctttctgccgcgcgatccgcatcttggtattgcggatcagcgcgccgacgatgacgttgtcgatcaccgtcatggtctcgaagctcttgaccacctggaaggtgcgcccgacgccgcgctggcagcgttccgccgccggcaggcgggtgacgtcctcgccgtcgaagatgatcgagccctgggtcggcggcagcacgcccgcgatcaggttgaacagcgtcgacttgccggcgccgttggggccgatcaggccgacgatctcgccgcgcccgaccgagatcgagacatcgctgttggcgacgaggccgccgaagcgctgccagacgccgcgggtttcgaggagagcggtcatcgcgccgcctccttgcgcccggtgagcatgctgaacacgctgaccagccccttcggcagcgccagcgagatcgcgacgatcagcgcgccgtagacgatcaggtcgacgccgcggccggacccgccgatgaacgagcgcgtcagctcggtgagcgggatcaggatcaccgcacccaggaccgggccccacaaggtgccgatgcccccgagcacggcgggcagcgccatcaacagcgagaactggaagcccatcacgctctcgggatcgatataggagacgaactgggcatagaagctgcccccgaccgcgaccaggaacgccgagacagccgccgcgcccatcttggaattgaacacgaccacgccgaggctttcggctgcgtcgggattgtccttcaccgcgcgccaccaaaaaccccatttggaatcttccagccaccaggtgacgaaccaggcgatgcaggccagcgccagcgcgaaatagaaatacggcagcttcgagcgggcgaactggaatttcagccagctgtcgccgcgcaccgggatgtcgatgccgagggcggcgcccgcccaatcccagttctggatcaaaaccagcgcgatctcggcgatcacgatggtcgcgatcacgaagtaatgcccgcgcaggcggaagcagggatagcccagcgccatcgcgatcacggccgagatcgccccgcccgccagcatgccgaaccacggcagcacgccgaacttggtgaacagcagcgcggtggtataggccccgagcccgaaatacagcgcatggccgagcgaaatctgcccgcaatagccggacaggatgttccagctctgcgacagcgcggcatacatcagggtcaggaccatgatgttctggacgtagacgtccttgacgaacagcggcaccagcgcggcgaccgccgcaaggcaggccgccacgatcaggtcacgcctgcggcgttgggcgaagtgggtgtccatcacatcgatccgaacaggccgcgcgggcggacaaagacgaccagcagatagacggcatagatgccgaccgatttcagcgacggcggcaggatcatcgccgtggtcgcttccaccaggccgacgatgatgccgccggcaaaggcgccgaacacgctgccgaagccgccgagcgccacggtgacgtaggcgatcagcgcaaaggaggcgccgacgtcggggtagatgtagaagaagatcgccatgatggcgccggcaagtccgaccaaggccgcgccgaggccccagccgagcgcgaacacccggttcttgtcgatgccgaccagggcgaccgcaccggcgtcctcgcgcgtcgcctcgagcgcgcggccgaaatcggtgcgattgatgaagaagtagagcgcgacgaaggctgcgatcgacagcatcgcgccgatcagctgcggctccggcaaatagatgccggcaatcgatatcgtcttgccgccgacccaggagttggtgacgctgcggtagtccggcgtaaagaagaactgggccagaccccgcatcacgatcgcgaggccgaaggtagagaagatctgcaccatgccggcattggccttggcgcgcatcgcgaagcggaccaccaacagatagaccaccgcgccgaacacgaacaaggccgcggcaaccagcggcgccgccagcaagggatcgatcgcgaagaacgcgaacaggaagaatgtcgcgtacatcgcgatcatcaggaactcgccgtgagcgaaattcacgacgtccatcaatccgaagatcaatgcgaggccggcggcgatcagtccgtacagcagccccatcaggaggccgctcgccaaactctggataatggtctcggctgtcaccgctgcgtcccggtcaatgtatggccccggtgtcgtcctggcgaaggccaggacccattaccacaaatgcatagggagaaaagacaacagcctatcatcgcaaaacgcctgcctgtggttgcgcgacgagtgcaagcactcgcgcgggggtcccgggtcgcgcttccgccttcgctggcttagcttcggcggacaagtcgcttgcccgggacgacgcgtggagagtggtcgaccggtcagctgttcattggccagatcgcctcggagacggcggcctgttccgggaagatcgtgacgaaattcttcgcggaatattgcagcagcaccggatcggcgaagttgttctgccccatctcgtcgaacttgacccgccgccacggcatgatggtgacatcgccgggcatgtcggtcgcgaccagcgcctcgcggatcttttcgccgtcggtcgacttggcgcggttgacggcatcggccatgatgatgaggcccatgaactggcgcgacgtgtagtcgttgaagtccttgccggacttggcgcggtacatttcgttgatcaaaccgaccatcggccgcttctgcgccaggtcgagcgagaagctgccgcgcgagatcacgccctcgagcttgtcgccgacggcatcataggtcgccttctccgagaagccggcgtcctgcgccatgatgttcttcggcttgtagccgagctccgccatggtcttgaccaagaggatcgagtcggtggtgtagctcgacggcatcagcacgtcggcattggccgccttgagctgctgcacctcggcggtcagcgacggcgagttggcgcgatacttgatgtcggccacgatcttgtagccgcgatcggccgcgagcttggtctgggcgttcgccgaatcggtgccgaagatggtgtcctcgtggaacagcgccagggtctcgatcttctggcccttcttcttcatcgcatcgaagaagtcgaacatcgcagccgagaacatctcgtcatgcggcgaggcgcggaaatagtacttcaggccgcggcggtgcaggctcggcgaggaattgtcggccgagatgaacggaacgccgtagcgctcgcaggtctggctgacggtgacggcgaccgcgctctgataggtgccgacgacggcgcagaccttctcctgggtgatcaggcgctcggtctcggcgcggcccttctgcggatcggcctggtggtcggcgaacaccagcttgaccttggcgccgccgaggccggacaggccctcgcccttggcgagcggcagcgcgaaatcgtagttcttgttgatgatgtcggccgcggtgttgaaggcatgctgcgcatcgacgccgatcgcggcactggagccggacagcggatagatcacgccgatggccacttcgcttgtctgcgcgcgcgcggcgatcggaccgagcgcggcggcggcggtggcacccagcaatacgttacggcgagagatcgtcatcgaaatttccccttcagctttgttcttatcgatgtgacgcttgtagcgcgcagtaaagcctcaatgaattgcacgaattgcctattcagagcacagcgagctgcctgttcctgagatcggtcaccagcatcagccccggcgcatgcgtgatcgcgaacggcagcttcgcagctgcgatcaccgattgcggcgtcacgccacaagcccagaacaccgggatctcgtcatcggccaccggcaccgcatcgccataatcgggcttggtgatatccttgatgccgatcgcatgcggatggccgagatgcaccggcgcgccgtgcaccgacggaaagcgcgacgtgatctgcaccgcgcggatcgcatccgccggcttgaacgggcgcatcgacaccaccatgggtccttcgaacggccccgacggcttgcaggcgatattggtccggtacattggcacacgcaggttgcgctcaatgtgacggatcggcagcccgtcatccagcagcgcctcctcgaacgaataggagcagccgagcacgaaggtgacgaggtcgtcgcgccagtatttggtgatgtcggtcggctcgtccaccacctcgccgtcgcgccagacccggtagcgcggcacgtcggtgcggatgtcgaggtcgaggccgagcgccgggatcctgaaatcgccgacgtcggacatgccgatgatcgggcacggcttcggattgagctggcagaagcggtggaaggcgccggcgagcttctccggcaggatcgcgagattgccctggacgaagccgttggcgagaccggccgtggtcgccgaggccatgccgccacggcaggcgcgccgcgcttcgacgctcgccagccccggttccccttgagatcgctgcactgccgcaaaaacagtcatgggattctcctgcccataatctcgacaaggacaaaccaacaccaagcgtgatataatgtctaatcgtcctttctaatcaaaatcgataattagaatttatcgatcgggaaaatgcttccatgacggacttccgctcgatcgaaaccttcctctgggtcgtcaagctcggcagcttccgcggcgccgcccagcggctcaacaccacccagccggcgatctcccagcgcattgcccagctcgagcgcgagatgggcgtcaaactgctcaaccgcgaccaccgggtggcctcgccgacgccgagcgggcggctgatgctgatctacgcagagaaactgatcggcctgcgctcggagatgatggccgaggtcggcgaccgttcggcgatgcgcggcgcgctgcggctcggtgtcgcggagaccatcgtgcacacttggctgccgcggctggtcaagagcgtcaacgagatctacccgaacctgtcgctggagatcgaggtcgacatcacaccgaacctgacgccgcggctgctggcgcaggagatcgagctcgccttcgtgctcggaccggtctccgcctccggcgcgcacaaccatgtgctgtgcgattatccgatcggcttcctggcgagcccgtcgctcggcctcggcgacggcccggtggcgcggcaggacctggcgcggtttccgatcatcacctttccgcgcaagacccagccctacgagaccgtgcgcgccttgttcaacgcacccgatctgccgccgatccggctgcacgcctcgacctcgctcgcgaccgtgatccacatggccaatgaaggccttggcattgcggtgattccgtcggcaatcgtcgagaacgaattgtccgacgggcgcttgcaactgctcgacaccgacctcaagctgccgccgctcaccttcaccgcgagctggctcgcctcgcccgatgcggtcgccatcgagcgcgtcgcccatctcgcccgacagatcgcacaggcgagcgtggcggttgacgacgcgagagtagcgcgtcattgaacgagtgccggataatcaaaacgtcattccggggcgatgcgtcagcatcgaacccggaatctcgagattccgggttcggctcttcaagccaccccggaatgatagctgaaatggactgacgacatgagccgagccgccaccaacctgcagatcgattccgcccgcctctggggcaccatccacgaaaccgcgcagttcggtgcaacaaagaagggcggcgtgcggcggctgaccttgagcgccgaggacaagcaggtgcgcgactggttccgcaaggcttgcgaggacgccggcctggacgtgcatgtcgatgcgctcggctcgatgttcggcctgcgcaagggccgggacatgtcgaaaccgccgatcggcgtcggctcgcatctcgacacccagccgaccggtggcaaatatgacggcatcctcggcaccctcgccgggctcgaactggtgcgcaccttgaacgatgccgggatcgagaccgagctgccgatctgcatctgcaactggaccaacgaggaaggctcgcgctttgcgccggcgatgatggcctcggccgcctatgtcggcgatttcaccaccgacgacatcctgtcgcgcaaggacgccgagggcgtcacggtggcgcaggcgctggactcgatcggctatcgcggcgacgccccggtcggccgacagaaattctcgggcttcgtcgagctgcatatcgagcagggcccgatcctggaggccgagggcaagaccatcggcgtggtcgattcgggccagggcgtgctgtggtacgatggcaagatcgtgggcttcgagagccatgccggctcgaccccgatgccgctgcgccgcgacgcgctggcgacgctgtcggagatcgtgctggcgatggagagcatcgccaggaaacacggcccgaaggcggtcggcaccatcggcgaggccgtgatcgcatcgccctcgcgcaacgtcatccccggcgagatcgccttcacggtggattgccgcagcgccgatgcagggatcatggatgcgctggaccgcgacctgcgcgccgcggtcgccgagatcgcagcaaagcgcaaggtcgaggtccagctcgacctggtctggcgcaaggcgccgacgcatttcgattcgaaactggtcgacgcggtcgagaatgcggcaacgcagctcggctattcgcatcgccgcatcacctcgggtgccggccatgatgcctgcaacctcaacacggtgatgccggccgcgatggtgttcgtgccctgcaaggacggcatcagccacaacgaactggaagacgccacgcaggccgattgcgccgccggcgccaacgtcctgatgcatacggtgctggcgctcgccggcgtcgcatcctgatcttcatacccccttcgatggaggctttcgtgcgcgcagtgtttgtcgacgccaatgaatcgctcgctgtcatcaccgagcgcctggaaaaacccggcgatcccaagatgcggatcaaccgcaatcccgacatcaagcccgaggactatccggcggtgctcgacggcgccgagatcgcggtggtcgatcacaccgcgttgccgaccgacgttgcgaagaaatgcgccggcctgaagcatgtcgtgttcctcggcaccggcgcgcgcagctacatgaacccggaagagctcgccgacctcggcatcgccgtgcacctgatcaagggctatggcgacaccgcggtcgcggagtccgcgatcgcgctgatgtggtcgtcggcgcgggtgatcgcgcagatggaccgcgagatgcgcgccggcaactggctgcgcgaagacggcatgcagctcaccggcaagacgcttggcctggtcggcttcggcggcatcgcggccgaggtcgcccgcatcgcgcacggcagcggcatgaaggtgatcgcctggaaccgatcgcccaagagccatcccggcgtcgaattcaccgatctcgacacggtgctggcgaccagcgacgtagtctcgctccatctgctcttgaacgacgagacccgcgggatgatcacgcgcgacaagatcgcgaagatgaagcagggcgtggtgctgatcaacaccgcccgcggcgccatcgtcgacgagcaggcgatgatcgatgcgctcaactcaggccacatccgccacgccggcctcgacgtctacaacatcgaaccgctgccgaaggatcatccgctgaccaaaatcccgaacgtgacgctgtcggcgcactccgccttccgcacgccggaggcgagcgagaacctgatccacgcggcatggcagcattgccggcggatcgtgaaggggtgacctctttccttctccccttgtgggagaaggtggcgcggacgaagtccgcgacggatgaggggtctgcatccgcggagagaacccctcacccggcttcgatgcttccgcatcgaagccaccctctcccacaaggggagagggcgaaagcccctaatccaccatctccgcgacggccttgccgcacgccgtggtgtcggcattgccgccgagatcgcgcgtgcgcagcgtgcgttcgccgagcgtgcgttcgatcgcgccgacgatggcatccgcggcctgcttctcgccgaggtgctccagcatcattgcgcccgaccagatcatgccgatcgggttggcgatgccctgccccgcgatatcaggcgccgagccgtgcaccggctcgaacaccgaggggaaatcgccttccggattgatgttgcccgacggcgcgatgccgatggtgccggtgcaggccgggccgaggtcggagaggatgtccccgaacaggttggagccgaccacgacgtcgaaccaatccggatgcagcacgaagttcgcggtcaggatgtcgatgtggtacttgtcccacttcacgccgggatacttcttggccatcgcctccacgcgctcgtcccaatagggcatggtgatggagatgccgttcgacttggtcgccgaggtcaggtgcttcttcggccgcgactgcgcgagatcaaaggcgaacttcaggatgcggtcgacgccgatgcgtgtcatcacggtctgctgggtgacgaattcgcggtcggtatccgggaacatgcgaccgccgaccgaggagtattcaccctcggtgttctcgcgcaccacccagaaatcgatgtcgccgggcttgcggttcgccagcggcgacggcacgccaggcatcagccgcaccgggcgcaaattgacgtactggtcgaactcgcggcggaacttgatcagcgagccccacagcgagatgtggtccgggattttggccggccaaccgaccgcgccgaaatagatcgcgtcgtgcttgccgatcttgtccttccagtcggccggcatcatctcgccgtgcttctcgtaatagtcgtaggaggcgaaatcgaaatgatcgaacttgacgtcgacgccgtgctttttcgccgccgcctcgatcacgcgcaggccctccggcatcacttccttgccgatgccgtcgccggggatgaccgcaatccggtactgcttcttgctgctcatcgagaacacccttgtgatttgcccggccggcaatgccgcctatcctgatcgccctgcaatggaccaaacttcgcgcgagcgcaacgctgcagtgcagtgttgaccgcggcgcgaccctgcccaccaatttcgccgacacccactcctcaacccaaagcgagacatcccatggatctgcatctgcgcggcaagcgtgtcctgatcaccggcgcctccaagggcattggcgcggccgccgccgaagcctttgccgaggaaggcgccaatctgctgctcgccgcccgcaacggcgaccagctcaaggcgctcgccgagcggctgcgttccgcgcaccagatcgacgccgcgatcagcgtggtggacctgcgcaagcctgaggacctcgcgcggctggccaaggaggccgccgatatcgatatcctggtcaacaatgccggcgacatcccgggcggctcgatcgacaagatcgacgaggcgacctggcggcatgcctgggagctcaaggtgttcggctacatcaatctgacgcgcgcggtctacgcccggatgaaggcgcgcggcggcggcgtgatcgtcaacgacatcggcgcggccggcgagaagttcgacgccaattacatctgcggcagcgccggcaatgcggcgctgatgtcgttcacccgcgcgctcggcggcaagagcctcgccgacaatatccgcgtggtcggcatcaaccccggccccgtcggcaccgaccgccacgtcaccctgctcaagacccgcgccaagaaccagttcggcgacgagaaccgctacaaggaattccagaaggggctaccgctcggccgtcccgcgcatgcacgcgagatcggcgacctgatggcgttcctcgcctctgatcgcgcgggctacacgtcaggcgtgatctacacggtcgatggcgggctgacgtcggggtggggttagcagcgcagcctgctcggtcgtcatcctggggagcctgcgaagcaggcgtctcgaaggatgcgccacgggccacgtcgtccttcgaggctcgcaagagctcactcctgcagcgacaaaggcaaggcctttgcgcggggatgacgtgggttaaggaggccgtttgcaacctcggcggtttccactttccgacaaaatggactacagcatcacgaacagaagacttccagcaaacggagacaggcacatggctgatcagggcttggtgaaggaaacggcgtgtgccgtcgtcgacaaactgaaagccggtgacgtcacgccgctcgatctgctggacgtgctggaaaggcgcatcgccgaggtcgacggcaaggtcaacgcgctgccaacactgtgcttcgaccgcgcccgcgcccatgccaaggccctgatgcagaagccggccggcgaacgcggcctgctcgcgggccttcccgttccgatcaaggacctcaccgccgtctccggcgtgctgaccacgctgggctcgccgatcttcaaggacaacgtcccggcgaaatccgacatcctggtcgagcgtctcgaacagaacggcggcgtgatctacgccaagtcgaacacgccggaattcggcgccggtgccaacaccttcaatgaagtgttcggcccgacccgcaatccctgggacacgtcgcgctcggcggccggctcctccggcggcgccgctgcggcgctcgccagcggcaccgcgtggctcgcgcacggctccgacatgggcggcagcctgcgcaacccggcgagcttctgcggcgtcgtcggcttgcggccctcgatcggccgcgtcgcgcacaccccgaaattcggcatcgaccgcaccctcggcgtgcaggggccgatggcgcgcaatgtcgaggatctggcgttgctgctcgacgcgatgagcggcgagcatgccgccgatccgctgtcgctgccggcgctgtcgacgtccttcctgtcggccacgcgttcgggcaacaagccgacgcgcatcgcctattcgcccgatctcggcatcacgcccgtcgatccggaggtcaaggccgtgacgcgcaaggcagcggagcggttcgcagaagccggcgcgatcgtcgaggaggcccatcccgatctgcgcgaggcccatgaatgcttccacgtgctgcgcgcgttcgatttcgcgatcagcaaggccgaattgctgcgaaccaagcgcgatttgctgaagcctgaggtgatctggaacatcgaagcggggctgaagctcaccgtcgagaagctcgagcgcgccgaggcccagcgcgtcgcgatgacgcagcgtgcgctcgaattcttcgagacctacgatctgctgctggcacccgcgaccatcgtgccgccattcccggtcgagcaccgctatgtggccgagtgcgacggcaagacattcgacaattacgtcgaatggctcggcatcgtctatgcgatcacgctggcctgctgcccggcgctgtcgctgccctgcggcttcaccgcatcgggcctgccggtcggcctgcagatggtggccaagccgcgcgccgaggcgcagcttctggccggcgcgaaagtgctggaggatattttgggcgtgcgcggcaccaccccgatcgatccgcggccgccgcgataaggcggcctacgcctggtcttccgtcgcctgcaacgcgaccgacagcgcgagcttggtctgctcgacgatctcgtccatcagctcctcgcggctgatctggccgacttcgccggtgagcaggccctgctcggcaagcatcacgatgccgtgcaacccggcccagatcttcagcgcctgccgctcgcgcaacagccccaccgccggagcctcgaacgactcgatcagcagcgccaaggtttccatcgcggcaacgtgcagctcgctgccgaccggcgcgcaggccatggttctggacgcgaacatcaaccggtagatgccatggcgctcgagcccgaaggccagcgcagcctgcgcaaagcgtgacagtttcgagcctttgccgggctgctcgatcgccgcacgcatgatcacgttgaactgccggaacgcttccgcggtgaccgcctgcagcagcgcctcacggtcggcgaagtgccggtacggcgccggctgcgagacgccgagctgcttggccagcgccttgatgctgattgcttcgggaccaccgagctcgacctcgcgcagcgccgcctgaatcagcgcttcgcggaggtcgccatggtggtaggtcttgaatggcttgcgaacgatttgtcccattgcggcaaatgatcgtgggctgcgaagtgagtgttggcaaggacagggtagcgaaatcaaagacttacgtcactcacttattttgagaatacgaagccgattcgcgaagctgcccgggctgcctccagcaagatttgccgtggctctgaatggatcttgcgcccaaaacatcggcgactgtgcgatccgccccgcctttctctgtagcagtttcggatgttgccggcttcgcttgctgatccaggtgatggatgtcgcaaacagggtgagcgccgcgatccccgcagcgctcaccacgaactgcgccgcgatgccgtcggacaccttgatgagatacagattcgccaggagggagagcacgacggccgcacaataggtttcgagcgaacgctcgccgcaacgaattgcgcctttcgggccggtcaagccaaatccgcgccaattcgtcggcacgaacctcgccacacgatggcgatcgccaggaaatgcagcagccgcaacgggtccagattcggcttgtcgatcggatagatcaaccgctcgatgctgccgggaatcgcggccgccagtggagcgatctcccagcttcgcagcagcgtatgcgcgacgactgaagcccacccgtcgcgacggctgacatcgctgtagctcagtgcacaggtcacgccggatacgaacatgaagacttcggtcgcatcgctgaagccatagtggcgcagggtcaaccagctgaaggcgttgctgggaatgtgatcgaggaagacgcaccagagtgcaagacctcggcacagatccagccggagatcgcggtccagcgccgcactgtcgcgcctcccctgataaagggtcagcgatgcggaatgctggcgggaattcccgccggtcgagcgaccggtcatacggtcagaaagcattggactgttaccagccctcctcgagctgcccctcgggggcaattacgtctctcatcactggcatgtcagcggaatgcacgaccgtccggttgataaatatcaacaacgctcatcctttccgggatttagctcaacgtgactagctcgagccggaggatctacgccgtgcgcgtaagggagatcatgtcacggaacgtcatcacgatcgatgccgatgcaccggtgagcgacgccatcaggacgatgctgtcccaccacatcggtggccttcccgtcaccgatcggaatggcacgctcatcggcatgctgtcggacggagatttcattcggcgcgtcgaacttggaacggagaagcgtcgcggccgctggctggccgtgctcgcaggcacgagccaagtcgcactcgacttcgcccgccagcatggccgcaaggttaatgagatcatgtcgcccgatccgatcaccgtcgacgagaacatgccgcttgagcaagtcgttcaactcatggaatcgcacggcgtcacgcggtttccggtcatgcgcgacaaaagcctggtcgggatggtgacgcgcacggacttcatgaccgcgatcgcggaccttcgtctcgaacggctctccgcttccgtcaacgacgatcagattcgcgcggcggtgattgcagcactcgcacatgcgccctggcggcccgcggcgctgaacgtcagcgttcaagacgggatcgtcagcttgcgcggcgacatccgcagcgacaatgcgcgcaaggctgcgaccgtcgcggccgagaacgttgcgggtgtgaagcgggtcgaagaccttctgacgaagatcgcttacccaccgccggaagacgattatggcggcggcgacttcgtctcattgcaggaagagccttcgacagaggatgatcggcccttgtagagccaatagcgcctgcctcgcgccgccggactcggcgttcggttgccagcaggatagattgcggcgtctgcaagaccagtagcgccgtggcttgcagtggccttgatgaggatcaatcagggacgcgtccgccttcatgcgtatgtggccgcgagcgatcgggctgccacctgcggccgcggcaagacggctatccggatcgcccttggccgctacttctgctggatgcggttcaaataatcgatcacggcgaggatgcgcgttcgcacaacgacctcccgcaattcccgcgatggatcgagcgcatcgtaggccggatcgacggtgtgaggcacgttcacgatggggttgaatcgttccccccagatcggcatctcatgcggaccgtgagcggaaattttcttccgtccgtctatgctttgatagaccgcactggtcggaaagacaccgttgttgctcttggtcaaggtcgtcagatcggccggcggcaccttcagcaattcgctgaccggtcccttaccctttccatccacgccatggcagtttgcgcacgacgcgtgaaattctgccttgccgacatcggcgtcttcagcgtgaacgggcgcagcgaaagcagcggtcagaccggcaaacatcagcgacttaaggcaacgggtcaccatggtgcgcccccggttttcggatgaatctgtctagctttgttgggtttccttcagcttgacgcagatcaacagaccttgcgtgcgtaccttgcggcgcaaccagccagccggctccttggcaactgcgtgcgcaacgccgcggcaacgagcgcgctcgtcgccgcggcgagcaactcgtcgggcgttgacgccaccgtcaacggtgagaccggcgccattgatcgagccggcttcgggaccggcaacaaacgcgaccagagcagcgaggtcgtcggccttgccgtagcgcttgatagccgtgcgcgcgcgttgcgcctcggcttgctcgccattagccgggttcatgtcggtggtggtggagccgggatggacgatattgacagtgatgccgcggccgccgccctcgccgcctgggggccgcttactgcaccgacgccgacggcgcattagaggaatcgcttctccctgcggcatctgccatcctatggcgcggccgtcgccggatacgccgtggtctaccgcgaattttcgcttgacggcaaagcgggacgataatgtaatatgctataacttggtgagccggcattccggccgcccaagcaagctagaacttgcatcatgtagaacgaggaacccggcgcgtttcagcgcgccagagccgaggggagagtgcttgcatgtccaagctcagaatccgcgtcgaccaggacaaatgccagggtcacgcccgctgcaaatcgctcgcccccgaactgttcgagctcgacgaatacggcaacgcccatgaggtcggcgacgggaccgtcccggccgggctcgaggacaaggcctggctcgcgcagaccaactgcccggaaatcgcgatcgaagtcaccgaggaatagcagccggcagggacggccgcgcgcctcccgttgcgccgacccgcgtctgatcgaacgagaaggaaacgagccgatgtccgattccccgtccgcaagctatctgcccgagcatcccccggtcaccgactgggtccatgatttcgaccataccgatccggtctggaccgacgacccgttcccgatctgggaaacgctgcgcgcggcctcgcccgtggtgcacaccgagcgcttcctcggctgctacatgccgaccacctatcaggcggtgaaggagatcgcctacgacaccgagcacttctcctcgcgccgcgtcatcgtgcgcgacgtccgccccgaaatcaccgcccgcgcgccgccgatcacctccgacccacctgagcacaagcccgccaagcaggtgctgctgccgccgttcacgccggacgcgatgaagcggctggagccgcgggtgcgcgcgatctgcaacgagctgatcgacgagttcatcgccgatggaagttgcgatgccgcagcgcgctacaccaagcacatcccggtgcgcgccatcgcgcacatgctgggaatccccgagaaggacggcgacctcttcatcaaatggatccaccagatcctcgagctcggcatcaagagcgaagaggagatgatgaacggcgtccgcgagatgaccggctatttcatggcccatctcgagcaacgcaagcgcgagccgggcgacgacctgatctcgcagctgctgcgggccaagggccccggcgggcagccgctcaccgacgagcacgtgctcggctcgctgcggctgctgctgatcgccggcatcgacaccacctggagcgcaatcggctcctcgctctggcatctcgccaggacgccggccgatagggagcgcctgattgcggagccggcgctgatcccgaccgcgatcgaggaattcctgcgcgcctattcgccggtcacgatggcgcgcgaggtgataaaggagaccacgatctccggctgcccggtgaaggccggcaacatggtgctgctgtccttcccggcggccaaccgcgacccggccatgttccctgatgcggacaaggtggtgatcgaccgcaaggagaaccgccacgccgccttcggcctcggcatccaccgctgcgtcggttccaacctggcgcggatggagatgcaggtggcggtcgaggaatggctgaagcggattccggacttccgcctcgacccggccggcaaggtcacctggtcggaaggcacagtgcgcggcccgcgtcaattgcccatcctgttcggcaagaacgcctaaagggacaggacagcagttacatcgcagcacgcaaatgggataggttgccccggaatcgagccagagaatccggggaggcctgccaatgtccgaacaaaccgctcaacccgcgagcgatcatctcgacatccatgacgtcgagcggcgggtgaaggcgatcttcatcggttcggtcggcaatctcgtcgagtggtacgacttctacgcctacaccgcgttcgcgctgtatttcgcgccggcgttcttcccgcacagcgacccggtggtgcagcagctcaatgcagcggtgctgttcgccgcgaccttcctgatgcgcccgctcggcggctggctgttcggcttcatcgccgaccgctacggccggcggctgtcgttgaccttgtcggtggtctgcatgtgcttcggctcgctgatcatcgcggtgacgccgacctatgccacgatcggccttgcggcgccggcgatcctggcgctcgcccgcgtcatcgaaggcctgagcctcggcggcgaatacggtgccagcgccacctatctcagcgaggtcgccgatcccaagcatcgcggcttctactcgagcttccagtacgtcacgctgatcggcggccagctcactgcgatcatcgtgctcctgttgctgcaaaaagtgttcctgaccccggacgagctgaaggcctggggctggcggattccattcgtaatcggtgccctgctcgcgatcttcgccgcggtgatgcggcgcggcctgcacgagaccgaagcgttcgaagaggccaagaaagtctccaagccgaccggctcgatcgtcggcctgctgaactatccccgcgaattgctgctggtggtcggcctcaccgccggcggcaccgcggcgttctatactttcaccacctacatgcagaccttcgtgaagctctcggtcggcctcaccgaggaccagaccaccttcgtgatcttcggctcgctgatcttcgcaaccttcctgcagccgatctatggcgcgctgtccgaccgcatcggccgcaagccgctgttgatcttcttcggcgttgtcggcaccatcgccactgtccccatcctgaccgcgctgaaggacaccaagtcgccgttcatcgccttcctgctgatctgcggcgcctggatcttcgtcgccggctacacctcgatcaatgcgatcgtgaaggccgaactgttcccgactaacgtccgcgcgctcggcgtcggcctgccctacgccatcacggtgtcgatcttcggcggtaccgcgcccgcggtcgcgctctatttcaagagcatcgggcacgaggactggttctattattatctcagcggcatgatcttcctgtcgctgttgatctactcgacaatgcgcgacaccaagcacgaatccgcgatgcatcgccacgaatgacggcccgacgccatgagcaacgacaccgacccgcccgagagcaagctgacccgcagcaagcagcgctgggcgcgcgaaggcaaattcctgaccggcaggatcacccggccggaggaccagcgcctgccgccgggacagcatctgaccaaggactggccggtgctcgatctcgggctgctgccgaacgtcacgcgggagcgctggcggctcgacgtctacggcgcggtcgagcagacgatctactgggactggccgcaattcacggcgcagccgcagacccaattcgtctccgacatccactgcgtcaccacctggtcgcgctacgacaaccagtgggaggggctcgcgacccgcgacctgctcgcggtgtgccagccgcgcgaggacgcgcgcttcgtggtgctgcattcctatgacggctatacgacgaacctgccgctcgaggactttgccgccgaggacgcgctgctggcccatagctggtcgggccagccgctggagcaggagcatggcggtccggtgcggctggtggtgccgcatctctatttctggaagagcgccaaatggctgcagcgcatcgaattcctgaccgatgacgcgccgggcttctgggaggagcgcggctatcacaatcgcggtgatccctgggccgaacagcgctattctggcgactgacagccaccaataatgatggagcctgcccgtgccgcatgaacgctttcaattcaccggtgtgggcggccatcaactggccgcagcacttgatacgccggatggcccgatcaaggcctatgcgctgttcgcgcattgcttcacctgcggcaaggatgtactggcggcgaagcgcatcgcgacagcgcttgccgccaagggcattgccacgctgcgcttcgacttcaccggcctcggctcgagcgaaggcgatttcgccaactcgaccttctcgtcgaacgttgccgacctggtccgcgccgccgatcatctgcgcgaaacgcgcaaggcgccggcgatcctgatcggccacagcctcggcggcgccgcgatcctcgcggccgcaggccggatccccgaggcgaaggcggtcgccaccatcgccgcgccgtccgatccggtccatgtcacgcatctcttcaaggaccggatcgaggacatccgcgcgcagggcgaaggcgaagtgtcgctcgccggccgcccgttccgcatcaaacgcgaattcctcgacgacgtcgccgagcagaaactgatggcgcaggtcaagacgctgcacaaggcgctgctgatcatgcactcgccgaccgacgataccgtcagcatcgacaacgccaccaacatcttcatcgcggccaagcacccgaagagcttcgtctcgcttgcgggcgccgatcatctcctgagcggcaagcaggacgccgcctatgtcgccgacgtgatcggggcctgggcggaacgctatgtcgatctcgcggctcagcccgcggccgacaccggcagcgcgccgcgcaacgtcgtggtgcaggagacccgcaacggcaagttccagcagatcgtcaccaccggtccgcaccggttgaccgccgacgagccggtcagcgtcggcggcgatgacagcggtcccggaccgtacgacttcctgctcaccgggctcggcgcctgcacctcgatgacgatgcggatgtatgccgaccgcaagtcgctgccggtcgatcgcatcaccgtgacgctccagcacaacaagatctacgccaaggattgcgaggaatgcgagacgcgcgagggcatgctcgaccagatcgagcgcgtcatcaggatcgagggcaacctcgatgccgaccagcgcaagcggttgatggagatcgccgacaaatgcccggtgcacaagacgctgacgtcggaggtgcggatcgtcaccaaggcggcggagtgagcctgcgcggacaaaatatcgaaaacaaccccatgcaaaggagccggcggccggcggccgccggcgttcgacaaggtcgcttgacacgtcgggcaactcagcagtatatttctaatattccgaatttgcgcgaacatccctcgccgtctacccacgcgccgcccgcttgccggtcaggcagttcgccatggtccgcaccgcggcgccgatctcgttttcgcgccaggcggcaaagccgagcaacaggccgtggtcgcgcggccgctgcagcgcgaggctcgacagcgcgcgcacctcgacgccggcggccaccagccgcgagaccgcattctggtccgcggcgccatccttgaaacgggcgatcagttgcattccgcccggcgggacctcggcggtgagcaccggcgcaagctgccgcgccaacgctgcggcgagatggtcgcggcgcgcgcggtagatccgccgcatccgcctgacatgcgccaggaaatgcccgtcggccatgaagtcggtcaatgcctcctgaacgtggacggacgcgatcaatccgaggtggcgctgcgcgatctccatcgtctgcgccaatgatggcggcaccaccagatagccgatccggatgtcggcggtcatcgcttttgcaaacgtgccgagatagagcacgcggccctcacgatcgagcccctgcagcgccggcatcggacggctgtcataatgaaactcgccgtcgtaatcgtcctcgacgatccaggtcttgccgggctcggccgccgcgagcagttcggtgcggcgtgcaaccggcatcacccgcccggtcgggtgttgatgcgacggcgtcgtgaagatgagcttcggcgcacgcgcctcgcgcatccgcatcatgccccatggatcgagcctgacgccgacgacgtcggcacctgccgcgcgaaacgccgccgcggcgccgggataaccgggatcctcggtccacaccgcatcgccgggcgcgatgacggtcgcggcgatcaacgtcagcgccgcctgcgcggccggcaggatcaggatatgatctgcctcggcgtgcacgccgcggctcacctcgaggtaatcgcgcaaggcctcgcgcaggctcggccggttgacgacggtctggtcgttgaagcggcggcgcagcgcgctgcggcgcaggcagcgcgcccagatctcgtgcggaaattcgcgcgcatccgccagcccggaacgcagcggccggaacttcgcctggtacgacagcggccaatccgtgtcggagagctgcaaggcccagggcgacaatagcggtttgcggaccgtctcgcgccgcggcgcagctacaggcttggcgaagcgcgcctcgatatcgtctgataccaccggccgccgccgcgcggcgacacgcagatagccctcggccgcgagctgctcataggcgtgcgtcaccgtgttgcgcgacacgtcgagctcggccgacagcgtgcggctcgacggcagcacagcgccgctcctgatccggccgcttgccatcagcgcacgcatctgctgggtcagctgcgcagtcaacccggcatcgtcagtccgcttcaggtcgagcagttcggcgaggatcaatctggctccttggttctatccaatctggctctttcgagagagccagcctgatcctattcacagggggtatcgcccgcaaggattctgtcgtggaccagtcactctcccctgccaaggccgccgccctgttcatcgtcgtggtgctggcgtggggcatcaactggtcggtgacgaaatcgctggtcgaggcggtgccgccgctgtggactgcatcgatccgcagctgggtcgccctggtcgcgctgctggtgatcctgcgcgccagcggcaatctgatcattccgcggatcgccgatgtgccggtcgtgctcagcgtggcgctgctgcacatgacgttcttctcgacgctcgtcgccgccggcctgcgctatctgccggccagcaagggcatcgtgctgggctacaccacgccgctctgggtcgcgctcgccgccggcgccgcgcgaaccgagcggctcggcgcactgaaactcgtcggcgtcgcgtcggggctcgccgggctctgcgtcatcctcaacccggcatccttggactggagcaatctgcacgtgatcgccggcgccggcatgatcatcctcgccgcgatctgctgggccgccaacatcatctatatccggtcgcaccgctggatcgcgacgccgttgcagctcctgctgtggcaggtgctggtcgcaacgctggtgctgaccatcacggcgctggtcaccgagggcgtgcccacggtgacatggtcgccgcacctcgtgctgctgttcctctattccggcttcatcggcacggcgctggcctattgggcgatgtctgtcgtcaacaagagcctgccggcgctgaccacctcgctcggcacgacggggaccccgatcgtcggtatcctgaccgcggcgctgctgctcggcgaaccgatcgatctctcgctggcgatcgccgcggccctgatcgtcggcggcatcgcgctgagctcgctcgcggatgcgccggcgcgggcctagagcaggacgaagttaagttgagacggtttgacctcggacttacacttaatgcggtaccttacccgtccgtcggattcgacgggcatttgctgtacgatggtgtaattcgcaggcggttcagttcccgtacgtccttgtcgccctgcggttggtggcgaacgtcttcattgagcttatacgcataggacatgtgtttacctcacggtttctgctgctccaacggggctggaatgcacccccttgcttccggagcctgacgcgctcacgtgcggaccatttttgccttggcgggttcgctaatcctcgagtatagattttgtagcgtcgaatatctgttcagcggtgcccttgatggtacccttcgcccacgcttgaaacacagcgacgtaggcgttcctgtaagcctcttcatctgcagaaaagtagacttcgtcggtagcggtatccaagacgagtgctcctatatcgatgcagatttcctcgactaagaccagccgctcttcctgctcggccagatgccgctttacaatgctcatttgatctcctgctttgctcttaacttaccacgtctgtcgaattgcacggccgcccaatccactctcgaaagggttcttgaagagtttggaaaggtcgcattgggcgaggcagcgaaataaacaggaaaggcatccctggcagcggaggtaactccgcagtctgcatgcatcgctcgtggttcagctcttcgaacagtctttgctgtctttcgccagggatcgaaactacgtgtcagcggtccagcgatctgaggctgccgctagtattaacgtcatgcttaggttggcttgacgattgcagttcaggccaaattgtcggctcttctctcggcaactacgcgcaatgattttgacgggaagccaccgacgagcttacttgggtattgctttgactggattccatcaaaaaccccgcccccaaagatttgggaacggggcatgaccacaagctctgccagtacatccgtggcgagagcgacaggtctgtcgtactcttacttaagcagcagcacgaagattgtcagcggcggacttgcccgtacgacggtctgcgacgacgtcataagacaccgtctgaccttcgctgagagtgcccatgccggcgcgttcgaccgcgctgatgtgaacaaaaacgtcgctgctgccgtttgacggctgaataaagccgaagcctttttggctgttaaaccacttcactgtacctgtgttcatcaggtcgtcctttcgtatacgcgcaggatctgacgcgcagagttgcggccagtgtccgagttcgtcgatgttggagaatgtctgaaacgtgcgcgccgtcaggaactgaggcgaaagcggaacagttgttcggccagtatcgatgcttgagagactacaccaacggttgagagagtacaataagaaatccaatagcgcttttcacaagagtggtggtttgctccgaacatggtaattgatggaccttggtgcccggaaatatggcggctcctcctctgcacagcaaaaggacaaagcgtcggtcgggccggcggctccaaatgcttccgcgagcttcactttttgcgcactttgctgcatagttcggcatggcaaaggtaaaagtgagtttcaaaccagtccgtaactctgaaggcgactgggctatcatcgccgagtacgcaggcgcagaaccccgagaaatcaagggtttcacaagcaagacggaaattgacgattggatgaatggagagcgtcggatcgcgtggctccgatcccaaggttacgcgaagtgacttgatgactccttcctccaaatatcttcgcagggcgatacggccctgatcgatgagtgcaaggaatcgagcaatgaccgaacggaaacgctccgcccagcagcaggtagccgacgaggcggaccgcaaggcgcaaaacccaaacggtgcgcggcaaaggattgcagacagtcaggccgatccagagttccaagaaaaccacagacgtctcagagcggagcggatagcgcgagaggtcgggggcaaggccggccggtgaggcgttttaaagtcttattccgggatgttctttccccttaagcgatcagcgttcatctgccatttgtctgtcggctttcttctcgagagactcgcccaacactagcagtgttgagtagagctgttgcgacatacctggtgttgcggcactcgctttatttcctctcgcattgccatggctattcccgcagtgccttcgtgatcggagctaagacagaagagacttcgtggctggagctcaggtgcaagtcgatgttatttgcggcgatcccgctcgatccggttggcagccgcgagctttccctcaatgtactgttctagatcaccaaccttcttctcgatggcctctcgcgtgatgttttgattcttggcgccatcaacgagccgctcaaccagtacgtccacgctttgggaagcgcctggtgtcccgtattcttccgcagcgtgaacgctattctcgatccaaaaatcaatgtactcgcgggtcttcgttagcatatgaagtctttgccagcaccgaattgagctcactgtggagcgtaaccacatgccgaattgggagcaaggcggacaccccacacgtcggttacaggctattccagcctcagcggcctagttcgattttcgcagtggctgcttcgccttttgggcgcataaattggcatgctcgattcttataaccgatcctgtcgatgtggcgcggtctatagccgaaccgaggcgatggccctgggtcggcagcttcgaatgctcggtttgcggcgcgacgatagaatcgtggaacgccgcttgggttccaacctacaggttgattggcgggcccgtcccaccgccccgaactagcaactagcgacgcgctgcagcattggccggtgatggcagagtctttcggcaattcgttcactctcgttgaggtgacctcagacgacgcgccgcggccgacgaggcagatgtggttagccttggccaagccaaatcaggccctgacgctggtccttgcggctgttcccgaaggctggacggcggaagttgtaccagctgttctcacggaaaagcagcaaaggatgttcgaggaactcaaccttgaacccggcgatgtttacaggatcgctccagagtaaggcatcctcggtgggcgcgcggcgtctgctacctactccaggccgaacaaggctgaggctattgcgatgtcggctatgcgggtggatcggacgcggggtcctgcttccctcgaccgccgcttgtggcccctgagccgacaaacgatcagcgggtttctaccgctacagtttccacagcaccttccattggctatttttcagcttatgcttaaccaactagatgaccaattccgtggagttgaaaatggcttcgccaattcgaattggtgcaattctgatcgctactgccgttctcgcaccagcgcatgcaatggcacaaacgcttcctcctagtaatctgccaacgaaggagcaacttgcgaacgacaataatctcttcatctctttggcaaaaaaggtgctgaagtgggaagagccggccgaacccgtcaggatcgtcgggccgatctacttcgtgggcacaaaggggttgggggttttcctgttcaccacatccgagggccacgtcctgatgaacactggaatgccgtcctccggtccgatgatcgtggactcgatccggaagctcggattcaagcccgaagatatcaagttgatgatcaacggccacgcacacatcgatcatgcgggcgccttcgccttcatgaagaagctgacgggggcgcagttggccgtcatgaaggacgatgtcgcggcgatggagagcggcgacaaggacgatttcaagtacgcgaacgacttcgcctacgaaggcgtgaaggtcgatcgggtgctgcgcgatggcgaccagatcaggatgggcgacgtcctgcttactgcctatcacacgccgggccacacgcggggagcgaccacctggatcgccaacctggtcgtcgacggcaaggcctatatcgtggccttccccgacggcgccgggttcaaccccggctaccgcgtggcgaaggacccttcgtaccccggcatcgaggacgactaccgcaacacccaccacgcgctcgagatgatcaagccggacatatggctcgctcagcacaacgagtattacgacctcgaaggcaagcggaagcgggcggagaccgagggcgtgaaggcctggatcgacccggagggctacaggcgctttgtcgcagggaagaagcgcgcgttcgaggacgaggtcgacgaggagctgggcgcccccaaggcagccgcgaagtagggagttatggcgatgaaatcggcggcccgtctggtatttgcccttatgctgatgtccgcatctgcggcaatcgctcaggatgccaaacccaccgcggtcaacgcccacaacttcgtccgcgcggagagcgacctctacttccggaaggccgcggtcgacgacgcttcgttcggcaagctcacgcaccggcgcgaaatggcctcgatcgacaagcaggacgtggtccggatgaaccgcgacaccctgtactcgcatggcgtgttcgatctcgatgcggccccgctcacgatcaagctgccggacgccggcaagcgtttcatgtcgatgcaggtgatctcgcaggatcactacacgaccgaggtggtgtacggccccggcaccttcacctacgacaagaacaaggtcggtactcgctacgtctacgtcatcgtccgcacgttggccaatcccgaggacccgcaggacgtgaaggccgcgaatgctatgcaggacgcaatcgaggtgcggcaggcaagcgccggcaagttcgaggtgccgaattgggacctgacgtcgcagaccaaggccagggccgcgctcgagagcttggggtcgctcggcgggacggtcgaccgtttcggacggaaggatgaggtcgatccgattgaccatctgatcggcacagccatcggctggggcggcaacccgcgctatgccgccgactaccaaagcgtcttcccgccgaagaacgacggcaagacggtctatcgcctgacgctcaaggatgttccggtggacggcttctggtccattagcgtctacaacggccaaggcttcttcgagaagaacgaattcggcgcatattctctcaacaacctgaccaccaaggcggatggagccggggtctacaccatccagttcggcggctgcggcaaggatacgccgaactgtctgcagatcgtcgagggttggaatttcacgatgcggctatacaggccacgcaaagagatacttgagggaagttggaaactgccggcggcgcaaccggcatcttagtaacgtcgcgtattgggcccttagcggacattcactcgggcatcttcaatgtcagctttttgacggcaatccggaatctcacaatcccgcacgcgggtacccgattgagatttatacgtatacgccctaatctcatcatgctccaaagcatgatccggaaaagtcgaagcagttttccctcgcgacaaacgcagaacgcgtttgcgcggagatcatcgctctttcagcctcaggccgttgcaagcggcctgacccgcagcgcgccgcgcaggccggcggcggtgccgagcatgatgccggcgatggcgatgaacgacgacagcgacagcgtcgacaggccggtcagcccctgcccgaccgagcagccgaacgccatcacgccccccgcgcccattagcacggcaccacctgccgagcgcagcatgtgctgcggcgagcggtagccttcgagcttgaaacgcccggtggcgagcgccgtgaccaggctgccggcgaacacgccgaacacggtgacgatgccgaaattgagcgtcgagccggtcgacagcatgacgtattgcagcgcgtcggcgatcggcgcgatgaaggtcagcgacgtcaccggcaccggattgaaatcatcggcgccgagatagccggtcgcgtaccagccccccgccaccagcaggcccacgatcaggccggccgcgatctggcccggcgacttgcggaacgggacatgggcaaaggcgaagatgatcaggatggccgacagcaccgcggccgcgaccattcgcgccggcaccgcgccgaggccgctgcctgccagcagcgccggcaccgagttggctgagaccgtggcctgcgacgcctgcaccatcgcgatgcgcgcaggcgcgatcaggcccttcagcgtcatctcggcgacgatgccgagcacgatcacgaccacgaaggaacggagattgccgcgtccgagcagaaccaaggcccgcgagccgcagccgttcgacagcaccatgccgtagccgaacaagagcccgccgaggaagatgaccggcgccgagaacgagggctgcagatagatcgacttgccgagatcgacgaggcccgccgccgcgagcagttgcgaggccgcgatcgcaatccccatcgccagcgcgtaagtgcgcaccagccggccgtcgccctcggcccaccagccgcgcagcccgctcatcatgcagaagccgctgacgagcccgaccgagccatagatcaggccgatgatcagggcggcgaggatgacgatcgttgcggggtccatactgttctcttgatcctagaccgggatgagtttgggttgaaacgggtccgcaggctgggtttacctctccccattggggagaggtcgatttgcgcagcaaatcgggtgaggggccgctgctccaacgagagagcgtaacccctcacccggcgctacgcgccgacctctcccaagggagaggtgaacttccgccgccgctccagatcaaacctaatctcatcatgcttcagtttatcccgtcatcatggccgcaggatcacgcggtcgcgcgacgagccggccacggcaacgaacgccgccttggcctgttccagcggatagatcgcacttggcttgatcggaaacggcttgagatgtccgctggcaaatccgggcgcgagctcgcgcagcacctcgccggtcgcgaccgacgagaatgcgagcgtgtcgatgccgacataggtatgctggccgcggtagaattcgaggatgttgaactgcacgatgcggtcgaccgccgcgatcaggatctggcggccgcgcagcgccagcgattggtgcgcggcctggaaatagggatcgccgaccgtgttgtagacgatgtcggcgcccttgccgccggtcaactcgcgcacttgcgccgcgacatcaatggcagaggcatcgatcacctcgaccggcgcattgctatggccctcatagggctcgctcctgcgcaccacgccgatcacgcgcgcgccgcgccagctcgcgatctgcaccgcggcctggccaaccttgccgttgacgcccatcaccagcacggtctcgcccggcttcggcagaccggcgcggcgcaggccttccatcgcggtgacaaagggcacgccgatcccggcggcttcgtcccaggaaatgccggcgggcttgtccaccgcggcatcggcctcgaccaccagatgcgtggcgtgggtaccgtcgcggcggatgccgaggtcgccggacgagccgaacacctcgcgcccgatcaagcccggcggtccgtcgatcacgacgccggcgtaatcgcggccggaggtgcgcgggaagacggcatagggcatcagcccggtcgcggccttgacgtccgacggattgaccgccgccgccttcacctcgatcaggacgtcgttgtcgccgcgcgaaagtgcatgggtctccaccaccggcgccaccgccgccgcgttctccgccttcgtcagcaggcggacgcagcgggcatcgatgggatgacggtttgcttgcggggccggcggcatgagcagtccagtcttggtcatgaagcacgctgcaaacgcgcgcggatggcggcggccgggtggcctctcgtcatgactaatcgactgaccgatcaattcaaggggcttgttgagaccgacggttcagagcctcggcggcggcgccgtgccgaggatcgcctcgatcgacaggccaagcccgagcagtcttgtatcgctgccgaccggaccatcgagctcgagcccgaccggcaggccgccgggcgtcatgccggcgtagagtgacaacccgggaagcccggcattgctgccgggatcggtgttgcggatcatggtgccgaaggtcggcaccggctcgccgccattgaccgacatctcgccggatccggccttttcgtcgatgagcggcgcgggcgcgatcgtggtcggaaacaggatggcatctagtttgttgttcccgagatacgcggcaaagatcgcctgcagcgccggccgctgcgccttgatcgcatcgtcataggcagcgccgaaggcgtccgccgtgatcgcaccgaaggcaccgacgacatcgggactggcgacggcggccgcgatgtcggacagcgcgatcccctcgatcccggaggcggcgagccaagccgggatatcggcgatcggctcgtgcagcgcgacgacgaaggacaccttgtcgttctgctcgaacaggccgggcatatcgacgtcgaccagcaccgcgccattggcggtgagccgcgtgcaggctgcacgggcgacggcttcgacatcgcgatcgagcccgctccagaaacaggcgggaacgccgagacgcacgccacgcaatggaatggctgcggcctgcggcgcgcccgtgatcacggcatcgagcagcgcgacatcggcgacggtgcggcccatcgggccgacggtgtcgcgggtatggctgatcggaaccacctggttgtcgtcgtggtagcgccgctcggcgccgccattgccgaccgacggccggagacccacggtcccggtcagcgccgcgggcacgcgggtcgaaccgccggtgtccgatccgaggccgcaggtcgtgatccgcgcagcgatcgccgccgacgttccgcccgacgagccgcccgggatccggttggtgtcgtagggattgcgcaccggtccggcgaagggtgcgagattggtgctggtgatgccgaaggcgagctcgtgcagattggtcttgccgatgacgacggcgccggcgtcgagcagcttttgcagcgacggtgcgttgcgcgccggccgcgcatgttgcagcgccggtgtgccgcccgacgtcggcaggttcgacgtgttgatgttgtccttcacgacgatcggaagcccggccagcacgccggtgcgcttccccgcatcgacctcgcgcgccgcggccagtgcgccgtcgcggttcagcacgatgaaggcgttgagatgcttgagccgctccgcgcgatcgagcgccgcctcgacgacgctgactgcggtcaccttgccgctgcttatatgggccacgatctccgcagcggttgtctcactggtatcggccatggaaatcccgcgccctcctggattgcgggcgagaggctattctttaggccgcttgtcgtaaacccgtttcgccttgccgagcgaacgctccaacgtctcgggcgcgacgacgcggacgcgggtggaaatgccgatcgtgttcttgatgaaggcagataccttctcggcatgcgcggtgagcccctcgccgtcccagctctcgggccgggcttcggcgagcaccgtcatctcgtccatgcggccctcgcgggtcagctcgatgacgaaatggccgccgcaccaatcggtcgccagcagaacttcttcaatctgggtcgggaacacgttgacgccgcgcaggatgatcatgtcgtcggagcggccggtgaccttctccatccgccgcatgccgggccgcgccgtgccgggcaacagccgcgtcaaatcgcgggtgcggtagcggatgatcggaaacccttccttggtcagcgaggtgaacaccagttcgcccttttcgccgtcgggcagcaccttgcctgtcaggggatcgatcacctccggatagaagtgatcctcccagatgtgcaggccgtccttggtctccacgcattcctgcgcgacgcccgggccgatcacttccgacaggccatagatgtctgacgcgtccatgtcgaaggcctgctcgatctcgacacgcatcgcgttggtccagggctcggcgccgaagatgccgaacctcagcgacgatttgcgcgggtcgaggccctggcgcttgaactcgtcgaggatcgccagcatgtagctcggcgtcaccgtgatgatgtcgggcttgaaatcgttgatcagctgcacctgccgctcggtcatgccgccggagatcgggatcacggtgcagccgagccgctcggcgccgtaatgcgcgccgagaccgccggtgaacaggccgtagccataggcattgtgcatcagcatgccgctgcggccgccggcggcgcggatcgagcgcgccatcacatcggcccatgtgtcgatatcagccttggtgtagccgaccacgatcggcttgcccgtcgtgcccgaggaggcatggacccgcaccagctgctcgcgcggtaccgcgaacatgttgaaggggtaattatcgcgcaggtcggtcttcaccgtgaatggaaatttggcgagatcggacagctgcttgaagtccgtggggtgcacgcccgcggcctcgaagcttttcttgtagtgcgcgacattgtcataggcgtgcttgagcgaccaggcgagccgcctggtctgcaacgccgtgatctcgtcgcgcgaggcgcgttcggccgcatcgagctcggcgtgataaccgctatccgcaaccctgagctttgccgccatcgacgtttcccccgaaaccttatgccttgatgtccgtgtccggcagccaggtgccctggatcacgcgcgaatgtccgcggaactcggcgatcacgctgccgccggcagtgacgcgcacgtcgtagattcccgagcggccgctgcgcgagacctcacgcgcggtcgccaccaggcgatcgccgagcttgcccggccggatgaaggtgacgttgccctgcgccgccaccgcgcgatcgttgcggctgttgcaggcaaaggcgaaggctgaatcggcgagcgtgaagatgtagccgccatggcagatacgctggccgttgaccatgtgcggctgcaccgtcatcgccatcgtagcttgccccggcttgatctcgaccagctccatgccgaggcccttgctggcgtcgtcttccttccacatcgcatccgcgcaggcgcgggcgacatcctcgggtgatagcgtggccttcacgttcacatcgaactccctgtgcgcgggcccgttgcgacgggcctcttggtgtcagtgttgggcgcaacaccttgggtgtcaacgcgcccgtagaattagacgtggtcgtagtcgaccacgaccttgtccgaacacggcttggcctggcaggtgaggatgaaccccgccttcagctcccacggctccagcgaatagttcaaatccatcggcgcctcgccctcgaccagcttggcgcggcaggtcgagcacatgccgcccttgcaggcgaacggcaggtccatgccggcgcgcagcgcggcgtcgaggatcgactcgccgtcggccaccggcacctcgcggcgcttgccgtcgatgatcagcccggcgatcgccttcggcggcgcgccggcgggaacgacgaccttcggacgcggcttgccgccgaattccgagacgaagcgttcgacatggatgcgctcgtcggcgatgccgatctcgcgacaggtcgtctcgatggtttcgctcatcgcggccggaccgcagacgaagacatgatcgacggttgcggccggcaccagcgagcgcagcagcacccgcaccttgtcgccgtcgagccggccatgcaggatcgggatgtcctgctcctcgccggagatgacgtggaacaccgagagccgctgcatgaagcggtccttcagctcctccagcgcctcgcggaacatgacgccttcggtcgaacgattgccgtagaacaggaagaagcggctgtccggctctcgcgccagcacgcccttgatgatggagaggatcggcgtgatgccgctgccggcggcgaagccgacataggtccgcgcctcgccaggtgcatgggcaacaccaaaacgcccggtcggcgtcatcacgtcgagctcatcgccggccttcaactcgtcggccgcccagttcgagaacgcgccgccgtcgaccttcttcaccgcgatgcgcagctcgccgtcgtcggggccggagcagatcgagtaggaacggcggacttcctcgccgtccatcgtggtgcgcaaggtcagatactggccgggcgtgaaacggtagtcgccttgcagatcgtcggggatcgcaaaggtcatcgagatggcgtccgaggcctcgcggcgcagatcgctgacggacagacggtggaagcgtggtgtcgacatggtcaatgacacttgaagtaatcgaagggttcacggcagctcttgcaacgccacagcgccttgcaggaggtcgagccgaattcggacagcagttcggtatcgccagagccgcattgcgggcacgcgacctgctgctcgccgaacagcgcacggcgcgaggagccgggctgcggcggcgcgatgccgtattctttcaacttgcggcggccgtcctcgctcatccagtcggtggtccaggccggtgacagcacggtgcggaccttcggccgatggatgccttcgcgctccagcgcgagctcgatctcgagcgcgatcatgttcatcgcgggacagccggaataggtcggcgtgatcgcgacctcgacatggccgtcatggaccgcgacatcgcgcagcacgccgagatcggcgatcgtcaacaccgggatttcggggtcaaccacctgcgcggccgcgctccaggcgcgccggcgcaaatcggcatcgctgagcgcaaccgtcaccatgtcgcccccgggaaggtgcgctgcatcgactgcaattcgctgagcagatggccgagatgctcgctgtggctgccgacgcggccgccctgctgcatccagtcgctgttcggcagtgccagcgtcgcctcgttgacgatgccggtcacggtcttcagccagcgcggcttcagcgccgccgggtcgatcgcgatgccggcgtcgatcaggccgcgctcgccgtcgtcgaccgcgaacatctcgccggtataggcccagaggtcgtcgatcgcattctgcgcgcggcgatggctctcttcggtgccgtcgccgagccggacgatccattccgacgaatgcctgacatgataggcgctctccttctccgacttcgccgcgatcgcggcgagtgtcggatcggtggaggccatcatcgcgcgccagtagagatcggcgaatgccgcgtagaagaactgccgcaccatggtgcgggcaaagtcgccgttcggctgctcgaccagcagcaggttgcggtactgcctgacgtcgcgcagataggcgaacttgtcctcgtcgttgccgcggccttcgaccttggcggcataggtgtagagctcgcgagcctggccgagcaggtcgagacccatattggcgagcgccatatcctcttccatcgccggcgcatggccgcaccattcggacagccgatggccgaggatcagcgcatcatcggcgcggcgcagcgcatagagcaccaggggtgtttcggagacttcgatattggcggttgccatgctctaatccacctgcatccacttgctcgacgtcatcctgaggagcctgcgcagcaggcgtctcgaaggatggccgcggttacgatcggagtgtcacggttcgagacggcgcgtaccgcgcctcctcaccatgacgggtgaaattcacatatgcccgacttcgtcgggaacgtcgtagaacgtcgggtggcggtagatcttggattccgccggctcgaacatcatgcccttctctgtgggatcggacgcggtgatcgcgttcgagggcaccacccagatcgacaacccctcgccgcggcgggtgtagatgtcgcgcgcggcctgcagggcgagcgtcgagtccgccgcgtgcagcgagccaacatgcttgtgcgcgaggccgttgcggctgcggatgaagacttcccagagcggaacgttcggcgtggccatctcgggctcccttattcagcggcttgcgcgagctggcggcgcttgcgcttctcggcataggccgccgcggcctcgcgcacccaggcgccctcctcatgcgccttgcggcgcgcggcgagacgctcgcggttgcaggggccgttgccggccagcacctgcttgaactcgtcccagtcgatcgggctgtgcacccaattgccgttctcgttctgcttcatgccgggatctggaatcgtgagcccgaggaattcggcctgcggtacggtggcgtcgatgaatttctggcgcagctcgtcgttggagaagcgcttgatcttccacttggtcgaggtgtcgctgtgctggctgacctggtccggcgggccgaacatcatcagcaccggccaccaccagcgatcgagcgcgttctgcgccatcgccttctgctcggcggtgccgcggcacaacgtcaccatgatctcgaaaccctggcgctggtggaacgactcttccttgcagacgcggatcatcgcgcgcgcataggggccgtaggagcagcggcacagcgggatctggttcatgatcgcagcaccgtcgaccagccagccgatggtgccgatgtcggcccaggtcagggtcggataattgaagatcgaggaatacttcgcattgcccgcgagcatcgcgtcgaccagctcttcgcgcgaggtgccgagcgtctcagcggcggcgtagagatagagcccgtggccgcattcgtcctgcaccttggcgagcagcgcagccttgcggcgcagcgacggtgcgcgggtgatccagttgccctcagggagcatgccgacgatttcggagtgggcgtgttgggaaatctgccgggtcagcgtcttgcggtaggccgcgggcatccagtcgttcggctcgatgcgctcgtcggcatcgatgcgggcctggaactgagcggcacgggcaacatcctcgacgccgcgatcgtcgccgtcggatgagttgagcgcctgcgtgtacatggccgacctcccggtgtgttgttaggcggaaatatataacacaaatttcagaatgcaagatatttctgtaatatgttcagatgccctcgaaacgccgcgccacggccccgttgggcttcggcagcggcccgtcctcgttggttgcatgctcgtcaagccattgttccgacgcaggaagcagcccgcgatagatctcgccgcagagtttgcgcgctgccctgcccggccaatccttcggcagcaatggtgccggcaacagcggatcacgcagcacgacgcggcggtagtgatggatcagcaggatgcgcgcggtgaaggcgtcggcgtcgctgagcgtctcgccgcgcgcgatccagccatgcagcggctcgaacgtcttcatgaacttcagataagcgtccgcggtgcgatcgagcggccagctttcgctgagcagccggcgcccgctgtcatcctccgcggagacttcgagacggatcgcgcgcgccgcttcatccgggatcggcacgcccgacggcgccacccacacgccgggcagcgggctgccgaagccggcattcttcagcgcctcgcgcgccgcgtcgcggtcctcggcattgccgatcaacaacagctcgaagcggccggtccagtccgacggcggcggatcgtagatgtgccgggttgcggtatcgaaagtctgccggcccctggcgttgaggcgatagaaactgttgcggccgaccttgctgcgctcgagccagccgtcggcggcgagccgcgacatcgctgtgcgcaccacattgccgtcgacgtcgagcgacttgaagaattcgagcagcgtgccgagccacaccgcgccgccgcgcggcacgatggaatcgccgaacacggtgatgatgatcgagccggtgcgcgacggttcgcgcttcagctggtcgacgatgcgggcaagcggctgcggcatgcccaacgcataacgcgttttgtcgaggaacgacaatgcggggtcacggtctgctccctcgccccgctcttgcggggagagggttggggtgaggggctgcctccgaaataacggtgagagacgactcgcgcggagactccctcacccggatcgcatctgcgatgcgatccgacctctccccgcacgcggggcgaggtgaagagagggccctcgcaagatctagcgattgggatccggatagacgaggctgcgccagccgctgcgatcgaacggggcccactcgccgtccttctgcgcgaggcgatcggcaacggcgtagaccacggccgggtgatggcccatgccgcaatggctgctctcgacctcgatgctgtcggtcatcgacgagttctgctcgcggcagccttgccaggcgcagacgccgtcagtgcggctgaaaatcgcagtggtcggcaccggcggcgcactggcgagcgagccgccgaaacgggaatcctcctcgtcggcgcggcggccgctggccatctcgtagacgcgccaggcattggtcgacttcggaccggcggcaaacgggctgccgagcgtgatcacctggcgcacgcgatccggcatcatcttggcaagctggcgcgcatagaggccgccgaggctccagccgatcagcgagaccttgcggccgctggtctcattcatctcctgcagcagatcgaccatgccgtcctgcacgccggagcgcagcccgagattgcggccctggcgccagccgctgacggcgtagcctttgctcttgaggaaatcgcgcagcggccgggtcgacatgtcggaagcgatcagtcctggcagcaccagcaccggatgcccgtcgccgcgcggcgcgaggctcaacagcggcaaggcaccaagaaaggcaccaagctcgtggatggcgcggccttccagaaacatcagcgtcctggacggcgggcgtagcgtctgcgcagcaacggacatttcaactcctcttccgacgccgtcgtggcggtcggcaatgggatcatcaggcaaaggcctgcagggatgggtcaacaggatcgacgcaaacccggcggaatcgttccgcaacgcaacaatcaaccttgaaaagctagggaaccgatcactttcgtgcaagcgggccagatcacacttgccacaactattgtgacgtccgtgcccaatcggtcacagcagccgcaacacgtattccaggctgtaaagcgcgagcccggcaagcccgccgatcagcgagccgttgaagcggatgtattgcaggtccttgccgacattgacctcgatcagtgagatcaattgctccatgtcccagctcttcatctgatcggcgatgaacgtcgagacgccgctcttctgctcggcgaccaccgtgcgcaggattgcgacgaggccctggttgatctcgccgcgcagctcggcatcgccgtcgagcgcatcgccggcttcgacgaacatccttgccaactgatgctgcagcacctgcgactcgcccgaggcgctgcgcgcgatgaagtccctgacgttggcccagatggtgcgcccgagattggcgagctccggccgcgccagcaggtcgcgcttgaggccgtcgatgcggtcggcgaacgccttgtcgctgccgagccgatcgacgaacgacagcagcatgcgatcgaattcgccgcggaacggatgctgcggatcgttgcgcacctcctcgaagaatttcgtggccgaggcgatgatccggttcaccacgaacttgtcggcgcgatagagcttgagcagcgtcggcatctccgcgcggaccttgtcgcggatcaccgtcatcgtctcctgctgcgtcagcgtctggtgcagcgcgcgcaagaggtcgtcgagcagcccctcatgcttgccctcctgcacgaagccgcgcagcgcgccggcggcaagcggcgcgagatcgactgagaggatctgcgtcgtgacgcggcggctgatgaactgcatcaagcccgagttctcggtcgccgcgaatgcttcgggcagcatccgcagcacgaagcgggcgagatcctccgaacgtttgcggtcgcgcagccagtcggcgatgaacgtgccgaaatcgatctcgcgcagcttggcctcgaccgggccggcttccaggaaattgttctcgatgaactcgccgagcttctcggcgatgcgttcctgattgctctggatgatcgcggtgtgcgggatcggcaggcccagcggtcgcttgaacagcgcgacgacggcataccagtcggcaagcccgccgatggtcgcggcctcggcaaaagctgcgacgaagccgaaagcgggatgcagcggcagcagcgccttcgatgcaatgaagatgacgagggttgtcgccagcacgccggtcgcgagccacttcacgcgccgcagctcggccgcgcgttcggcatcgacgggcattgcgacgagggtggcgggaaggatcatgaggactttcgaatgtatgctagtttgcgtccactcgcacccctcagcttgctcagtgtcatcacccgcgcaggcgcaggcgggtgatccagtattccagagacggtggtgcttgagcggataggcctcggcgtactgggtcgcccggtcgagccgagcgacgacacctgtggatgaggactagcttcacatcaggatgacgactgtgcggcaaaaaagaaggcccgcaaaatggcgggccttcaaaaagggcagttggtcagcgcgagcgcgatcaggcggtcttgccgtagaccttggcgaagttgtcctgcgcggacttcgcaccgtcggtgacgagcttgccgagatactccgacgtggccttcgcccgcgagacgaacagttcgccacgcgcgcggaccaggtccgactggatctgggcagcttcgctcagcgacttggcggacgcgagctggtcgatgccggcgaagaacgcctcggcgtcctggtagagcgcctgctgaatgttgcggctgatcttggcggcttcggtcaccgaaccggcaacggcggtctcgattacgttggtcaccttctcggagccggcatacgcgtcggcggcgcgggtcttggcggcctcggcctgcttcttcacgaactcacgggcggcctccggaacttccaggttctggagcttggtgaacgcctcggtgacgggcgcgaaggcttccttgacgctgttcagcacggaattggtttcggtggtcattggggtctctccatcctcaggtttgagctatgggctcaccccgtccgttttggcccggggcaacggtgttatgacacaccccatggtgcatcgcaacatcgatgttgcagcgcgatatcacaaacctgtgaatggcacgaatttccggcagactgcctaaagggtcggcgtcaaacggtctctaattacctgtaacggcgtccggcagcccatatgcttccatttgcgcccgaacctgcgccacattgtgcccgagcacgacgatgtcgtgggtcttgccctcgacatccctgacgtggtcgcgcagcagggcctccgccttgaagccgaggctttcgaacagcgtgatcgccgcccgctgatcgaccgtcatctgcaccgagaacttctccagcccggcgccgagggcaatcgcgaatgtctcctgcgacaacgcccggccgacgccctgcccgcgcacatcttgtgacaccaccatccggatctcgccgacatgcggcgaccaggagtgcggatcgcgcaccagcgtgccgcagccgaccaccttgccatccttgatcgcgagcaggctcgtgatgtcgccgcgctcgatctcgttgatccaggccgacagcaccttcggctggctgatgttgcgcggcaggaacagcaagtcatgcgtcggcagcttctgcgcgaaggccagcaccgcggcctcgtcggcccgcgtcatcagccggaactcgatgtcgccggcctcggtcttgacgtggcgcggataggaacgttgttcggtcatgtcgatctcttgcccaaccaggagtccagtttcggccacagccgcttgattgcattggcgccggcgaccagcgagacgtgaccgcctttcagcatcacctcctccttgtccgccgagccgatcttggtgatgaggtgctttgccgcatcgtacggcacgatgtggtcgtgctcggcgaccgcgtgcaggatcggcaccttgatgtcagcgagcttcgccgggcggccgccgaccgtcatggtgtcgttgtagagcttgttgtcccacatcaagtccttggtgatggcgcggaaatactcgcccgccagcggcagcgtgtcggtcgcccagcggtcgaacatccggtacgatttgacgaactcgtcgttccagatgttgtcccagagctggatctggccaacgacgcgcgcggccggccgcagcatgtcgaacgattgcaggatcaattcgggcggcatgttgccggtgctgtcgatcaggcggtcgacgtcgaaatagcggcggtcggcaaagttcgagaacagcttcatctcgcggaaatcgatcggcgtcgtgaagcagatcaggttcttcatcgggccgtcgttgaagatcgagccatagagcagcgacagcacgccgccgaagcaatagccgatcaccgacacgtccttttcgccggaatcctgctgcacgcgacggatcgattccggaatgaagtcgaggacgtagtcctccatacgcagcgacttctcctcgggcttcggcgcggtccagtccagcatgtagacgtcgaagccgcgcttgagcaggaattcgatgaagctctgcccgggtaccaggtcgaggatgtagccgcggttggtggtcgccatcacgatcagcaccggcacgcgatagacttcgtcggacatcgggcggtagtgatagaggttcatggtgccgcgcgaatacagcacgtccttcggtgtctcgccgagcgtggggcccgagctcgagaaatactcgacgcccttgatgctgcgctggatcgcgcgctgcacctcggactggacccgctcggagatcgaggcgaaatcaaacggggtgggcgcattcatttgccgtctccctccgatggcgggcgcttcgtgcgcggcggccgcggcgtcgcgccatatccatcgtccggcgccagcgaattgtgatgcacctgctgcagcagtgtcttgatctcgttgagctggttctccatcgactgcaggcgctcagccatgccgaccagctgggcgcggctcggcaggttcatcgccagcagatatttctccatcagctcgccgagttgcttctgcgcgcccgccgcaacgccgccggcctggttcatcaccttcgagaattcaggcgagctcatcaactggttgccgaaggagttgaaccccttctccatctcgccaatcatcgtctgccatatcacggcagggtcgttgcccttgtcggccatgtggccctcctccacagcaagttcgagcgcttgtcgcgcttcggtttgttcgtgccatacgacactgttgccgttgatcggtcaactgcgcggcgcgcccagcgacgtcgaggctcttctgcgctgcgtcaatccatggcatagaggttcctgaccgcgccatcagcaggggatgccagtgaccacgctcgcccatcagccgccgcagctcgcccgcgccaacaacatcgacatctgctacgaggttttcggcgatgcgaatgccgagccgctgctgctgatcatgggcctcggcgcccagatgatccattgggacgacgagttctgccgccagctcgccgcgcgcggttttcgcgtgatccgatttgacaacagggatatcgggaaatcctcccgactgagcggcggcaagcggctgaccgcgctcgagctcatcaagctgcgcttcctgaagatcccggtcgcggcgccctacaaactggccgacatggcacgggacacgatcgggctgatggacgcgctcggcatccgcaaggcgcatctggtcggcgcctcaatgggcggcatgatcgcgcaggaggttgcgatcacctttcccgagcgcgtgctgtcgctgacctcgatcatgtcgaccacgggcaatccaaagatccccggcccgacccgcgaggcgaccgccgtgctgatggcgccgccgccgaaaagcaaggaagagtatttcgtccgctacggccagacctggaaggtgctgcgcaacggctccttccccgaagacgaggcgctcgatcccgaacgcgcgcggcgcaccttcgagcgcggcctcaacccggaaggcgtcggccgccagctccgcgccatcctcgcctccggcagccgcaaggagcgactgcgcagcgtcaaggcgccgacgctcgtgatccacggcaccatcgatccgctggtgcatccggaaggcggcaaggataccgcggtctcgatcccgggcgcaaagctgctgatgatcgaaggcatgggccatgcgctgccgatcccgatgtggccagagatcatcgacgccatcgacaagcacgcgcatggcgccgcggcgaaggcggcatagggccggtatctgcgggtaaccatgtgagccgggagtgcgttcttccgggcacggcacggacgctgtagagagcgctatccatcgctcagcctcgggagctaccagatgaagacccttctccggccacggacagccgtcgccgctctcttcctcgcgcttgcgtcttcctccgcgatggcggccaccagcgaggcgcagcaggaagccaaccggaaagccgtgctggcgttctacgacaaagggctgaaccagaaggacgccgatgctgcgctcgcctatgtcggcaaccgctatgtgcagcacaatcccggcgcggccgacggccccgacggcttccgcaagttcatcggcttcctgcgcgagaagtttccgaactcgcacagcgagatcaagcgttcgttcgtcgacggcgactacgtgatcctgcacgtccacgccgtgcgcgagcccggcacccgcggcaacgcgatcatcgacatcttcaagctcgaggacggcaagatcgtcgagcattgggatgtggtgcagccgatcccagaaaatccggcgaacaacaacacgatgttctgagcgcaacggcgcgataagatcagtttgaatcggatcggcagcggaggttcacctctcccttgggagaggtgaagcaagcacgtagccaacgagatccgatctaagcccaccatacgctagcggctgcggccgagccagcgttgtgtcggaaacagctgcaattgccagcgccgcgccgccgcgccccacacgccccgcggcatgaacagcatgatcaggatggcgagcgtgccgagcacgaccagatataggctgccgtactgcgctagccaggtgaccagcccccacagcagcagcacgccgaccatcgggccctcgatggtgcgcacgccaccgatcacgacgatgaagatcacgtatgcggtccagtcggtgacgctgaaggcggcatccggcgaaatccgcgccttctgcagatagaccacggcgccgaccatgccgctggcgaacgcgaccgcgatccatagcatatggcggatccgcgcggtgcggacgccgacgctgcgcgccgccgctgcattgtcgcggctggccgccagcgcgaggccatggcgcgagcggatgaaagcgtagatgccgagcgtgaccagcacgcagagcaagagcgcaagccagtagaccagcacgtcgcgcgcggcggccggacgcaggccgagcagcgcctgcaccgccttcagcccgaccatctgcgacagttcgcccggcgagatcgacattccggtgccgccgccgagcgacttgaactgggcgcagatcagccgcagcgcctcggcggccacccagctgccgatcgcaaagtatgggccctcgagccggaacagcaagggcccgagcatcgcggcgatcagcgccgcgaacaacccggccagcgggatcgccgccacgggatcgagcccggccatcacgatgccggcgaacagcgcataggcaccgagcccgacaaaggcctgctggccgaccgacactaggccgccccacccggccagcacgttccagagctgcgccaatgtcagcatggtgaggacgaagatcagatcctggatcaaattgcgcgaggcgatcgccggcaacacggcaagcaccgcgaccagcacgatgccggccacggccgcgatgcgcgacagccgcgtgccgacctggatttgccacaccggcacatcggccgcgtgctgctcccggcttgccggcatgtcgatgcttccgacgctcatgtccgcctcgccgggaagagaccgcgcggccgcaccatcagcacggccaagaaggtgagatggccggccaggatctgccattccggattgatccggcccccgatcgcctgagccagcccgagcacgataccgcccgccagcgtgccccacaggctgccgaggccgccgatgatcacggcctcgaacgcatagagcagccgcgccggcccgatcgacggatcgaaactggcacggatgccgaacacgacagcggcgatcaccgagaccgcgagcgagagcccgaccgcaatcgcatagacgttgcgctcgttgacgcccatcaattgcgcgatcgcgggattgtcggcggtggcgcggaaggcacggccgagccaggtgcgatagaagatcagctgaagcagcgcgacggcggcgatcgccgtcaccagcgccgtcagcggcgcgaggccgacgctgagacccggggccagcgtcaccgacgaggattcgaaggcgccggcctgcaggcggcggctgtctgcgccatagccgagcaacagcccgttctggatcacgatcgacaggccgaaggtgacgagcagcggcggcaagatgtcgtcgccgagcacgcgctccaagaccagccgctgcagcacgaagccgagcacgaacatcgcggcaacgaccagcagggatgcggttacaagcggcaggccgagcgcggtggtggcgctgagcaccagataggctgcaagcaggatcagatcgccgtgcgccagattaaccaggcgcatgatgccgaagatcagcgacaggccgagcgcgaacagcgcatagacgccgccgagcagcacgccttcgatgatggtgtctagtccgctcatcgctccctcatgctccgaaataggccgcgcggatcgtgtcctgatccacatcgtcaggctttccgctcaaggtcacccgcccctcctgcaagcaatagaagcgatctgccgcccgcaacgcgcgggcgatgtcctgctcgaccagcacgaccgcggtgccgccggagcggatctgcggcagcatccggtagatgtcctccaccacgatcggcgcgaggccgaggctgatctcgtcgcacagcaggacctgtgggttcgacatcagcgcgcggccgatcgccaccatctgctgctggccgccggacagcgccgtgacggcgccgcgccggcgctccctgagcaccgggaatatccgatagaccgccgcaagatcccacggtgcggtgcgctcgccgccataggcgccgatcaggaggttctcctcgacgctgagcgaaggaaacagctgccggccctccgggaccagcgcaagcccgagccgcacgatgctggccgcagacgcatcgccgatcgcgcgtcccttgagatgaatggcatcggggcggttcttcacgagtcccgccagcgacttcagcatggtcgacttgccggcgccgttggcgccgatcaccgcgaccgcctcgccctccttcagttcgaaatcgatgccgaacagcgcctggaagtcaccgtagaacgcatcgagcgcggagacattgagcagcgcggtcatgccggcacgcccatgtagatggtctcgacctcgcgcgagcgcatcacctcggcgggcacgccttgcgcaacgaccttgccgaaattgagcacgaccagccgctgcaccaccgcgagcagcgcgtgcaccacatgctcgatccagatgatggcgacaccctcggcatgaatggttctgatggtctcgaccagctcatggcattcggcatcggtgagcccgcctgcgatctcgtcgagcagcagcgtgcgcggcctggtggcgagcgcccgcgcgagctcgagccgcttgcgatcgagcagcggcaggctgccggcgagccggttggccttggcttcgaggccggtcagatcaagcatgcggccgcaatgctggaccgcatcggcctccgacagaccgccgccgaactgggcggcaacggccagattctcgaacaccgagaggtggtcgaacggctgcgggatctggaacgagcgcccgatgcctgtgcgacagcgcgcctccggagagagatgcgtgatgtcggcgccatcgaggacgatgcggccggcctccggccgcagcaggccggtgatcaggttgaacagcgtcgacttgccggcgccgttcggcccgatcacgccgagcgcctcgccggacgcaagggtcaggtcgatggcatcggcaaccacgatggcgccgaacctcttcgagacggaatggagttcgagcatgtttgctcaccgcatggattcgctgggagaagatgcgcggccgtgcctcgcatcctcgatcgacaatctgcctgcgacgcgctcgctagctcagcgcctgcatgtcgccgccgagcgggatttgcggcgccagtctgttgtcggtgatcaccatgtcgtatttgtcgccattgagccgccattggccgccgaccagcggcgtcttggcgatgttcttggccgcgaatggcggcaccgcgctggaaccgaacgcgacctggcccacgatggtgtccaactttgtggctccgatcgcctttgccagcgcggcgccgtcgctcggatcgccggagcgcttgatcgcgtcgatcgcgacctcgaacagcgaatgcacgaagccgatcggctgggtccattgcttgccggaggcctgctcatagcccttggcgagatcggccgcgctgacgccgctgaggctcgacttgtagggatgcgtcggcgtccaccacacctcggtcgagatgttgttgccgcccttgccgagcgcctgcacagaagcaggaaacagcagcgccttggcgaccgagacgaccttcggcttcagtcccttctgccgcgactggttccagaaggtggtgaagtcgggcgggatgatcacgccggtgatgatctcggcatcggcgccacggaacgcggcgatctgcgaggagaaatcgtcggtgaggttctggaagcggccgggatcggtcagcttgaagccctgcttggcgagcactggcgggaagccgatcgcggtgtcgccccaggcgttgccgtcggcatcgttcgggaacagcgcgccgaccgatttgttggtcgcgacctggctccacatgctggtgaagacgccgatcacgtcctccagaccccagaaatagtggaaagtgtagtcgaacggcttccagctcttgggatcgccgggattggcctggcggccgatgaaattggtctgccacggcgccacggaggagatgcacggcacctgctcgagctcgcattgcgtcgccaccggattgttggtttcgggtgtcgcgccgaccacgatcaggccgacattgtcgcgggtgatcagctccttggcgacttcggcggcgcggttcggattcgactggctgtccttggtcaccacctcgaccggatagatctgcgatccaaccttgacgccatccttgatgaacttgcggaattcacccagcacgaaatcgtcggcctcggcgaaggccgccagcggcccgctcttcggcgagacatagccgatcttgatcggcttgttggccgcccgcacggccggcgcgaacaacgtcgtgctgcctgcggcggcgaagcctccggcgatgccctgcagcacgcggcggcgatcgaaggacattgtgctcaactgatccttgctcattttcccctcccttgaggcaagccggtcgaaagccggctgccgttccattcgttctgaaaagagtcgccggcgtcgcgccgcatcacgcggcggcgacggacttcgcttgcgcgctgcgaccgaggatccggccgaacacgtcgagcagcacatcgctggcgtcagttgcggactccttggcgcgccaggcgacatacatgtcgggacgcaccagcacgcagccgtcctcgtccacctcgctctggcgataccagtcggcatagatgtcgagcgcatcgcagccctgcgggccgatcgtcaccacatcgaccggcaggccataggccttctcgaccgcggccgcggccgtcttccagccatcgccgccgatcccggtgagcagcgtgaagcggcccttgccggtgagatcgagcgtcgacttgcgctcgccgtgatgctcgacccagacatgcggcagatgcgcgccgggccaggtggtcgcctgatagtagagctcgtgatcccgggtgaaggccggcatcggcgtgccgtcggatacgaccgcggtcgacccgtagcgctgattcagctcgacgccgtggcagttgaactcgtagctcttgttggcgatcgcctcgtagagcttcttgcgccgcgccttgccctcggcggtcggtgccttgcgcgcggcgattgccttgcgtgcttcggccggatcggtcgaggcgacgagccccaccgcctcgaagatcggcgggaagtcgccgatgctcttgttggcgcgggtcacgatctgcttgccgaccggctgccgttcggccgaataggtctcgagcagcgacggcgcggcgtggccctccagcaccagcttcagcttccagcagagattgtaggcatcctggatcgaggtgttggagccgaggccgttggtcggcggatggcggtgcacggcgtcgccgacgcagaacacccggccagacgaatagtggccggcatacatctcgttcacggtccaggtcgaggtcgagcggaccttgaccgcgagcgtctcgtcgccgaccagattgcgcacgatcgagatcgcctcgtcattagagagcttgcgctcgccctgctcgatgtcgtagccccagatgatcagccattcgttccacggccgcaccatgcggatcaggccagcgccgatgccgccgatctcggcacccggctgcagcacccagtacagcacgctcgggcggtgcgcgacgtacttgctcaaatccgcctgcacgatgatgttcatactgccggcgcggcccatctggccctccatcggcagtccgatcacctcggcaacccggctgcggccgccgtcggcgccgatcagatatttggcgcggatctgataggtctcgccggacagacgatccttcaccgtcgcggtgacgccgtcggcatcctgcaccaggtcgacgaactcggtgttgaagcacagcgaggtgccgcgctggccggccgcctcgatcaggatcggctcgaggaaattctgcggcaggtcgcagatgcgggcgggactggcgagatcgtaatccgccttgcgcgagggatggttgccccaggaatagagccggccgaactcctcgccggcgaggctctcgcagaacacgttgttggccatcaggtgctgcggcaccgcctgcgccaccgccttctcctccaggccgagatcgcgcagcacctccatcgcacgctggttggtgatgtgggcgcgcggcgtgtcggccagccagccatatttcgtcaccaggatgtgcttgacgccgtacatgccgagcagcgccgccgccgtcgcgccggccgggccgctgccgacgatgagcacgtcggtctcaacaggtttgctggtcatggtcctctccttggtcgtgttgtcggttgtgatcgttattccgcggccatcatcggctgcggcaccaggccggcgcccggcttcatctggaagtcgtaggtcatcaggtgccaggggcctgcgacccgctcgccgttcggcaacaccggctcgcttttcggctcgacccgcgcgacgagttcgtccttgacgccgaacaccacgtcgctgcgcaggtattcgtcgccatcgaggaacacgtgggtgatcagcggctcatagccatcggccttgaccaggaaatgcacatgcgccggccgcatcggatgccgtttcgtcgcggtgatcagatcgccgaccgggccatcggtcgggatcggatagctgcacggcaggatggtgcggaacgaaaagcggccgtcggcatcggtgacgaagcgcgcgcgcagcgacggaccatgcgcggcgtaatcagccttctgcgaatcgtagaagccgtcatcgtcggcatgccagacgtcgatctcggcgccggcgagcggcttgccggccagatccgtgacgcggctctgcacgaacatcacttcgccgtcgatcccgtcggagatgtcggcgccgtgcggcgtgacgcggtgctcgccgacatagaacggaccgagcaccgtggtctcggtcgcgccctcgcgctcgcgatggttgaccgcgtcgaccagcatcgagacgccgagcacgtcggacagcaggatgaactcctggcgcagcggcgtgcaggtctgaccggtgcgggtcaggaactcaatcgcctgattccattcctcgaaggtgagctcggtgcgacgcaccaaatcgtgcagcgacttcaccgtctcctcgatgaggaatttcagtcgcttgttcggcgtgtcggcgaagctgcggatcacctcgtcggtgaggtcatgctcgttgaagttagccatcgtgttgtcctttgatctcgagaggtcagtgccgcgcgggcgcgtcgccgcgccaggccgcagcgatcaggtcctggatcgcgacgcgctccacaggtcttggattggcataggggctgcgcaccgccatctcggcggcacgcgcgatgccgtcctcaggcattccgatgtcggccagccggcgcggcagcgcgagccgctgcgcgagatcgaacagcccttgcggcgcatcatccgtgcgcaacgcgcgcgcaatccgggtcatcgcttccggcgccgcagcggcgttgtaggcggccgcatgcggcagcacgatcgcatgggtttcggcatggggcaggttgaacatgccgcccagcacgtgacagagcttgtgatgcagcgacatcccgaccgcgccgaggcagacgccgcacagccaggcgccgtagagcgcgtcgcgccgcgcgcccgcatcggcgggcgcagccacgatgcgcggcagcgcgcgggcgagcgcggcggtgccgtcctccgccatcagcgaggtcaatgggttggcgtcgggcgcatagagtgcctcgaccgcgtgagcgatcgcattcaagccgctggcggcggagacatgcggcggcaggctgacggtgagatcgacgtcgtagatcacggcgtccggcaccagatcctgggagtgctgcgtggtcttgatgccgttcgtggtctcaccgaggatcggggtcatctccgagccggcataggtggtcgggaccgccagatgcggcagcccggtgcgcagcgacagcgccttgccgagcccgaccgtcgagccgccgccgatcgcgaccagcccgtcgatgtcgcgggattccacgatgcgaagcgcttcgttggtgacctcgaccggcgtatgcatccgcgcgccggcaaacagtcctgcgagccggtcgccgaggcccgcgccgagccggtgtccgaggtcctgctgctcgggggtggtcaacaccagcgcccgcttgatgccgaggcgctcagcttcctcgccgagccgcgccgcggtgccggcgccgaacagcacgcgatattgctgcgagcaataggcaaaggtgccgctgccggcatttccggccgccgcgatcggcgggcgtgcggcatcgggcgctgcgatgctcatggcatttctcccagccggcggaccggcacatttcgctttgttgggagaaagctagcggcaggcggcggtcgcgggcctgcacgaaaccggacagaatctgcacaaaaccggaaaaatcgtcagccgggctacggctagtggctgcgccggtacctgcccggcgtcacgccggtgaagcggcggaacatgcgtgtaaaatgctcctgatgggagaagccgcaggccagcgcgatgtcggcgaggctctgcgtctcgtcggcaagcagcgccctggcgcgctcgatgcgcagattgagcacgtattgatagggcgagacgccgctggtcgccttgaacaggcgcacgaaatattcggtgctgcggccgcacaactcggccagctggtcgagccggatatcggtgtcgagattggcgtcgacgaactcgcggatgcgcgccatctgcctgttgctcagcaggttcggatgcttgccggcctccacgctcggcttgtggaaattgatcgcgacgaagcgattggcgatcgcctgcgcgatcggatcgacgaacagcgacgaggccggcaggccgccggtgatggtctcgccgatcgccgcggcaagatgctccagcacggcgtcctgattgccgagcatcggggccagcccaccgatcaggttcgcagccccgtcccggccggcgaacaggtcggagcgcagatagatgtgggtggattccagcgcttcacgcagcaccacgttgcaggtgtgcccggccggcaggaagaacacgccgccgcgcggaatctgccgggcaaccgacttgccgtccattacataggtgatgtcgaccggaccgccccgatgcaacaccatcagattgtcggacagcgcgtggaagtgcccgtcgaacggccgttcacgctgcaccgaggcataggccgacgaccagccgagcccttcgctcgaaccacggaattcggcctggaagcggttcaggatcccgtgcgtctcctgcaccccaaaattcgacgtcgcctgcatccgggagtccaagggctcgaggcctcacctgccgccaagtgaaacccaaccgccctcggttttcaatacagtcagaacccggccgcatggccggcgatcttgttgcatcgcaatagcgacgcccgctacgccttggccgcgatccagatcacgtggcgtacaccgcggcctcgcccggtggcacggacggcaatctcgttgaccgcgaacccggcccgcgacagcgctttcgggaacttggcattcggaccggacgaccagacggcgagcacgccgccgcgccgcaaggcggcatgcgcgaccttgagcccggagacgtcgtacagcccgtcattggccttgcgggtcaagccttcggggccgttgtcgacatcgagcaggatggcatcgaaagtgcgcggatgacgcgcgatcacgtcggcgacatccacctcctcgatgctcacgcggggatcgctcaggctgtcgccgaaaatctccgccatcgggcctcttgcccaggcaacgaccgccggcaccagctcggccaccataatctgcgcctcggccccaagcaccttgagcgcggcccgcagcgtgaagcccatgccgaggccaccgatcaggaaatgcggcgctgcgacctgctcgattttcttcgcagcaagcgtcgccagcgcctcttccgagcccgacagacggctgttcatcagctcgttggtgccgagcatgatcgagaactcgcggccacgccgcatcagacgcaattcatcttcggtgccgggaatccgcgcggtatcgatcttttcccatggaatcatgcggcggcttgtaacatggcgggcaccttggacgaaggctacccgccagcccaaacgtcgagcacgtagcggttccctgtgcccatctcctcgatccagcgcgcggcggcatcggcgtcggcaccggcgcgctcgcgatagatcgacattaaggttgccttgacgtcgggctccatcttgccgccgtcgccgcagacgtagacgatcgcgcccttctcgatcagctcccagacccgatccttctgcgccgcgacgaggtgctgcacataggttttcggcccctcggcgcgcgaaaaagcggtgtggagctctgtgacgccatcggccgcgaacgccttcagctcatccgcatagatgaagtcctgctccggatggcggcagccaaagaacagcatcgcagggccgagcgtcgcgcctttcaccttgcgcgcggcgcgctcctgcaggaagccgcggaacggtgcgaggccggtgcccgggccgatcatgatgatcggcacggcattgtcgtccggcaggcggaagccggccttggtctccttgatcgtggcgtggacggtgtcgccggcgcgacggcgcgccagatagttcgagcagacgcccttgtagatgccgtggcccgagctcgcaggcgcctcgaccacgccgaccgtgacactgcagcgctgcgcctcgccggccggagacgacgagatcgagtaatagcgcggcgccagcagcgacagcatttcgaggtagaggtggaacggcagctcgcaggccggatattcctcgagcagatcgaacaccgatttgcgcttggccaatacttcggtgcgatagcgttcggccgaagcgtcgtcgtcgccgacataggccgtcagcttcggcttggtcaccgggcagcgggtgtgctcggccatgatctggatctgcttccgggtcgcgacctgctgcagctcgacgaattcggtgagcagccgcccgaccgacaccgcattgccgaccggcagttgcgcgcggcggccttccgagacctgcaagcggatctggtcggccggcaggaagccgaaccggcgcgcaacggaatccaccaaggtcggatcgttgcgcggcaccacgctgagatgatcgccgacgcgatacttcaggctggccggcaactcgacctcgatatgccgggtcgagcgctccgacggatgcgcgccgtccttggtctgcagctcgttgttggcgagcaccttcatcggcaccgcgccgccctgcgtcacgatggtgttgaccgcgccctgcgccaccggctcgatcgcgtagagcggctcgtcctcggcggtgcgggtgaaattccagtcgatgccgaattccttggtcgcgaccttggctgcctccgggaaccacttctggaactggccgtcgagatcgctgcgcgcatcgccctcgccgcgcggatagaccgcgcgggcgccatgcctggtcagttgctcgtcgatcaagcgcggcaccgactgataggtcgccgcccaatcgctgttgccgcagccgaacaccgcataacgcaccttggcgaaagcgtccttcggcaggtcgctctcgagccatttgacgaattgcgtggcgttgtcgggcgccgcgccgttgtaggaggcgcagatgatcagcacgccgccctcctccggcagtttgccgacatagtcgtccagcgggccgagccgggtggcgaaaccattgatctcggagagatcggccatgcgggtcgccagttcctcggccgagccgaggttggagccgtagagcaccagcatcggcgtgttatggccgggacgcgtggtcggcgcgcgtggtgccttcggcgcggccgcaaccgcgccggcgctgccagcgaacgcgccgcgatccctgtcgtcgcgcggccgcaccttgatcctgaagccgtcgggcttgacggtcagcgtctccttcagatgcatctggtagcgatgcacgtcgagcagcttgaagcgctgcaggatcatcccgatcgcgagcgccgcctcgtgcatggcgaagccgcggccgatgcaggcgcgctggccgttgccgaacggcttccaggcgttgatcgggcgcttggcctcggcttcgcggctgaaattctcgggatcgaacacgtcggggttcgggccccagaccgagggatcgcggtgcagcgccatcaccaggatggtgatgaaggtattcttcttgagcttgtacttgccgccgatcatctcgtcgttgagcggcgcgatgccgtaagccggcgccggcggccacagccgcagcgcctccttcaggcattgggtgatgtaggtaagctgcgtcacctgctgataggtcggccgcgcgttaacgtcgggaccgaggacgcggtcgacttcctcataggccttcttcagcacctcgggatgcttcagcagcgcatagatcgtgcacgacagcaggccggaggtggtctcgtggcccgcgatcaggaacgtattgatctggtagcggatgttgacgtcgtcgagctgctcgccggtcgcgcggtcgacgccggtcatcatcgctgccagcatgtccttcttgtcgtcggtcgcggcggtgttgccgcggcgctcggcgatgatctcgtcgaccatcttgttcatgaaggcgacgtcgtcggcgagcgtcttgcgccgcttctgcatccacaggccttcgagcggcaggccgcgggtcatcatgatggtttcgagcgagcgcaccagcgattccacgaaggggtggtagtcgcggcggtagaaggaattgaagcgatagtcgaagccgcacagcccgatggtgtcgagggtcagcgccgtcatgtcgtggacgacctcgatctcctcgtcggcgttgaggcgctcccatttcttgaccagttgctcggcgatatcgaccatgctcgggtggtacgactgcatggcgcgattgccgaacggctgcagcaggatgttgtgcgccttgctccagttcggctccttggtatctgcggtgaacagcccgtcgccgccgaccgcgcgcacccgacgcagcgagccgcgcaccgccttgtcgaagcgcttttcgtcggacagctcgtcgacgagatcgtggcctgacacgatcaccagcggagcgcccatcatgtcgagccagaaaatcggtccgagctccttggagagcttgaccagatgctgcaccggcgcgctcgaatccagcgacagcatgttgccgaccaccggcttcgtcggcggatgcgggatcggactcagtctattgccggacgccatcttggaagtgccccctaccctgtcgctcaaccgtcattgcgagcgaagcgaagcaatccatcgtgccgcaagcggatagaatggattgcttcgtcgctccgctcctcgcaatgacggcaaaattatccgaaccgctttctgcgccactcgatcagcttggcgctgacctcgtcaggcttttcctgctgcgtccaatggccgctgtccttgaccaggtgtttctcgaggtccggcaccagccgctccatgccgtcggccgcggacggcggcagcaccgcgtcattctcggccatgatcatcagagacggcacccgcacattgtgatccagcccggccgagcgttcccagttgcgggtgaaattgcgataccagttgatgccgccggtgaagccggtcctggtgaaggtgtcgacgaacaccttcttctcctcggccgacaggatcggtgtccgcggatcatgcttggcgtcgtagttcgctatcatctgcggaaacgccagattgagccgcgccgaggcgccgacacctgcgatcggctgttcggggggcgcatcggcgggacgtggtgccggcttgcgcatgaaagcgtcaaaagtctgctcgacccggctgccgaagatgcggtccggctcgcgcgccggatcctggaactggacgatgtacatctggtcgccgaagcgctggcggaacagcgcgatcgggtccatgggcgcgcggtcccaatgcggcgtgttgacgccgacgacgccggccacccgcgaagggtgcctgagcggcatctgccagacgacaaaaccgccccagtcgtgaccgacgaagatcgccttgtcgatcttgagatggtcgagcagcccgaccaggtcgccggtcaggtgctccatgtcgtaggcttcgaccggctccggccggtcggtcgcgccgtagccgcgctgatccggcgcgatcacccggatgccggcctcggccagcgccttgatctggtgacgccaggagaacgcgagttctggccagccgtggcacagcaccacgggcggcgcgtcggtcttggggccggcttcgtaaaaccccatgcggatgccgttcgtctcggcgaactgcagcggtggcatttcgatcattgcaggaattcctattcggccgcgcccttgatgtcggcaggcgggggcgcgaacgccgcctcgagtgcatcgaactcgagcggcagcatgtcacacatcacctgcacgtggggaatgatgttggcaccgacgatgaacccgaaatcgagctgatcgcgatagctctgcaccgtgatgttgagcgcaatcccgtgggtcgagatcgagaccgggaagatatgcagcagctccgcgcctgccgcgtacagcgtctgccgcggccccggcacgttcgacaccgtgatgttggtcgccggcggcagcacgttggagaggtcggagcggctgtacagcagcgccatgatctgcaccaggatcggcgcgcccaacagcgagatgttggaaacctgcggcatcagggcgcgcagcggatgcgacatctccttggacttggtcgactgcgcgatgatggtctccagccgcttcctgggatcctcgacgtcggtcgcgatcgaacagatcatgccgaacacttggttgttggattcggcattgccctcctcgcgcagcgagatcggcaccccggcggtcagcgatttgttgggcagcgcgccctggctgatcaggtagcgccgcaccacgccggaggcgagcgccagcacgacatcgttgagcttgccgccggacgctttcgccagcgccttggcgcgcgacagcgagatcgaggtgccggcaaagctgcgctccgacgagatcgccttgttgaggatggtcggcggcgaggacatcgcctgcaggctctcgcgcgaccggggatcggcgaccttggcgacgacgtcggacaggctcttcaggaccgtcggcatcgagccggcgaatttcaccgcgctctcgatctggaacatggcgttgtcgaacaggatcgagccgagatcgctcttgccggaacgcggcagctccaggctcttctgcgccgcggctgccgcctcgaacggctgggtccacaactgctgataggcgtcgatcagattggccgcgatgtcgcgcggctcctgcgccaccttcttcgcgctcggcggctcgatctcgcgcggcaccggcgtcaggtcatagatcatgctggtcagtgcagcacctgcaccgccgtcgatgcaggcgtggtgcatcttggaatagagcccgatctcgttgtccttcatgccttcgaagacgtagaactcccagagcgggcgggcgcggttcaagagcttggcatgcatccagccgacgatccgctccagcgtggcgcggtcgcgcggcgcgggcaggctggcgcggaagatgtggcggtcgatgtcgaactgatcgtcctcgacccaggacggatgatcgatgtcgagcggcgccttctgcaggcgcgccttgaggatcggcgcgatatgcagccgcgaggcgatcatcgccttgaattcctcgaagaagtcgcccttgtagccgtcaggcaggcggaagatcgccatgctgccgacatgcatcggcatttccggcgtttccagatacagaaacgatgcgtccagcgaggacagcttcttggcgtcgctcatgatctcctcccgagagccaactcacgcgggcgccttggcggcgcttctcgtcgtcaggatagtgcctgttctgccggcccgtaggcaatggcaaaggggcctgaccggtcaaaatgccggaactgcccttccggctgtgccagccggtccgcaatcgcccacagcgccgcagggttgacgccgaggccgagatggctggcgaggtgcacctcgatgttctcagcgcgctccgacgggcgcacccgcgaggtccgccagttcacgatgccgtcggttcgggaatagatcgaggtggtcggcaccggcatgtcaccggcaatcgcggcgcggacctcgggaatgtcgtccacgcgctcgccggacaacagctcatagagccgcgtcgcattggtggcgcggatatcctcggcgaacgggctgcccagcgtgacgatggaacgcaccagctccggcatctgcgacgccaggtcgcgcgcataaacgccgccgaggctccaaccgatgatcgagaccttgcgtcccgacgcctcatggacccgcttcaacagatcgcgcagcgcagtgcgcctgctggaaatcccgccgaaattgcgacccatgttccaggcataggcgtcgtagccgagttccttcagatagcgccgcatcggcgccatcgacaggtcgctggcgaggaagcccggcagcgccagcaccggatgaccgtcgcccttcggcgcttgcagcagcaacggcgacagcagcaggctcgaattcagctcgagcacgccgcgcgcttcggccagcatcaggaacaggctgggcgggcgcaaccggcgttcggtcccatcaacgctcctgtccatgtcgatcactatttcttcttgctggagccgccgaagccggccatcgccacgaacatgtcctggaagcgttcggcgagcttgggatcgaaggtgaaccagctctgcatcagcgattccggcgaaatcttctcgatgttggacagcatctgctgctgcagcttgtccatgaccgcggtctgcatcggctgcacatcgggcagaccgaagaactgccgcgcttcaaggggcgtacaatctacctcgacgttgaccttcatatccgcctcctcaaatgcgcctcagcccagctccgcttggcccggcgcagtatcgccgggacggggtcggttgcgcaagcgagccatagctgccccaacggacagtcggcctcaatcacgccttatggtcaaccaaagggtttgtggccagcaacagcactccgaaagtcgaatgtcacgcgcgcgcaccacccgcctactctcaaattccattggttgcgctgcacccgcgcgagccgattaaccctccaggaaatcgcgcttgcacggccggcaaactctggcaacatgcatcaataataccagccggacaaagcagccggcggataaaaatgggggacgcgggatcacatgtcggtacgttggagtttgtttgcggcgactgccgtcgcactgctcgcccttgccttgccggcatcggcccagacgctgaaatacgccaaccagggcgagctgaagtcgctggatccatacacgctgaaggaaaccacgacgatcgcgcatcacggccacgtctatgaaggactggtcgctcgcgacaagaacctgaagatcatcccggcgctggcggaaagctgggaaacggtgagcccgaccaaatggcgctttcatctgcgcaagggcgtgaaattccacaatggcgaccccttcaccgccgacgacgtgctgttctcggcggatcgcgtccgcgccaagggctccaacttcctcagcaacgtcccgcccgacgccaagttcaccaaggtcgacgattacacggtcgacgtgacgctggactcgcccaatcccatcctgacctcgcaatgggatagctggtacatcatggacaagaaatggtgcgaggagaacaactcggtcgcaccgacgccggcctccgccaccaccccgagctacgcggcgctgcacgagaacggcaccgggcccttcacgatcgagagccaccagcccggcgtgaagaccgtcttcaaggtctacccggattactggcgcaagccggagcataatctcaaggagatcatcttcacctcgatcggctcggacgccacccgcgtcgccgcgctgctctcgggcgaggtcgacgtcatcgagccggttccaatccaggatatccagcgcgtcaattcgagcggcaccgcgaccgtcctgaccgggccggagatccgcaccatcttcatcggcatggacatggcgcgcgacgagctgctgtactccagcgtcaagggcaagaacccgttcaaggacatccgcgtccgcgaagccttctacaagacgatcgacgtcgagctgatcaagacccgcgtcatgcgcggcatgtcgacgccctcgacgctgatgatcgcgcccgagctctatccgctgtcgaaggagttcacccggccgaagctcgatcccgacggcgccaagaagctgctcgccgacgccggctatccgaacggcttcgaagtcacgatggattgcccgaacgaccgctatgtcaacgacgccgcgatctgccaggctgtggtcggcatgctggcccgcatcggcatcaaggtgaacctgctggcgcagccgaaggcgcagtatttcgccaaggtgctgaagcccggcggctaccagacctcgctcttcatgctgggctggacgccggcgacctcggattcccacaacgtgctgcacgacattttcggctgccggcccgatccgaaggattccacgcggggcgaggccaatctcggcggctattgcaacaaggaagtcgacgagctgaccgacaaggtgctggtcgaggccgacgacgccaagcgcaaccagctgatcaagcaggcctacgagatcgtcatcaaggactatggctacatcccgctgcaccagcagtcgctggcatggggcgtatcgaaaaaggtcaagctgacccagcgtgcggacaaccaggtcctgctctactgggcgaccaaacagggtgaatagtggttttggcgaattgggtcccggaagcgcctgcttccgggacttctcgttttccgggcgcgcaatgccgcgtgccgcgtttcaagagcagtgaaaggtagagatgctggctttcactctgcgccgcgtactgcaggcgatcggcgtgatgctcgccgtcggcgtcatcgcgttcgcgatgttccgtttcgccggcgacccggtgaaccagatggtgtcgatcgacacctcggccgcggagcgcgcctcgatccggcaatcgctcggccttgacgatcccgtgctggtgcagttcggccattacttcatcaatgccgtgcagttcaagttcggggtgtcctaccagttccgcctgccggtctcctcgctgttggcggaacggctgccggcgacgctggagcttgcgatctgcgcgacgctgttcgcgatggcagccggcatcctgatgggggtctattcggcgctgcgccgcgacaccgtgctggccaaattattccaggcggtatcgctgatcggcatttcgctgccgacctttctgatcggcatcctcctgatctatctgttcgccgtgacgctgggctggctgccgtccttcggccgcggcgaggtggtgaagctcggctggtggaccaccgggctgctcacggtctccggcctgaaggcgctgatcatgccggcgatcacgctcggactattccagatgaccctgatcatgcggctggtgcgcgccgaaatgctggaagtgctgcggaccgactatatccgcttcgcccgcgcccgcgggctgaccacgcgtgcgatccatttcggccatgcgctgaagaacaccctggttccggtgatcaccgtggccggcctgcagtttggctcggttattgctttctcgatcatcaccgaaaccgtgttccaatggccgggcatggggcttctgttcgtgcaggccgtgcaaaacgtcgatatcccgatcatggccgcgtatctcctgatggtctcgctgatcttcgtcaccatcaatctcgtggtcgacatcctctacaccgtggtcgatccgcgcctgcggtcaaccgtcagccgcgcagcgtgaggggctgaccgatgtcagacgccgtcgtccccgatcgcacgcaggaccacgagccggctgccggctggttcaagcgcgcgctcgacagcgacattttctattcgttccgccgctccaaactgacgatggtcgctgccgcgatcacgctcgcgttcttcctgctggcgatcttcgcgtcctggcttgcggtgcagaacccgttcgatccggcgcagctgcaattgatgaactcgcggatcgcgccgctgtggaccgccgacggccagagcccgttcctgctcggcaccgacgagcagggccgcgacgtgctctcggcgatcctctacggcctgcgcatctcgcttgcggtcggcttggccggcgtggtcttcgccggcgcgctcggcatcgccctcgggctggtcgccggctatttcggcggcgtggtcgacagcgtgatcatgcggatcgccgacgtgcagctcacctttccggcgatcctgatcgcactgctggttaatggcgtcgccaagtcgctgctcggcaaccggctcgacgagatgagcacgctcggcgtgctgatcatcgcgatcggcctcagcttctgggtgcaatatgcccgcaccgtgcgcggatcggtgatggtcgagaagaacaaggattatgtggcggcggcgcagctgatcggcctgccggcgcagaaaatcatgctgcggcacgtgctgccgaatacgatgggcccgatcctcgtcatcgccaccatcaacctcgcgctcgcgatcatcaccgaggcgacgttgtcgttcctcggctccggcatgcccgacaccatgccctcgctcggcaccctgatccggatcggcaacaactatctgttcgccggcgaatggtggatcgtcgcgttcccgggcattgccttggccgggctgatcctgtccatcaacctgctcggcgactggctgcgcgacgcgctcaacccaaagctccgatgaccaagcctgttctctccgtccggaacctcgaggtggaattcgtcacccgccgcgcgaccttgcgcgccatcaacggcgtgtcgttcgacatcgccaagggcgaggtgctcggcatggtcggcgagtccggcgccggcaagtcggtcaccggccttgcggtgatcgggctgatcgatccgcccggccgcatctccgccggcgagatcgagctgtcgggcacccggatcgaccatctcccgtcagaggagatccgcagagtcaggggcaagcggatcgggatgatcttccaggatccgctgaccagcctcaatccgctctaccggatcggcgaccagatcatcgaaaccatccgcacccacaccaacctcagcgagagcgccgcgcgcaggcgtgccatcgacttgctcgccgaggtcggcattcccgcccccgagaagcgcatcgacggctacccgcacgaattctcgggcggcatgcgtcagcgcgtcgtcattgcgctcgcgatctgcgccgagccggagctgatcatcgccgacgagccgaccaccgcgctcgacgtctcggtgcaggcgcagatcatcgcgctgatcaagcggctcggccgcgaccacggcaccgcggtgatgctggtgacccacgacatgggcgtgatcgccgagacctgcgaccgtgtcgcagtgatgtattcgggccgcatcgccgagatcggcccggtgcaggaggtggtgcgcaatccgctgcatccctatgccaagggtttgatgggcgcgatcccgacgcttgcgggcgaagacaagcgcctggtgcagatccccggttcgatgccgcggctgtcggcgatcccgccgggctgcccgttcaacccgcgctgtgcgtttgccttcgatcgctgctgcgtcgaacggcccgaaccgatccggcagggcacccaatcggtggcctgccatctgttcgagccggcgaaggagacggcggcatgagcgggacattgatcgaggtcaggaatttgcgccgtgtcttcgacgtctcgaagccgtggctcaaccgcgtgatcgagggcggccatctcgaactcttgaaggccgtcgacggcgtcagcttcgacatcaagcgcggcgagacctttgcgctggtcggcgaatccggctcgggcaagaccacggtcgcgcgcatggtcgtcggccttttgccgccgagttcgggcgaggtcgtcatcgatggcgtctcgatgaccgatccgcggcagggccaggcgcgccgccggctgcgccggcgcatccagatggtcttccaggacccctatgcgagcctcaacccgcgctaccgggtcgccgccatcgtcgccgagccgatccgcgccttcgagctgatccagagcgaacgcgacatcaaggcccgggtcggcgaactgctctcgctggtcggcctgcatcccgacgacggccagaaattcccgcacgagttttccggcggccagcggcagcgcatcgcgatcgcccgcgcgctcgcctccgaggccgagttcatcgtctgtgacgagccgacctcggcgctcgacgtctcggtgcaggcgcagatcctcaacctgatgcgcgacctgcaggacaagttcggcctgacctatctgttcatcagccacaatctcgcggtggtccgccacatggcgagccggatcggcgtgatgtatctcggccgtatcgtcgagatcgccgagggccggcaattgttcgagaacccgcggatgccctacaccaggatgctgctcggtgcggttccggatcttgcgatgtccggccgccagcgcattccggtcaagggcgagatcccgaacccgatcaacccgccgccgggctgctcgttcaacccgcgttgtcccctcgccttcgatctctgccgggagaagccgccggacctgatcgacggcgtcgcctgccacgccgtcaacagccccgccgccgccgttccggcttgatcacgcggatgggagcggccatgtgcaccaagcggttggcataccagcccggctgtgatcaagtgcgcgcgcaacaagtccggcaagccgcctaacggtgaatagcatgagcaacgtcaaccccgatccattcaccacaaggcctgagatcgaaggcaccttcggcgtcgtcacctcgacgcactggatcgccacagcggtcggcatggcgacgctggaaaaaggcggcaacgcctttgacgccggcgttgcagccgccttcacgctgcaggtggtcgagccgcatctgaacggccccggcggcgacgttccgatcatcgtgcacgacgtcaagcgcggcaagagcgaggtgatctgcggccagggcccggcgccggcgaaggcaacgattgcccactaccgtagcgagggcctcgagatggtgcccggcaccggtctgctcgccgcctgcgtgcccggtacgttcgaaacctggatgctgctgctgcgcgactacggcacgctgaagctgcgcgacgtgctggagcccgcgatcttttatgcccgcgacggccatccgctggtcgagcgtgcgtcagcgaccatcaagaccgtcgagcagctgttccggaaatactggaccacatcggccgacgtctatctgcccaatggcgaggtgccgaagcccggcacgctcttcaccaacaagaagcttgcggagacttatgcgcgcatcctgaccgaggcggagagcgccggcggcgatcgcgtggcgcagatcgagcgcgcccggcaggcctggtccaagggcttcgtcgccgaggcgatcgacaagttctgccgcacccaggaggtgatggacgtctccggcgcgccacatcgcggcgtgctgtcggccgacgacatggcgcgatggcagcccaccatcgaggcgccgctgacctatgattacggccgctacaccgtgcagaaggccggggtctggagccagggtccggtgatgctgcagcagctcgcgctgttgaagggctttgagctcgacgggctcgaccccgcaggccccgacttcatccatttgcagatcgaagccgccaagctcgcttatgccgatcgcgagacgttctatggcgatcccaagttcaccgatatcccgatcgagacgctgctgtccgatgcctataacaacgagcggcgcaagctgatctcgaaggacaaggcctcgctcgacttccgccccggctcggtcgcaggtttcggcggcgtcgtgaagctgcgccgcgccgaagggcatcgcgaggcggtcggcgccatgggcgccggcgagccgacggtcggccggttcggcgaggtgcgcggcgacaccgtgcatttcgacatcatcgacaaggccggcaacatgatctcggcgacgccgtccggcggctggctgcaatcctcgcctgtcattcccgagatcggcttctgcctcggcagccgcgcccagatgttctggctggaggagaaccacccggcctcgctggcgccgggcaagcggccgcgcaccacgctgtcgccgaccatggcgctgcgcgacggcgagccgtatctctcctggggctcgccgggcggcgaccagcaggatcagtggatcacgcaattcttcctgcgccacgtccatgcgaagctgaatctgcaggaggcgatcgacgcgccggcctggcactccgagcatttcccaatctcgttctggccgcgcacatcgcgccccggcgtgctggtgctggaaaatcgcgttccgaaatcgaccatcgatgaattgaaacgccgcggccacgtggtggagatcggccccgattggtcggaaggccgcctcaccgcggcctcgaaggtcggcccccgccgccgtgccgccgccaacccgcgcggcatgcagggttacgctgcgggccgctagaggtttcagatgacctggtcgatcatcgcccgcgacagcgccaccggccagctcggcatcgccgtcgcgacgcggttcttcgcggtcggcgcgctggtgccgcacattgcacccaggatcggcgccatcgcgacacaggcgctggtcaatccttattacggcatcgacggcctcgcgctgctgcgcgagggaaagagcccgcatgacatgatcgcggcgctgctcgcacccgacggcggccgcgagagccggcaggtgcatgtcatggacagcaagggccgcatcgccgcgcattccggcaaggattgcgtcgattggttcggccatatcgcgggcgacggcttctcgatcgcgggcaacatgctggccggacccgcggtgctcgatgagaccgcgcgcgtctatgccgcaaatgaaggcctcccgttctcggaacggctgatcaaggcgatgttcgccggcgaggcggccggcggcgacaagcgcggcaagcagtcggcggcccttctgatccacggcactgaggaatggcccttgctcgacctccgggtcgacgaccacaccgatccattgcgcgagctgcaacggctggaagcggtcagccgcgagcactgggtgccgttccgaaccttcatgccgacccgcggtaacccttccggaaccagcgaccgcgcggcgatcaacgccgcaatcgccgcggcatccgcgagccgcgaatgaccaccggcccgctgatcgaaatcgagggcctgcgcgtcactttccagggcgacgacggccgcgtcacgcatgccgtcgacagcgtcgatctttccgtcgccaacggcgcgacgctcggcctggtcggcgaatccggttgcggcaagagcgtgacctcgctcgccgatgagccgaccaccgcgctcgacgtcaccttgcaggcgcagattctcgatctgatgcgcgagctgaaggccgcgagcggggctgcgatcatcctgatcacccacgacctcggcgtcgtcgccgaggtctgcgacgaggtcgcggtgatgtatgccggcgagatcgtcgagcgcgccccggtcgatgagttgtttgccaatccgcagcacccgtacacggtcggcctgctcggctcgatcccgcggctcgatcgccgtaccagccatctcgccaccatcgaggggatggtgccgaacatggcgagcccgcccgccggctgccgtttcgccgcgcgctgtccgttcgtcgagaacgcctgcacaagctcgccgccgccactcgcgatgctgagcgcaacccacgcctcgcgctgcatccgtgcgccgctggaacggctggtgtcatgaccgcgctgctcgaggtcgacgggctggtgaagcatttcgtcgccgaacgctcggtgttcggacggccgaccgcgcatgtgaaggcggtcgacggcgtcagcttcacggtcgaggccggcaagacgctggccctggtcggcgaatccggctgcggcaaatccaccgtcagccggctggtgctgcggctgatcgagccggacgccgggcgtatccgcttcgaaggccgcgacctcggcacgctcaatgccgagcagttgcgcgcattccgccgcgatgcacagctgatcttccaggacccctacgcctcgctcaacccgcgcatgacggtgagccagatcctgaccgagccgctggcgctgcacaatctcgtcccggcggcgcgtcgccgcgaacgtgtcgatgagctgctgcggctggtcgggctcgagccgcgcttcgcgcgccgctatccgcacgaattctccggcggccagcgccagcgcatcgcgatcgcccgcgcactcgcggtcgagccgaagctgatcatctgcgacgagccggtgtctgcgctcgatgtctcgatccgctcgcagatcctcaatctgctgcgcgacctgcaggatcgtctgaagctcgcctacatcttcgtgtcgcacgatctggccgtggtcaagcacatcgccgaccgcgtcgccgtgatgaacctcggcaccatcgtcgagaccgcggatgcccaggcgctgtttgccgccccgcggcatccctacagccgcgcgctgttgtcggcgatcccggtgccgaagccgcgcgccaagcgtagccgaatcgtgctggagggcgagctgccgagcgcgctcaatccaccctccggctgccgcttccatacccgctgtccctatgtgatcgcgcgctgccgcagcgaagtgccgccgttgcgcgaagatggcaccggatatgcaacggcctgtcaccggacgggcgagctgcccggcgcggaggcaatcgtgccgtccgacggcgggttctcgccgacactggaaaagctggtggcggcgttcaatacggcggaagcctcggggcggaccggggttatttcgtaagggaacacaggcgtagggaataaggggttggcgatgagattttggcgcttggcggtcctgatggcggccctcgtgacctggtgcggaacgagcgcgcgtgccgaaacgacgcttcgcatcgggctcgccgaggaccccgacatcctcgatccctcagtcggacgcacctatgtcggccgcatcgtcttttcggccttctgcgacaagctgttcgacatcgacgagaagctgaacatcgttcctcagctcgcgctatcatacgagaattcgtccgacggcaaggagatgacgatcaagctccggccgggcgtcaagttccacgacggtgaaccgttcgacgccgaagccgccaagttctcgctggagcgccacctcacgctgccgacctcgtttcgcaaaccggaattggccgcgctcgaccatgtcgacgtcgtcgatcccctgaccatcaagctggtgctcaagacgccctactcgccgctgatcgcccaattgaccgaccgcgccggcatgatggtctcgccgaaggccgtgaaggaagcaggcgacaagttcggcctgcatccggtttgcgccggaccctacaagttcgtcgaacgcgtgcagcaggatcgcatggtgttcgagaaattccaggattactggaacaaggacaacgttttcatcgatcgcatcgtgttccttccgatcgtcgatgccacggtgcggctcgcgaacctgaaatccggcgggctcgatctgatcgagcgcgtgctcgccaccgacatcaaggacgtccgcgccgacaagcggctcgtgctgtcgaccgcacctgaactcggctatctcggcctcacgatcaacatcggcaacgacaagaacaaggggccactcagccaatcggaaaaggtgcgccaggcgctcgatctgtcgattgaccgcgaggcgctcaaccaggtcgtgttcaacggcgagttcacggcgggcaatcaatgggtcagcccgacgcatccttactatcagaaggcgttcccggttcgcggacgcgatgttgccaaggccaaggcactgctgaaggaggccggtgtcacactgcccgtctccatcgactacatggtccccaaaggggccgagaacgaagccgtggcccaggtcgtgcagtcgatggcggccgaagcaggctttgacatcaagatccgcgtggtcgaatttgcgacgaccttcaagcaagcccaggccggcgaatttcaggtgtttcagatcaactggagcggccggatcgatcctgatggcaattcctatgtcttcctgcacaccaaggcgccgcagaacgacggcggctattccaatgcggaagcggacaagttgatggaagatgcgcggctgatcaacgatcccgcccagcgcaaggcgatctacgagaagatgaccaggatcgtgctcaacgacgagccgatcatctatctctatcatcgcacgctgctgatcgcgcactccggcaaggtcgagggttaccggcagatgccggatggattggtgcgcgtggtcgggctgaaattgaaatgatcgccgcggcgcaggatacgcggggccgacgatgctgaacttcctcgccaagcggctggctcagctgatcccgacgctgttcttcgtctcgctcctgatcttctcgctgcaacatttgctgcccggcgatccggcgctcgtgatggccggcgaggagcgcgatccggccgtgatcgcgcaaatccgcgcccagtaccatctcgatcaaccgattccgttgcaatacgcctattgggtcaagggcgtgctcatgggcgacttcggcgagtcgctgcgcagcaagatgccggtgctcgccctgatcgcacagaaattgccggtgacgatgcagatcgccggtatggccatcgtcatcgcattcctgatcgggatccccgccggcatcatctccgcggtgaagaagggcaccgcctgggattacggcgccaacctgttcgcactgtggggcatctcgacgccgaatttctggctcggcatcatgctgatcttcctgttctccgtcgagctcggctggctgccggcctccggctacgtgccgcccgccgagaactggcgcgccagcctcgctgcgtcgatcatgccggccttcgtgctcggcaatgcgatcgccgcgatcctgatgcggcacacacgaagcgccatgctgcaggtgctggagagcgactatgtccgcaccgcgcgcgccaagggcctgtcggagcgtaccgtgatcctcaagcatgcgatgcgcaacgcgctgacgccgatcatcacgctcggcgcgctcgagctcggcacgctgctgtcgggcgcggtgctcaccgagcagatcttctcgatccccggcttcggcaagctgatcgtcgacgccgtgttcaaccgcgattacgccgtagtccaaggcgtggtgctgaccacggcgacgatctacatcacgctcaatctgatcgccgacatcgcctatatcctcgtcaatccgcggctgcggggctgatcgcatgacggacacagcgctcgggacttcagctgcgcttgccgccaccgaaacgctggaaagcccggcgcggcgtgcctggcggcggctcgtcaggcacaagggcgcgatgctcggcctcgccgtgatcgcgatcttcatcctgctcgccgtgttcgcgccgatgatcgtgccctatgatccgatcgcggcgagctggtcgctggtgcgcaaggcgccgtcggcgcagcactggttcggcaccgacgaactcggccgcgacgtgctcgcccgcgtcgtgttcggcgcccgcgcttcgctgctcgccggcctgatctcggtcagcatcgcgcttgcgatcggcgtgccgctcggcctcgtcgccggctatcgcggcggcttcatcgacgcgttgatcagccgcatcaccgatgcgatgctggcctgcccattcctgatcctggcgatcgcgctcgccgccttcctcgggccgagcctcggcaatgcgatgatcgcgatcggcgtctcggcgaccccgatcttcatccgcctgacccgcggccaggtgatgagcgtcaaggtcgaggactatgtcgaggccgcgcgcgcgatgggcaatccgcgctggcgcatcgcgctggtccacatcctccccaacatcctgccagcgctgctggtgcaggccacgttgtcgatcgcggccgcgatcatcgccgaggccgcactgtccttcctcggcctcggccagcagccgccggcgccatcctggggcagcatgctcaacgccgcgcaacgcttcctgaccagcgcgccgtggatggcgatctggcccggacttgcaatcttcctcgtcgtgctgtcattcaatctggtcggcgacggcctgcgcgacgcgctggacccgaaatcgcggtgactcaagctgagcgcgctccatccgtccccgtcatccagaggcgtgagcggagcgagcctcgaaagatgacgggactgatagcgtgcgcaccctaagctcttcagttaaataaccacctcccgcagcacccggcggcaatccatctcgtattcgagatcgaccaccggcgggcggcaaaagtgccaggccaagccggatcgcgtcgcgccgcggcggaccagctcatcgacgatgaccggatggaaatcgtgcaccgtataggcctgcaccgccgtcgtgtcctgccagccgaagctgaactccgccagacgccgctccatctcacctaccgtgaagcggaccttctcccgccacgcgccggggctgagatcgcggtaacaaacgatgcgctcgggatagctgccgggacctccgcgggcctcggcgccgcccgcgatcacgaaggacggcgatgtggtcgtgctcgcccgcgtgaacgagaatgcatggaacgacggctcggccggcggatcaatctctggacagacgttgctgcgcgcgaccggattgatggtgtcgtcgaacaggccccattccgcgagcgtcttgacgtagtgctggttgaaggcgcggaagccgtcctcggtgaaggcggctggcgagcgcaattcgcaggcgcagaacgacgtcagcggccggccggcgtccttgatgtaggccgcgatccgcgcaaagccttccgcaagcggcaccagccgatcgaagcgcacccgctcgatctcatagccggcgttcgcctgcgcgccgctggaatattggaacacggccggtatgaaccggtaattgcctgccgcgaattcgctcgccatgcctgtttcctccagatcttgtgaggcgagcatagcgttttcgagcgaaccggtctcgcggttcagccaccacgggacaaagaaaaggcggcagtggctttcgccagtgccgcccttcctgcgagcatgagcctggagggctcaggttggtttcaatgcgccgccgcggccttccagttcgtagtcggcgatctgcttggcgcgctccgaacgggccgcggcctggtggtcggttgcgatcacggtgtagaccatcggcagcacaaacagggtgaacagcgtgccgatcgtcatgccggtgacgacgacgagcccgatcgagaaccggctggccgcgccggcgcccgaggcggtgagcaacggcagcaagccggtgaccatcgccgccgtcgtcatcaggatcggacgcagacgaatccgggccgacatctcgatcgccgagcgacggtcgagcccctcgttgagctgcagctcgttggcgaactccaccatcaggatgccgtgcttggtgatcagtccgaccagcgtcaacaggcccacctgggtgtagatgttcatggtggcgacaccgaagaacagcgggatcaaggcgccgacgatcgccatcggcaccgagatcatgatcacgaacggatcgcgcaggctctcgaactgcgccgccagcaccaggaagatgatgatgatggcgaacgcgaaggtgaccagcagctggttgccttcgtggacgtattgccgggagtcggccaggaagtcgaatgtgaagccggacggcagcttcttggcttcaccctgcaggaagtccaccgcctggcccatcgagacgccgggcatcggcacggcctggaaggtcgacgagttgagctggttgtagtgggtcagcgcgttcggatcgacgccggtctcgacggtcaccaccgtcgacagccgcaccagctgcccggtcgcggtcgggacgtagtagttgtcgaacgattcaggcgcgagccggttggcgcgcggcacctgcgggatcacctgatacgagcgaccttcgaggttgaagcggttgacgtagttgccgccgagcagcgtcgccagcgcgccgccgatcgactgcatggtgatgccgaggtcactcgccttggagcgatcgaccttcacccgaaccaccggctggttgaagtcgaggtcgctgtcggtgacgatgaacaggccgctcttgcgcgcggcttccttcagcttgttcatctggtcgaacacctgctggaagccggcggtcgacgaaatcaccatctgcaccggcagaccgccgggtccgccgggcagcggcggcaggctgaacgcgaatgcgctgacgccttcgatcttcgacagctcgttctgcaccagcggctgcagcgtctgggccgagcgcttgcgctcatcccagggcttgagaagcatgccggcgaagccgccctgcggaccggtgatgccgttcaggatgaaccgcaggtcggtctcgggaaacttctggaactccttgtccattttgtcgccgtagaagtcgatgtagtcgatgttggcgtatttcggcgccttggtcaccgcgaacacgatgccctggtcttcctgcggcgccagctccttctggatgtgcatgtagaggaagccgaccaggccgaggatggtgacggcgaacagcgccgtgatcggacggtagtcgagcgaacggtcgagctggcggccataggcacgcgtcagcgcgccgaacacgcggttgaccagcttggcgaaacgcccctcctccgcgctcttgaggaacaccgagcacatcatcggcgacagcgtcagcgcgatcacgcccgacacgatcaccgagccggccagcgtgaaggcgaattcgcggaacagcgtgccggtcacgccgccgaggaagccgatcggcgcgtacaccgccgccagcgtgatcgtcatggagacgaccgggcccacgatctcgcgcgcacctttcagtgatgcctgcacgggtggcaggccctcctcgagatgtcgatggatgttctccaccaccacgatggcgtcgtcgaccacgagaccgatcgcgagcaccatcgccagcagcgtcagcaggttgaagctgaaacctgccgccagcatcaggatgcagacgccgatcagcgacagcggaatggtgacgacgggaatgatcaccgaccgcagcgaagccaggaacaggaagatcacgacgacgacgatcaggaccgcttcagtcagcgtcttctcgacctcgtcgatcgacgattggatgaacttggtggagtcgtaggccaccttcatcttcatcgacggcggcaggttgcgctccatgtcggggaacaatgcgcgcacgcccttgaccagggtcagcgggttgccctgcggcgtcgccttgatgccgatgaagatcgcatgctcgccgttgaaggcgacgctggcgtcggtcgactgcgccgcgagctccaccgtcgcgatgtcctcgatgcgcacgaagccgccgtccttcgccttcacgatcatgcgcttgaactgatcgatgttctgaaggtcggtgttggccgagacgttggagacgatgaagaagcccttggtctggccggcggccgcctggaagttgttggcggcgatcgcggccgcaacgtcgttgggcgagacgccgcgtccggccatccgggtcggatcgagccagacgcgcatcgcgaaggtctggccgccgaggatgtcggccgacgcgacgccgtcgaccgtcgagagcaccggctgcacgacgcgggtcagatagtccgagatcgccgatccggtcagctcctcgctggagaagccgagatacatcacggcgatggtgtcaccggtcgccttggtcacgaccgggtcgaaggcttccttcgggatcaggtatttgaccgaattgaccttggcgagcacctcggtgagcgcctggttcggatcgtgattgagcttgacgtagacctggatcgtcgaggtgccgagcaccgagttcgacgtcatgtagtcgacgccctcggccgaagcgaccgcctgctcgatcggcgtggtgatgaaaccgttgatcagttcgggcgacgcgccgggatacgacgtcgtgatcgtcaccacggtgttcgacaggttcggatattgccggatcggcagcaccatcgccgcgcgcaagccgatcaagaggatcagcaggctgacgacgaccgacagcaccgggcgcttgatgaaaatatcagtgaaggccatcgccaactcgattcgtgttgtctgccggtttcccggcgcaagtggcggagggccatcgggccctccgagttcagatgatcggtattagtagcgcggcggctcggccggcaccggcggcgccgggtcggtcgagatcgcgaccgccatgccggactgcagcttgatctggccgacggccacgaccttgtcaccggccttcaggcccttgaggatctcgacccggccctcgacacggttgccggtcttcacgaaggtacgctcggcggtcagggtggtcttgccgtcctcgcccttcttctcggtgatcaggaacacggagtcgccgtacagcgtgtagtcgaccgcggtttccggaatcgtcacgaccggcggcttctcgggcagcacgatggtggcggtcgcgaacatgccgggcttgaggatgctgtccggattctggatcgtcgcctgcactcggatgttgcgggtatcggtcgcgatctgcggctcgatggtggtgatcttgccgtcgaaggtgcgacccggataggcgtcgaccgcgatccgcacgatctgaccgaccttgatctgcgagctctgcttctcggtcacggtcatgttggcatacagcaccgacaaatcggtcagcgatacgatctgcgtgccggccgtcagatactggccgacttcgacctggcgaacgccgagatcgccttcgaacggcgcgcgcaccagcttctgcgagatcagcgcctcggtcttggcgatacccgccttggcctggtcgtaggtcgcctgcgcggtatcgacggtcgactgcggcccgaactggcgcgacgcaagctgcttggcgcgatcgagttgctgctcgccgacggttgcctgcgccttgaagctggcgaggtcgccctgttccggcgcgtcgaacagctgcaccagcggcgtgcccgccttcacatggctgccggcggtgaacaggatctcggtgatgcggcccggcacgtcggtcgtgacgttgacctggtgcacggcgacgagatcgccgacggcagtcaagaggttcggaatcacttcggtcttagcctcggcagccgtgacgttcgacggcggcggcttattgttggcgaagaactgcgcgatcatgtggctgcggaaggcgttgaagccgaccagcgcgccgaccagcagggccagcaacaggcctacgatgatgaaccagcgcaccaaacggacgggacgcttggcttgcttctccttgatcggttgacccgagatatggctttcggtctggatattcatgtcatgcactttctgcagttaccgacggtcctgcgctcggcgacggctggcggctcaaatgagttgagattgcggcttcggtaagtccgatgccgcgaagaatgaactggcaaagctgctgctcggccgctgcagcatcaccataggggagacaaggtgtcgcaggcagctgcgtcagcgcccccatgagcacggtatggtgcgcaaaccagaacaggttgagcggctcgtcgccgatccgcgtggcctcgccggcggcgatcgcccggtcgagcgaggcggcgaaggttggaccgatcagcttgccgaccttgtcgtacagcaggcgcgcaaactcgccgtcgtcgagatggctcgtcaccatcagccgcatccgctgcgcctcttcctggtccggcgcatcgcgcagttgcatgaagtgaccgaccatgccttgcaccagttcgaccagcgtcgcggtcgaaggctcctggccgagcagatgcgcgagatcagggtccgcctcgcactcctcggcaaggatttcggcgtagagcgcagccttcgacgggaagtgcttgaacaatagcccttccgaaatggcagccgcagccgccacgcttttcgtcgtggtgccggcaaagccgttccgggcgaagcaccgctttgcagcgctcaggatcaactgacgccgcaagtcactcgtcatgcgtaaggtagacatttgggtcgtgagtaatcactcactttaccaaaagtcaaggttctattgcaccgcgaaagctactttaaattggactgtgtccgatcgacccgcggatgcggttgacgatgtaggtgccgtcgcggctggacagcacgcgttccagattggccccgtcgatcttcgcgctcgcgaaccgcggccccgctgtaacatcttgcaaagacgaggcaaaagtctcaacctcggccatcgtgctgatcgagcggctatctccgattccgcaggctttggcaacacccacaaggtcggcggttcccccggtgtggctcgcctggccaccggtctcgccgtaggcctcgttgtcgagcacgatgatcgagaggtttttcggctgctgcagcgcgacggtcgcaaggctccccatccccatcagcatctcgccgtcgccggtgatcacgacgaccggcagcgtcggctgcgccagcgccaggccgagcccgatcatcacggcgccgcccatgccaccccagagatagaagttgcggtcatggtcgccggccgcggcgatgtcataggtcgaggcaccgaggccgccgacggcgaaggcgcccttgcgatccctgagcagttcggcaaccaccgcgcggcggtcgaggcgattggctttgctcatttggtgaagacctttgccccgatcagccgctgcgacagcaggacggcggttggcgtgcaggcgttgtaggcctgcgccgcgccggcctcgacgacctcgcgaacctcaccgggatgcgctgcacgcaacaccttgatccccgacaattcgagaatgccctgcgtgttcgagcccatcggcacctgccagggattgaactcgccccattcgccgcgcatcgtcaccagcgtgaggaacggcaagcggaagatctgcaccagcgacagcatgttgatgcaattgccgaccccgctcgactgcatcagcagcacgccgcgctggccgccggcccaggcgcccgcgagcagcgccacgccctcctcctctgtggtcagtgcaatgccgcgcatcgatgacgaccccagcacccgctcgatcagctccgaatgcccggcgtccggcacgtagggcacctggcgcacctcgaagcgctgcaatatcgaaaagatctcctcgggccaggagaccgcggtgtcggcacgggcatgcatcggcgtttccggctctctcttgtttggccgcgactgtagaggggcacgcgcgcttcatcaaagcgcaaaaccgcatatggctctgcgatatattcgcaccacgccgagggcgtcgcgccgttcccgatactttcatattgtgttgcgccgcgcccggccgcggcctacgatagttgcaaatgaaactaattaggttggattcgccatggacgggcacgcgcgcgagctggctgacggtttcgacctggaaaggctgaccccgaagttctacgccgacccctacccgacctatcgcgcgctacgcgagcacgcgccggtcaagcgcctgccgaacggctgctatttcctcacccgctacgacgacctgatcgccgcctacaagaacaccaggacgttctcctccgacaagaagacggagtttctgccgaaataccgcgactcgctgctctacgaacaccacacgaccagcctcgtcttcaacgatccgccggcgcacacccgcgtgcggcgcttgatcatgggcgccttgtcgccgcgggcaatcgccggcatggagccggacctgatcgcgctggtcgacagcctgctcgaccggatcgcagccaaggagcgctttgagttgatcgaggatttcgcctcggcgattccggtcgaggtgatcggcaacctgctcgacgtgccgcacgaggagcgcgaaccgctgcgcgactggtcgctggcgatcctgggtgcgctggagccggtgatcggcaaggacgcgttcgaccgcggcaacgccgcggtgaaggatttcctcgcctatctcgaaaccctggtcgaacgccgccgcgccaggccgggcaatcccgagcgcgacgtgctgacccgattgatccagggtgaggacaatggcgagcggctgaccgcgaaggaactgctgcacaactgcatcttcctgctcaatgccggccacgagaccacgaccaacctgatcggcaacggtctggtgacgctgacccaataccctggggagaagcagcggctgatcgcgcagccggagctgatcaagaccgcggtcgaggagatgctgcgtttcgaaagctccaaccagctcggcaaccgcatgatcgtggaggagaccgagctcggcggcatcaagctgccggccggcacgctggtcacgctgtgcatcggcgccgccaaccgcgatcccgcgcaattccccaacccggaaaacttcgacgtcgcacgcacgccgaaccgccatctcgccttcggcaccggcgcgcatcaatgcgcgggcatggcgctggcgcgccttgaaggcgccatcgcgatctcgcggttcctcaagcgcttcccgaactatctgctcgacggcgagccggtgcgcggcggccgggtgcggttccgcggcttcctcagcgtgccatgccggcgcggcgcgtgatccgatgacgacagagcaattgcgcgagcgctggggcgattcgctgctgacggtgctgaccggactgctcctggtcatgatgttcgtggtcgcgccgctacaggcgctcggcctgttcgaattccaggttttcgagctgttgctcgcgatcttcctggtcggcggcgtgttcgtgatgtcgggcagcgcgatcgccgtcgtcaccatgctggtcgctctggcgatgatcgtgaccggcgcgatcctgcgcctgcactcgccgtcgatcctcgacctcaatctgttcgccggctcctggcttctggtcggcatcacgatggcagtgacggtcgcgcgggcgatcttcgcgccggggcgcgtcacctaccaccgggtgatcggcgcgatcctgttctatctcacggtcgcggtgatcttcgtggcgctctacaccttcatcggcacgctggtcccggacgcatttgccggcatgaagatcgaagaccggccgtcgctcgcaagccagctgatctatttctccttcgccacgctgacgacaaccggctacggcgacgtcgcaccattgcatccgatggcgcgcagcctgtgcaatgtcgaggcgatcttcggccagctctacccggcgacgctgctcgcccggctggtcacgctcgagatcgcgcaccgcgatcgggattcgtagcgcagcgacgctgacaggatcgatcaaatttggtgcacggtcatcctttaagccgcgcgggccgatccccaatcagctataatttgatcgcgcgacacctcaccggtgccggcaccgcacagctggagtgacgaaacatgcgtccgccagtcaccgatttcatcgccagggaagcgcaattcggcgcccacaactacgcgccgctcggcgtcgtgctgacgcgcggcgaaggcgtctgggtttgggataccgacggcaatcgctacctcgattgcctctccgcctattcagcggtcaatcagggccactgtcatccgaaaatcctcgccgcgatgatcgagcaggccggccgcctgacgctgacctcgcgggccttccacaatgaccagctcgccttgttctacgagcagctcgccgatctgaccggctcccacaaggtgctgccgatgaacagcggcgcggaggcagtggagagcgcaatcaagtcggtgcgcaaatggggctacgaggtcaagggcgtgcccgatgaccaggccgagatcatcgtctgcgccgacaatttccacggacgcaccctggcgattgtcggcttcagcaccgacccggcgagccgcgtgcatttcgggccgtttgcgccgggcttcaaggtcattccgttcggcaacgccagggcactggaagccgcgattacgccgaacaccgttgccttcctggtcgagccgatccagggcgaggccggcgtcatcattccccctgcaggctatttcgccggggtccgcgagctctgtacccgcaatgacgtgatgctgatcctcgacgagatccagaccggacttggccgcaccggcaagctgctggcggagcagcacgagggcatcgaggccgacgtgacgctgctcggcaaggcgctgtccggcggtttctatccggtctcggcggtgctctccaacaacgaggtgctcggcacgctgaagcccggccagcacggctcgaccttcggcggcaatccgctcgcctgcgcggtcgcgcgcgcggcgctgcgcgtgctggtcgacgaaggcatgatcgagaacgcggccgcgcaaggcgtgcgcttcatcgacggcttgcgcagcatccgtgccaacacggttcgcgaggtgcgtggacgcgggctgatgctcgcggtcgagcttcaccccgaggccggtcccgcgcgccgctattgcgagctgctgcgggagcacggcatcctcgccaaggacacccatgaccacaccatccgggtcgccccgccgctggtcattacgggagatcaggtcgattgggcgctggaacagatcggcgctgtgttgacacaggatttgacctgacggcggctttgcgccgtccgacctaaaccaccgtccggtgccgctcgatgcaggtctgcagcacctcgtccagcggccggccccaccagtcattcgagaatatctcgatctccgaatagccggcgaagccctgcgcttcgaccgccgcgcgcacagatttgatatcgatgacaccgtcacccatcatgccacggtcgttgagaatgtccttggtcggcaccagccagtcgcagacatggaatgcgagcagccggtccctgccggcgcgcgcgatctgggccatcagctccgggtcccaccagatgtgatagacgtcgagcgcgacgccgatcgcaccagtgcggccgggatcgagcgcgtcgcagaggtcgagcgcgtgcttcgtggtgttcacgcaggcgcggtcggcggcataggccggatgcagcggctcgatcgcgagcggcagtcttgcctgcttcgcatagtccagcatctcggcgatgccgtcatgcacctgattgcgcgctgcggcgatgtccttggacatcgcgctgccgggccgagaatattgcggcaggccgccgacgacgagcacgatgcaggaggcaccgagcgcgacggcctcgtcaacggcgcggcggttgtcgtcgcgtgccgcgctgcgatgcgcgttatcggccgtgaacatgccgccgcggcaatagcccgacagatcgagccccgcgtccttcaccgcgcgcacggcacggtcgagaccgacggcagcgacctggtcgcgccagggatcgatggcgcggatgccgagccgcgcgcaggcctcgatgatggcgagaagatcgccctgcttgcggacggttgccgtgttcagcgacagccagcggtgatctctggaaaaatcgcgcatcaggcgtctatgccacggctcgcaaggatcgtcgccatccggcgtgtcgctgcttccggatcggctagcagccccgcctggtcggcgagccggaacagttcggcgagatgcagggtcgagcgcgcgctttcctgcccgccgaccatcgtgaaatgatcctggtggccgttgaggtaggccatgaacacgatgccggtcttgtagaagcgggtcggcgccttgaagatgtggcgcgacagcggcaccgtcgggccgagcacgtcgtggaagccggcctcgtcgcccgccgcgagccgcgacagggcgtaggacgccgcgggcgcgatcgcatcgaagatgccgagcagcgcgtgggaaaatcccttgtcgtcgccggcgatcagttcggcgtagttgaagtcgtcgccggtgtacatcttcacccgtgggtcgagccgccgccgcatgtcgatctcgcgctgcttgtcgagcagcgagaccttgacgccatcgaccttggccgcattggcgttgatgatcgcgaccgccgtatccatcgccctgtcgagatcggccgtgccccaatagcctgacagcgccggatcgaacatgtcgccgagccagtggatgatcacgggctcgcggacctgcgacagcacgcggtcataaaccccagcgtaatcgtccgcggtcctgccgagctttgccagcgcgcgcgaggccatcaggatgatgcggccaccggccttctccaccgccgcgatctgctcctcataggcacggatgacgtcgtcgatcgaccttgcgtcttctaccgccagatgatcagtcccggcgccggagaacaccagcgcattgcccctggccttcgccgccctgaccgagcgctggatcaattcgagcgaggtcgcccagtccagccccatgccacgctgcgcggtatccatcgcctcggcgacgccgaggccgaggtcccagacgtgctcgcggaatgcgatcgtcttgtcccagtcgatcgcagccgtcagccagggatcgacgtcggcgcggggatcggcaaccacatgggccgcagagaacgccacccggttgagcgtgccctcaagctttgccggaaaggtccgcgacgccgccaggcgataggtctcgaggcccccatcggcggtcggcagcttcagcgaaagggatgacatcggcaggactggcttgttcatggcaaggtccctctcagacggcgatcggtgcgacgtcgatccagcgccgctccttccagctcttcagcgcgcactcggcaagctgcacgcccttggcgccttcgagcaaggtgtatttgtagggcgcatcctcgcagacgtggcgaatgaacatctcccactgctccttgaagccgttgtcgtagacgacgttctcgggcagcttctgccagtcggcatagaaatcgtgcatccgcttctcgtccggattccacaccggccgcggcgtcgcctggcgcgcctggatcacgcagtcggtcagtccggcaacggccgagccatgggtgccgtcgacctggaaggtgacgaggtcgtcgcggtagacccgcgtcacccaactcatgttgatatgcgcgatcacgccgcccttcaggcggaaggtggcgtaggcggaatcatcggccgtcgcctggtacttcttgcccttctcgtcaaagcgttctgggatatcggtcgtgccgatgcagaccacgctctcgacctcgccgaacagattgtcgagcacgtagcgccagtggcagaccatatccagaatgatgccgccgccatcctctgcgcggtagttccacgacggccgctgcgcttcctgccagccgccctcgaacacccaatagccgaactcgccgcgcaccgagagcatgcggccgaagaagccggagtcacgcaggaaggcgagcttcttcaggccgggcaggaacaacttgtcctgcacggtgccgtgcttgagacccttggcattggccaacttcacgaccgcgacggcttcctcgagattggtcgcgatcggcttctcgcaatagacatgtttgccggcgttgatcgccttggtcagcagcgagggccgtgcctgcgtcgtcgcggcatcgaagaacacggtatcgtccttgtcggccagcgcgcgatcgagatcggtggtgtggcgctcgatgccgtagcgctttgccaatgcgccgaccttctcggcgtcgcgcccgaccaggatcggatcgggcatgatgcggtcgccattcgacaacaacacgccaccctgctcgcggatcgcgacgatcgagcggatcagatgctggttgagccccatccggccggtgacgccgttcatgatcaggccgaggcgtttggtcgtcatactgtctgctcctgcgaaacgcgtggtgttggccgcttgagcggctgcatggtggaccagtccggatggatcgaactggcaaagcccggtactgcggcgatcgatccggtcaggagatcgccgtcatggatcgcgaggcggaccttgccgcccgcgcgtgtatagagatcgggatgcgcggtgaggaaggcgtcggcttcgtcagccggggtgtcggcaaagccgtcgacgtagtgatgtccgttgcgttcggcatgggtgacgccgatcagcgcgccgagcgcaagatcctgctgcacaccgaggccggcctggcaggtcaggtcctcaccgctgatgaaataccggtcgccatccgcgctccacgccgccgcgcgggcggcattgacgaccgatttgtagatgcccttgcacgatttcgacgagatgccgcgatagccgagcgcccgcgcccgcgggaacgcgtcataggaatcgtcggcctcatcgatgatgaagttgcgcccggccaatttcccgagcggcgatgctttcgtgacgtcacgcggcatcggttgctcgatatagagcaggtttgcagcgatcggcttgagtgcctcgtcatggtcgagccggtcgaccagcgcgttcagcgcggcaaggtccgcgtattgctcgttggcatcgagcgtgatcttggtggcgtaaggcagcttggcgagctcgtcgccgatccgcgccagccgcgctgcgtcatgcgccggatcgccgttcagcttgagcttgaaatagcgtgcaccggcattttcgtttgcgtcggcaacaccgccctcgccttcgatcgtgtcatccatcccgaccgtatgcctgacggcgacacggtcgaggcgcttgcgggcggacaggaaccgcgcgatgtctggatcgccgagatcgggcgtcagccgcccgtcgattccggcgatattgccggccatgccgtcgaagacatttgcgccggccgcacgcagcagcgcatccaggatcgccttgtcgatctccgccgggccaaagctcgcggcaagctgcggaatgtcttccgcagcgcaggccgcgacctgcggaccgatgtacgcggcgtgcaggccgaacgcggtatcaaaggctccgttcgccagatagaactcgcgtgcaatcgccagcgagcggcgaagtccgtcgagcgactgggcttcggtcagatgcggccgcttgtcgaaccatttcggcgcaagcatctcggcgctggcgccggtggcgcggcccttgccttcgacctcgatctcgacccgcacgaaaacctgcgtcgccgcattgatcgtcaccgcgccgaagcggaacggccggacgaagggcagcggccgttcgaagaaggcgatatctttgacagcgaggcgaagcggcattgaaagctcgggcgttagtccagcgatccctgtgtgaagaaatgcttgcggatccgctgcaccagttcggtgaagacgggatcggacatcgtctcgagcgaacgcggccgcggcatcggcacgtcgtagatcgccgcgatcgcgccgggccgctcggtcatgacgagcacgcggtcggcgaggaacacggcttcgggaatcgagtgcgtgatcaacagcaccgtcttgccggtctcgcgctggatccgcatcagttcgacattcatccgttcccgcgtcatggcgtcgagcgcgccgaacggctcgtccatcagcatgatcttgggatcgtgcaccagcgcgcggcagatcgaggcgcgctgctgcatgccgccggacagctgccagggcagcttcttctcgaagccttcgaggccgacgagcttcaacaaccccttggcgcggtcgagatatttgtcccgggcgagccgcttcatgtcgatcggcagcatcacgttggagaggatattgcgccacggcagcagcagggcgttctggaacacgatgccgacattgccgtggggtttcgtcaccggctcgccgtccaccagcacctgccccgtcgtcggcggcagcaggcccgagatcatcttcagcagcgtggacttgccgcagccggagggcccgaccacgacaaagaactcgccgtcattgatggtgaagtcgagcggccgcagcgacggcacgtcgccgtcgcgcgaccggtaggtcttcgacacgcccgacagcttgatgcccggcgcggcgccgggcgcgcggtcggacaccaggcgcagatgcgcggcgggctgctcggcagcgctcttgatcgccgatttcatggcttacgaattacccttcggcagatagtcgttggtgtagaacgccttcggattggccttcgccttggcgtcgaggccaccatattcgaccatcaaatcgaccgactcggtcatgttctggtcggtgacctggaacggccgcttgtccttggtcgccggcgtgcgatagagcgggattgtgagctcaaaaccctgcgtcagcgtctcgatcttgccgcccttcgggttggcatcgaggatcgactgcgcggccgccttcgggtccttctccgcagcctccaccgcttttgtcgtcgccgacatgaagcggcggaccaggtcggcattggccttcacatagtccgaattcgcgatgatgcccgacgacaccatgttgatgccgtagtcggcgaacttgatcggatagacgtccttgccggtggcgtccttgatcttcatcgactggtccatgacatagccgagcaggagatcggcctggccgttgatgacggcgttgagcttggtctggccgtcgccggcaaccgtgttgaagtcgctttccttcagcccggtcttcttcaggaacagcggccagatctgcgtcatcgaatccgcgggcgtgatcgcgaccgtcctgcccttgatgtcctccggctttttgatgttcttgtcgacgaagcccatcgccgacatcgggctggtctgcaacagcacgccggttgcgatcacaggcgcgcctttcaccgcggcgcgcatcatggtaggtacgtcgacatagccgaaatcggcggtcttggccgccaccgcctgtgtggtcgcggccgagccgcggccttcctggatctcgaggtcgatgccctcggcggcgtagatgcccttggccttgccgtagtagaacggcgcgtgctcgccatagacgtaccagttcagcatcagcacgaccttgtcggccgcggacgctggtgccatcgccagtgcggtccaggccaatgcggcgccggcgaccgcaatcaaacgcttcatggatgctctccctctattgtccgcggcccttggatgggccgcttgtccgattgctgcgctatgacgcaaaactgatgtcgtcacgctggctgacgtgccaggggatcaccagccgctcgatgcggtcgacgatccagaacaggatgacgccgagcagcgccaggatcaccagcgcggcgaacatcgtcggcaggtcgaaggtgccgatcgagcgctgcatcacataaccgatgccggaattggagccgacgaactcgccgaccacggcgccgaccaccgcgagtgtcaccgacactttcaggccggagaatatcgccggcatcgcgtgcggcaggttgaccgcgcagaacaccttgaagcggctgccctgcattgcgcgcgccagatcgaccatgtcgggatcgaccgacttgaagccctgcaccgccgagaccacgacggggaagaagccgagcaggaacgcggagatcaccttggggacgatgccgaagccgaaccagaccacgaacagcggcgcgatcgcgatcttcggcaccgattgcgagaacaccaggagcggataaacgtagctctccaccgtcttcgagcccgcgatcagcatcgctgtgggaatgccgaacagcgccgagagcaggaagccgcagagcgtcgcataggtggtcggccaggactgccgcagcagttccggccagtcgctgatcagcaccgtaacgacgtcaccgggcgacgggatctgataggcggggatgtggaacaggcggatcgagagatcccaggccgccacgatgacgatcaggaacaggaacgggcgcacccacgccgcattcagcaccttcgacaggcccgaagggctccttgcctccgccacgtcacactcccttgcagtttctctcgttcggttagaaattaacctgttggataattactgtccagcccccggcacgcgacgaaatcgcgctggaatcccatactttcgccagacgagactttctggatacgggctgcggacgaaccgcgagccgtcacaccacgcggtgttccgcggcgtgccgcaccggcatcaccccgaacgcggcggtggacttacccgtcaacgccgccagcaccagcgcaatcatatgctcgagacgttcgtcgcgggcgtccttcttcaggaggtcgcggccgaagatcacgctcaaggtggcgctgttggagagatagaagaacgcaagccccgcgatcgagatatagagctgcaccggatcgaccgtgacgcggaaatcgccgctctcgacgccgcgcgtcaccaccgtgcgaatcatctcgacgaacggcgagtgcatcgacttgaccttggtcgagcgcttcaggtgctttgccttggcgaggttttccgtgttcagcaacgccaggaactcgggattgcgcagaaaatagttccaggtgaaggcgatcaggcgcccgatcgcctcgggcggatcgagatgctcgaggtcgagcgtgcgctcttcggcacggatcttctcataggcgccttccagcacctcgagatagagatcctccttgttgccgacatggtagtacagcatgcgcttgttggcgccggcattggccgcgatgcgatcgacccgcgcgccggcgaggccatgggtggcgaattcctgcttggccgcctcgagaatccgcagccgcatcccttccgggtcgcgctgccatctctgtattcgctttgccttcgccaaaatcaatcgcccggtgatgctggattgatgaacgtagcatgacgcgcgacgtttgagaacgaatgttgtcgcgacgggcgtgcgggaatatttcttgtcccttcgtcattccggggctcgcgaagcgagagcccggaatccatccatccacggagcttgcggctagatggattccgggttcgtgcttcgcacgccccggaatgacgaaagcgccacgcacgctgccgtgacgacgcacgcacaacctgcgccctagtctggcttcccctgcgagggctgcaccaggagcgtcggcacaccgcacgtgccgttgcgcaccgtcatcacccgcgtgccgggcttgcggccggcgcggatctccgagacgtcgacgccggcggcaaccagccgcgcatgcgtggcatcgatatcggcgacgcgccagcagatcccgcgcagccggtccggcgcgtcggcctccaccttgttgctctgcttgcccggccggtgcgtgacctcgacgacgagatcgccgcagcggaagaacatcagccggccccactcgggatgcgagcggtcgagcgccatgtcgagcccgagccgcgcgccgtaaagcgcggcggcgcgttccggatcggcggtcgagaccaccacatgatccatcgccgtgatcgaggccggcgtggtgcgcaccgagagcggccgctcctgctcccgctccaggaagaacatccgcacgccgcgcgtcgtgtcggtcgcagcgcgcgtgcgcttccacgacagcgtggcaccgctgacatcgtcgcggctctcgacctcggcgaccggctcgggcttcagcgtcagccggtcgagcctgcgatgcgtcctcttgatatcgctggtgcgaaaacagaggctcgcaagcccctcgccctgggtgacgagcgcgccgcggacgcgttgcgcggcggcatcgtcgccgcgcggcgccatcaattccagcgtggtgttatcgagcgtgaacagcacgcggtcggcgccgtcgccgctgttgcgccaggccggcgcccgcgcgaacagcgtctcgtaggcggcactggcagcgctgatgtcgccggtcaggacgacgatgtggtcaagaccggtaatcatggcacgggcctccccgaatctgccgtcatgatgcttctccctcacgcaacctcggaaccgcgagcagcgggccgccattatgccgaatgccagcgccgcgcggctgcccacatctctagccacaaccagccaaagttgcgaataatttcagcgaaatcggccgagcagcggtgctagtctgccgtgccggccgggaccacaccaagccacgacggaaagcgaatgcaggctctcttcatcggacagacctatatcgacgtcaccttcatcacggatcacatgccggtcggcgacgagaagcacgtcgccgacgcctatgccgtgtcgttcggcggcaacgccgtaaccgcagcgttctgctgcgccaagctcggcatccagccggacctgatcgcgaccatggccaatgactggctggggcggatgttctgggacatggccgacaggtacggcatctcgttccacccccgcaaggtcaactcctcctcactgtccttcatcatgccccacgatggcaagcgcgccatcgtgcgctgccgcgacgaccagcacatccacccctttccgctgctgaacatcgatggctgccgcgcgctgcacatcgatggccatcaaccggacgccgcgatccattacgcgaagctgtgccgcgaagccggcatcctgacctcgcttgacggcggcggcctgcgcaccaacacccacgagctgctcgccttcatcgatattgcgatcgtcgccgagcggctgtgcgagcagatggacaagacgccggagcagatgctcgactatctcaagagccgcggctgcacggtcggcggcgtcaccatgggcgagcgcggcctgctctggtacgacgaagcgggcgtggtgcgcaccttgccggcctttccgataccgcgggaacgggtgatcgacaccaacggcgcgggcgatgtcttccacggcgcctacatctattcctacctctcaaatccgagcaagggctggcatgagcatttcaagttcgcgcgtgcggcgtcgacctacaagatccagaagctcggcaacgaggccggcctgccgacgctggccgatatcgcggccgtcaagcaggagttccgcgccgaggcctgatcgggcggatcgaggctaggccatgaggcacgtttttgtcgccggcagcatcaatatggacgtggtggcgaccgccgagcgccatccgcgggtcggcgaaaccgtggccggcgaggccgtgctctattttcccggtggcaagggcgccaatcaggccgtggcatcggcaaaactcggcgttgcgaccacactcatcggcaggctcggcaccgatgcgttcggcaaggagctgagagcgttcctcgtcgcgcaaggcgtcgatctcagcctcgtcaagaccaccgctggtgcgcattccggcacggcgatcatcaccattgccaatgccgacaacaccatcgtggtcgtgccaggcgccaacgggctcgtcgatgctcgtgatgtcgcggtgcctgccatggtgaagggtgacgtcgcggtcagccagttcgagatcccgctgccgacgatcgccgcattcttccagcgcgcccgcgccgccggcgccaccacgatcctcaatccggcaccggcgaaacaggccgacaaggcgctgctggatctggtcgatatcctgatcctgaacgagaccgagcttggattcctcacgggaactgagctgcgcgacagcgacgcacccgcccgccttgccgaggcggcgcgaagcttggggcaaggcaagaccgtctgcgtcacgctcggcaaacgcggcgttctggcgctggtcgaaggccagccgctgctggtgccgggacgcgaggtcaaggccgtcgatacgacaggcgccggcgactgcttcgtcggcgccctcgcctcgcagctcgcgggcggcaagccgctcggcgacgccctggcctatgccaacgccgccgcctcgatttgcgtgcaacggatgggcgctgcgccgtcgatgccgacggcgcaggaggttagcgccgttctttccacgggtcgtcccggcgaaggccgggacccataaccaccggcttccattgtcttgaactgacgtcaacccgcaccgcctcaaatcgagaggccgcggcgtatgggtcccggccttcgccgggacgacgatccaactacgccagcgcgctcttcaaatcaaagctcgcatccgcggcctgctccggcgtgatcgagccgccggcgccgagcagccggcggccgaacatgtgatcgccggcgcgattgaccgactcgatgccgagcagcctgtcaccgcgatagcagaatgccgagaacgcgccctgcgcgcggtcaccgcgcaccaccacgcggtcgtagccggtggcgagccccgccatctgcagcttgtcggggccctggtcgctccagaaccacggcaggccgtcatagacctcggtcttcccggtcagccgcgacgccacgcaacgcgcatggtcggtcgcgttctgcaccgattccagccgcagcgatccgccgaaccgcttgctggtgtagagcgcgcaatcgccgatcgcggagacattgggatcggcggtcagaagatgctcgtcgacgatgatgcccgatgcgaccggcaggcctgcctcggcggcaagctcgacattcggcagcacgccgacgccgaccacgacgagatcggccgggatgtgcgtgccgttgctcaggctgacgccggtgaccttggcaccatcggcctcgatcgccgtgacctgcaccccgaggtgaatccggatgccggccgcggcgtggcgcgcctgcgagaactcggaaatctccgcggtcaccgcgcgcgccatcacccgagatgcgagctcgaccacatcgacctcgagacccttggcccgtgcggtggcggcgaattcgagcccgatgaagcccgcgccgatcacgacgacgcgcatgccgggcgcaagcaattcgcgcagcgcatggctctcatcgaggatgcgcaggtagcggaccgcgtccagcctggcgttcggaatatcgagcagccggttccgcgcgccggtcgcgaacaccaggtggccgtagtcgagcgacgcgccggaggcgagcgccaccttccgcgcattgcggtcgatcgcgtgcgcccgatcggtgatcagctcgatcttgttgtcgtggtagaatttctcgggccggaacatcaaggtctcgggcccgccggtccccttcagataggccttcgacaaaggcggccgctgatacggcaaatggccttcgtcattgatcagggcgatgcgctccgcaaaacccgcctggcgcagcgacgccgcgagttggaagccggcatgtccggcgccgacgatgatgaccgagcctgtcatcggaacaacccaaattcgcgcgagcaggagtgacccatgctgtttcctcttgtcgatgttagcttgcttgccccgtccccacagcgctcgtgtctgcgtaccgaaggctgacggccatttggcctgatggccggcgcggacgcaagggggtctccagcaaatccaggcaccgcagaaccgcctccgatacggaggcggattgccacggctcgcgccagggccttaaatggcccgaaccaacaagcccaaggtcttcaaaatgcccgatcccgcctccgccaacgaccccgctctgctccgcatcgacggcgccatcgcgaccatcacgctgaaccggccggccgcattcaacgcgatcgacctgacgatcgccaaaaagctggagcagctcagcgccgaggtcgagaccaacacggacgtccgcgtcctggtcatcgaaggcgaaggccgcgccttctgcgccggcggcgatctgcagacgatcggcgccgccgccgagaccaacaatgtcaccccggtggtcagcgagatgctgcgccactaccatgccttcatcgagacggtgcggcggatgccgaagatcgtgctgtcgagcgtgcatggttcggcggccggcgccggcatgggcctcgccttcgtgaccgatctgtgcatcgccgccgacgatgcccgcttcacgccggcctatgccaagatcggcgtgtcgccggacggcggcagcacggtcggcatcgtgggcacggtcggcacccgtcgcgcgctgcagattttccttgccgaggacggcttcaccgcgcaacaggcctatgaatgggggctggtcgtcaaaaccgtccccgcggccgagctgaaggcggccacaaggcaactcgccgagcgcctggcgaaaaatccgccggccgcgatcgctgggaccaaatcactggtctatcaggcggtcaccacaccgaccaggcagcagctggacgccgaggagcacaagatcatcacgtcgatgcacaccgaggacttccgcgtcgccgtgaagaagttcaccagcaagtcgaagtagcggtccggctagttcgggcagatgtatccggtaccgccgggcgccttgaaacagccgacagactccgggattacctgcttgggcagccacagcacgaccttcgggaaatagatggtgaaacagatcgtgaccaggaacacgacatagatcggcagcgccgcccgcagcgcttttgcaaagctgatgccgacgaatttcgaggccatcagcagcacgagcccgtagggcggcgtgatcaggccgaatgccagcgttgcgatcagcaccacgcccatgtgcacgccgttgatgtcgccggcttgggtcagcgcgttgaccagcggcatgaagatgatgatggtcggcaccggctcgatgaagtcgccgaccaccgtgaacagcagcaccatcaagagcatgatgaggtgcggatcgttgccggcgatcgaggtgatccagtcggcgatgtagatcgcgccgcgcagataggcgagcatccagccgaatgcattcgcggcgccgatcgtgatcagcggcagcgagaagatcaggccggcgaggcagaaatcgtacggaatcttcttcaggtgaccgcggttcagcgccgggatcaccaagatgatgatgtaggcgaccgcgactacgccggcttcggtcggcgtgaaccagccggtcaggatgccgccgagcaggatcaccgggatcatcagcggcagcgcggcgtcaccggcggcgaacacgacctggcgcagcggcgcgcggggcttgcgcaggcctgacggcccgaagaaataacagtagatcatcagcccgaagccgatcatgaggccggggaccacgcctgccatgaacaggccggcgatcgagacattgccgaccgcgccatagaccaccgccgtgatgctcggcggcaccagcgccgcaatcgtcgaggccgaggcgatgatcgcggcgatgaaggccggctcatagccctcccgcttcatcggtccgccgagcgcgcggctcatgaccgcgacatcggcggtggtcgagcccgacatctccgagaagaacatgctgaacacgacgacgacctgcgacagcccgcccctgatatgcccgaccagcgagaccgacaggttggcgatgcggaccacgacattcgcggagctcatgagctcgccgaccaggaggaagaacgggatcgcaagcagcgcctcggaatcgacgccgtcgaagatcttctggatgatcgccgccagcgagacgtccgacagcatggcgccgacgaacacgccggccatcagcgagaacggcaccggcacgccgagatagccgaagaacaggaagcaggacgacatcagcacgagcaccaccggcgcgctcacggctgcgcccccgtggtcgaagggatcgcgaggtcctcgtccggcggctccggatggtcaaagccgttgcggatgccgttgacgagttgctcgatcgtgaacaggccgatcaggattcccgacagcgggatcaccgcatagagcgaggcgatcggcgtacccgacggcaggcggaagctgccgaagccgcgcaggtagttctgatagccataccagaccaggcagaaggcgacgcccagcacgaccagccgaatgatgatctcgacgaccagccgcgaccggccatgcatcgcctccgagagcgcggtgagatagagatgatcattgcgcctggtcgcgaccgcggccccgatgaagatcgcgtatatgaacagcgtcgaggtcacctcctgcagccacagccaggggtggccgatggtgcgggtgacgatgtcggcggtgaccgagagcgagaagccgaagcacaacagcccgcacagcatcatcaggaccaactcgagccgatcgagcgcccgccacttcagatgccgctgccgttgcagcaccagtctgtcggcgatggccatggctcgaaattcctcgtcgtcccggcgaaggccgggacccataaccccggctcgagttgtgcagaaaagtcggcaacccaattgcttaattaaaggccgcggcgtatgggtcccggctttcgccgggacgacgctcgtctagttgatcgcgcggatcaggttcttgatcttctcggcatgcgggccgagctccctggcgagcttgtcgagatagggatcggcgatcgccgtaaagctcttcttgtcgacatcctcgaccaccttgacgccgaacgatttcagcttggtcagcgcattgcgctcgagctcgaacgccttctgcggctccttggcgctgacctcgttggcggcagcctgcacccactgcttttgctcggcggagaggctctgccacagcttgtcggagacgaacagcagcgcattgttggcctcgtgctcggtgatcgagagcaccggcgcgacctcgtaatgcttgttgaccagatagacattgatgctgttctcggcggcgtcgaccacgccggtctgcagcgaggtgtagacgctgccgaacggcatgtgcaccgtctgcgcgccataggccgggaacatggtatcctcggtcgcggtcgcctgcacccggaccttcatgcccttgatgtcgccgacgttgtggacttccctcttgctgtagatgtgacgcacgccctgcgagccggtgccgatcacatgcaggccctgggcggtgtcgtcgatcatggtcttgatggcgtcgaacacctttgggtcggccagcgccttgatgacatgggcctcgttgcggaacaggaagtgcagcgacatcacgcccgcctgcggcgagatcgtcgcggtgttggcggaggagatgatcgcgaactcgatatcccctgacttcacgagctgcagcagctggggctcctggccgagctgcgcgccgggatattgatcgacgaccagagtccccttgctcaactccttgagcttctcggcgaacagatcaccggcgaccgaatagccggtgttgcgcggctggtcataggcgaaacggaagtgcttgacctcctgtgcgccggcgctcgacggcagcagcagcgctgccgcggccatggctatcccgacgatcccggctgaagtgcccatcgcgacgctccccctgtttttgcttgacgcgatcatcccaccagtctcgcgggattgtcaataaaacagaggtaatcagctcatcgtaggcgcgaacgagcgccgcattacagaaattatcgacaattcagcaaatagccgaacttggcgcgcgttacttccccttacttccccttggcgctcatgaagtcgaaatcgcagccttcgtcggcctgcaggatggtctcgttgaagagatgcgcgtagccgcgcttcgcccagtccggcgtgccggccggcgcgagcgctgcgcgacgcttctcaagttcggcctcatcgaccagcagatcgatgctgcgcttggcgacatcgagccggatcatgtcgccgttgcgcaccagtccgagcggaccgccgacggcggactccggcgtgatgtgcagcacgatggtgccgaacgcggtgccgctcatgcgcgcatcagagatccggaccatgtccttcaccccggcgcgcgccagcttcttcgggatcggcaggtagcccgcctccggcatgcccggcgcgcccttcgggccggcattgcgcagcaccagcacgtcgtcagcggtcacgtcgagcgcgggatcatcgacccgcagcgtcatgtcttcgaccgactcgaacaccacggcgcggccggtgtgctgcaacagctttgggctcgccgccgactgcttgatcacggcgccgcgcggcgcgagattgccgtgcaggatcgccatcgcaccttcggacttgatcgggtttgccttggagcggatggcatcctgccccggcacgtcctctgcattagccacgacctcgcgcaaggtctgaccggtgatggtcctcgcgtcgagatcgatgaggtcgccgagttgcgccatcagcttcggcacaccaccggcatgatggaagtgttccatgtaatgctcgcccgacggcttgaggtcgaccagcaccggcacctcgcggcccagtctgtcgaacgcctcgaggtcgatcttgtgcggcgagcggttggcgatggcggtgaggtggatcagcccgttggtcgagccgccgatcgcctgcatgacaacctgggcgttgcggaacgaggccggcgtcaggatctcgctcggcttcggtcccttggtcttcgccatctcggcggcgacgcggccgctggcctcggcggagcggaagcgttcggcatgcggcgccgggatcgtcgcgctcatcggcagcgacaggccgagcgcctcggtgatgcaggccatcgtggaagccgtgcccatcaccatgcaagtgcccacggagggcgcaaggcgcccgttcaccgcctcgatctcgttgtcgtcgatctcgccggcgcgatacttgccccacagccttcggcagtcggtgcaggcgccgagcacctcgcccttgtgatggccgaccaccatcggcccgactggaatcaccaccgtcggcaggtcggcgctgatcgcggccatgagctgtgccggcagggtcttgtcgcagccgccgatcacgatcaccgcatccatcggctgggcgcggatcatctcctcggtatccatcgccatcaggttgcgcagatacatcgaggtcggatgcgcaaagctctcggcgatcgagatggtcgggaacacgaacggcatcgcgcccgacagcatcacgccgcgcttcaccgcctcgatgatctgcggcacgttgccgtggcagggattgtagtcgctgtaggtgttggtgatgccgacgatcgggcgattgagcgcgtcgtcggaatagcccatcgccttgatgaaggccttgcgcaggaacagcgagaagccggcgtcaccgtagctggtcagtcccttgcgaagtccgtcggccattttcttctcgtcccgtggttatcaggtcgcacttaaggagcggccggaattattgtcaatatgagataatccggcggcagcgggtggctgctccgcggcaaaattgctctcattattgacaatggccagagcatcatgctgacctcagggcatcgcccccgaagcccagagcccatgaaagccgagcccgtcccgcccgaactcctggccccctcgcgcgaggaggaacaggcggaagttatccgccggctggaggaggacatcatcttcggccgcttcgcgcctggcctgcggctggtcgaggatacgctgatgcagcgctacggcgcgagccggcatttcgtccgccaggcgctgttccagctcgagcgccagggcatcgtgctgcgcgagaagaatgtcggcgccacggtgcggttctattcggccgaggaggtgcggcagatctacgaggtgcgcgagatgctgacgcggcaggccgcgctgatgatcgccctgcccgcgccggacagcctgatcgaccagctgagcgagctgcagcggcactactgcctcaaggccgacacgcaggacatgcgcggcatccatgagaccaacgacgcattccacctcgcgctgttctcggcctgcggcaatccctatctggtgcgctcactgcaggactacatgaacctgacactgccgatgcgcgccaagaacctcgccgacagcgaaggcctcgcgctgtcgcgccgccagcacgaattgatgatcgagctcctgaagggccgcgacagctgggcgctggcgcagctctgcgtcgatcacatgcagtacagcaaggcggattatctggtccgcatctccaacgacaaaaagccgcaatagcgcgatacgcggcctcctcgtgaaggggagacggcgatgcgctacgtggctttgttgatgggatcgttcgccgtgcagctttcgctcggcggaattgcggaggcggccgacccgcgcgcgaccgaactcacctacgagccctgggccaagacctgcctgaccgaggcgagctgcttcgttgccgctgccgcacgcggccagtgcgcgccctcgggcggcaccatcagcatctcgccgcagagcccgacgcgcgcgctgctcactgccaatgtcggcacgcggaccatgctggaaggcacgatcagcctgcggatcgaccaggacgagccgatgcagatcgcgcggacgcactgctacacgctgggctgcggcgggaggccaatggcgaactgatcgaacggctgaagcatgcgcagacgatcgtggtggaagccaagaacctgaccggacagaagatcagcctcaacttcccgctcgcgcacttctcccagacctatgatgggcccggaagcgcccccaaggcgacctccgggaaaggtgccaacgagccgcagcgggagcacaccgaggcggtgaagcagctgccgcagtgcgaggattgatcacttcttccagtcgatcaccgctgtcctgtcgccgtcgaattccatgctgcagaacgcgccgccctggtagtagtcgccgaccggatcgggcggcagcttggcctgctcggccatcgcgtgctcgcgaaaatcttcgccgcggccggtcggacgatagccgagatcataggcgcggtgattgtcccaccacgagcgctcattgtacgacgcgccgtacagcacctcgaaatggatatcgggatgttcgagcccgatccggcagagctgcaccagatcttccggcttgagccagatcgacagcctgcggtgatcgagcggcgcctcgccgaaattgccgatccggatgcaggtcaccttgatgccgtgcttgtcggcatagagcgcgccgacgccctcgccgaacaccttgctgacgccgtagcggctgtccgggcgcgcggtgacgtcggtgccgatgcgatgatgccgcgggtagaagccgaccgcgtgatttgacgaggcgaagatcacgcgcttgacgccctgcttgcgcgcggcctcgaacagattgtagccgccgatgatgttggcctgcaggatcgcatcccaggacccttcgaccgaatagccgccgaaatgcaggatgccgtcgacgccctcgcagaccgcctcgacctgtgcgaggtcggcgagatcggcggccttgaatttctcgtgtccgccgagatcggagggctgcttgatgtcgctgagcaggaggtcgggatagatcggcggcagcagcttgcgcaggctcgttccgattccccccgatgcgccggtcatcaatatgcgtggcatgccgtccctcgtctttcctgattgatcagcgcaatccctggagcaaattgcgatcgcaggccgacaatgatagcaaaccaagcgctcaaggaaacaccatcgaaacacaacaacgagaacagcaaatgtccgatgttcattccgccggctggcgtcccgcgacgtactatcccgatcccgcgatccacgcgctcgacccgcgcttcgagaaatactggctaaaactctccgcggtcgaacgcatcgcgaccggcctgcgctgggccgaaggcccggtgtggttcggcgacggccgctatctgttgtgcagcgacatcccgaaccagcgcatcctgaaatgggaggaggagaccggcgcggtcagcgtcttccgcaagccgtcgaacttcgccaacggcaacacccgcgaccgccagggccggctgatcacctgcgagcacggcggccgccgcgtggtgcgcaccgaatatgacggatcgatcacggtactgatcgatagcttcggcggcaagcggctgaactcaccgaacgacgtcgtggtgaaatccgacggcgcgatctggttcaccgatccgaccttcggcctgctcggcaattacgagggctacaaggccgagcccgagatcgacgccaatgtctaccggctcgatccggaaaccggcaaggccaccatcgtcgccgaaggcgtgctcggccccaacgggctgtgcttctcgccggacgagacaatcctctacgtcgtggaatcccgcggcgtgccgaaccgcaagatcctggcctatgacgtttccgccgacggcacgacgatctccaacaagcgcgtcttcatcgatgccggcccgggcacgccggacggtatgcgctgcgacatcgacggcaatctgtggtgcggctggggcatgggcgaccccgagctcgacggcgtcgtggtgttcgcgcccgacggcgtcatgatcggtcgcatcgcgctgccggagcgctgcgccaatctctgcttcggcggcgtcaagcgcaaccgcctgttcatggccgcgagccagtcgatctatgcgctctacgtcaacacccagggcgcactcggcgggtagtagttcttggtcgtcccggcctaatgcgcaattgcgcacgggagccgggacccataccgcgtgatctatcgagcaagaaagtcgcagtaccacggcacggccaaatcttcgccaaacctctccctgtggttatgggtcccggccttcgccgggacgacaatgaatatgcggcatcccaaaacgtctgacgccggagcagttgcctgccccggcgccagaatgtcgtctctcgtgcgttcggcttacgcggcgttgtagccggcgacagccttggcctcgaggtattcttccagcccgtaacggccccactcgcggccgttgcccgactgcttgtagccaccgaacggcgcggtgcgctcgttcggcacgccctgcaggttgacgttgccggcgcggatctggcggccgacgcggcgcgcggtctccacggtgtcggccgagacgtagccggcaagaccatacggcgtgtcgttggcgatcttcacggcttccgcttcgtccttggcgccgatgatcgtcagcaccggcccgaagatctcctcgcgggcgatcgtcatgtcgttggtgacgtcggcgaagatggtcgggcggacatagaagcccttgttgacgccttcgggcaggcccgggccgccggcgacgagcgttgcgccctcgtcgatgcccttctggatcagcgcctggatcttgtcccactggccgcggttgaccaccggaccgatcgtggtgccgtcggcacgcggatcgccggccttggtcttgtcggcgacgcccttcgcgatcgcagccacttccttcatcctggagagcggcacgatcatgcgcgacggcgcgttgcaggactggcccgagttgttgaacatgtgcatcacgccgccggtcaccgccttggcgaggtctgcaccctcgaggatcacgttcggcgacttgccgccgagctcctggctgacacgcttgacggtcggcgccgcacgcttggcgacgtcgacgccggcgcgggtcgagccggtgaacgagatcatgtcgatgtccgggtgctcgctcatcgcagcacccacctccgggccgaggccgttgagcaggttgaacacgcccttcggcacgccggcttcatggaggatttccgcgaagatcagcgccgaggtcggggtgaactccgacggcttgaggatcatggtgcagccggcggcgagcgcgggcgcgaccttgcaggcgatctggttgagcggccagttccaaggcgtgatcatgccgacgacgccgaccggctctcgcacgatcacggcggtgcccatggtctcctcgaactcgtacttcttcagcacttcgagggtgttcatgaggtggccgagcccagcgccggcctgcagcttctccgccatcggcagcggcgcgcccatctcgtcggagacggcagcgccgatctccttcatgcggcccttgtagacctcgacgatcctggtgagcagcgcgatgcgctcttcgcggctggtcttggaataggtctcgaacgcgcgcttggcggcggcgactgccttgtcgacatcggccttggagccgagcgcaatctcatacatcgcttcttcggtcgccggattgacgacgggggtggacttgcctttgacgacgggatcgacccaggcgccgtcgatgtagaattgcatgcgattgaccatcggaaacctcttgtagggggcgtatggaattgggaacggaaagcgttcggcaggcatccttgcacgaaagcagggcgaattgaacccgccatatgcggggcgcggctcgtgcacgcacggcgcatataagggtcgaggcaagaggctggcaaggctctctccccgtcattccgggatgcgccgtttggcgcaggcccggaatccatttcaccacgaaatttgcggcccgatggattccgggctcgtcgcttcgcgccgccccggaatgacgactcgcgtgtgtggctacaccgccatcttgcgatgccgcaccggggcgccggccgagacgctttccgcagcatcgatgatggcgttggcgtcgatgccgtagtgccggtagaggtcggcgatggtgccggtctggccgaaatgctcgacgccgagcgcctcgaggcggtggccgcgcacgctgccgagccagccgagcgtggccggatggccgtcgatcacggtcacaatgccgcagtcgcggccgagcggcgccagcaactgctcgatatgactcaaatgctgcacgccgcggcggtcgcggcgcaaattccgcgcggcggaccaacccgcatagagccgatcggccgaggttaccgccaggagaccgacgtcgcggtggctctcgccgatcaggccgaccgcctcgatcgcctcaggcgcgacagtgccggtatacgcgatgacgatgtcgcagttcgggcccggcttgcgcatccagtaggcgccgtcggtaatgtcgcgctgcaggtccggcgtcatgatccgttgcggctgctccagcattcgggtcgagagtcgcaagtaaaccgaaccaccctcggcgccctcgcgctgcatgtggccgaagccccagcccatgatcacggcaagttcatcgacgaaggccggatcgaacgaggcgagtccgtcctgcccgattccgatcaagggcgtcttgatcgactggtgcgcgccgccttccggcgccagcgagatgccggacggcgtcgccgccaccatgaagcgcgcatcctgatagcaggcatagttcaacgcatcgaggccgcgctcgatgaagggatcgtacagcgtgccgaccggcagcagccgcgcaccgttgatctggtgcgacaggccgagcgccgagagcatgatgaacagattcatctcggcgataccgagctcgaggtgctggcccttcggcgaatactcccaggtgtaggcagacgggatcttctcctgccggaacaggtcgtggttctccgccttggcgaacaggccgcggcggttgacccaggcgccgagattggtcgacacggtgacgtcgggcgatgcggtgacgatgcgcgatgcgagctcgctatcgccgcgcgccagttcgtgcagcacgaggccaaagccctgctgggtcgacatctgggctgaagccttgaacgccagccgctccggcacatcgacgacgggcgccgagagccggcggcggccctcgcgattgaacggcgcatgggccaggaacgcctcgagcttggcaggttcctgcgacaggccctcgaacttgtcccattcgtggccggtgcggatgttctgcgcggtgcgccatttctccatctgcgccaccgtcatcaggccggcgtggttgtccttgtggccctgcatcggcaggccgacgcccttgatggtgtaggcgatgaagcagaccggacggtcatggtcgatcgcctcgaaggcctcgatcatgctcgccatgtcgtggccgccgagattcgacatcaacgccagcaactcgtcgtcgctgcgccgatcgatcagggccgacacctcgccctggtcgccgatatcgtcgcgcaggtgcttgcggaacgccgccccgccctggaagcacagcgccgcgtacatctggttcgggcaattgtcgatccagcgcctcagcgcttcgccgccgggctcggcgaacgcctccagcatcagcttgccgtatttcacgatcaccacgtcccagccgaaattgcggaacatggtttcgaacttggcccacagcccctcgcgcaccacggcgtcgagcgactgcctgttgtagtcgaccacccaccaggtgttgcgcaggccgtgcttccagccttcgagcagcgcctcgaagatgttgccctcgtccatctcggcgtcgccgaccagcgcgatcatgcggccttcgggccggccccccaaccagccatgcgccttgacgtagtcctgcaccagcgaggcgaacagcgtctgcgccacgccgaggccgaccgagccggtggagaagtcgacgtcgtcggtgtccttggtgcgcgacggataggactgcgcgcccttgtagccgcggaaattctccagcttgtcgcgggtctggtggccgaacagatactggatcgcgtggaacaccgggctcgcatgcggcttcaccgcgacgcggtcctgtggacgcagcaccgagaagtaaagcgccgacatgatgttggcgagcgaggccgacgaggcctggtggccgccgaccttcagcccgtcggtcgagggccgcacatggttggcgtgatggatggtccatgacgacagccacagcaccttgcgggccagggccgtgagcatgtcgagacgttccggcgcgattcccatggcaatgctcccagcgatattgccgatgttactgccgctggcaccgtcgaaaatctcaattccacgcgacagcacaggaaaaattgggataaattcccacgatcccgcctcaatcaacgagttcatcccaatgcctgccctcgatgccatcgaccgcaagatcctggccctgctccagaccgacagccgcatgaccatgcaggagctcgccgacaaggtcgggctgtcggtctcgccctgccaccgccgggtcaagctgctcgaggagcgcggcgtgatctcccgctacatcgcaaccgtcgaccagaagtcgatcgggctgcatgtctcggtgttcatctcgatcaagctcgcacggcagaaggaggaggacctcaaccgcttcgcgcgcgcgatctcgaaatgggacgaggtgctcgaatgctatttgatgaccggcaaccgcgactatctcttgcgcgtcgtcgccgccgacctctcctcctatgaagcgttcctgaagaacaagctgacccggctcgacggcatcgcctcgatcgagtcgagttttgcgctgagccaggtgaaatattcaacggcgctgccggtgtaggtgtgtggttggtgagccgaaccgcgtcaccccacagtgtcgtcctggcgaaggccaggacccataaccaccacattcggtgatgaacgggatcgtggccccggcgtcgcgcaacaacagacattcgggataatgggtcctggctttcgccagcacgacggcgtggatggctctcgctttaagccgtcaaacaacgcggtgtcatcgccgctgcgcaacaaccggcccgcaaagagtcgcacgcaattcaggttgcggcgggaaccgagcggcagcgtggcgtgttggtatcgagcattattgagtgttttgacacaagtgagaacgaacatggctcgccgcagacacgtctggttggcgctcatcgcggtgctcgcgaccgcggcaccggtgacgctgttcgccgatcccgcacaggcagcccgcggcggcggtcacggtggcggcggtttccacggtggcggcggcttccgtggcggtggtggcttccatggcggtggtggcggtttccacggcggcgggcttcgtgcgggtggcttccacggaggaggctttcacggtggcggcgcccgcgcgggcggtttccataccatccatacggcgccccatgccgcgacaagaatgggacgcagcggcggcgcgcggcaattccatgccgtccacaatccggccatggcccacagcccggccgtcagccgcaatccggcgttctcgcacggcgtagctgcgagccgccaggcgccgtcggccgccgcgatgcggcgcaacgccagcgccatcggtcgcactttgtcctcgcgtccggtcacggccgccctgcgcagcccgggcggcttgcgcaacccggcggcgcgcgccgcgatcatgacggccgccgccggcgccgcctggggctatcacaaccacaatggcggctggtggtggcgccatccgcatggcggtttcggctgggtcggtccggtgttctggccctatgcctattacgatctctacgactacgcctggtggggcgacgactacgacccgtacttctgggactatggctacaacgacatctataccggcctgttcggcccctatgactacgatgccttgagcggctatgccgactacctgcccggccgtaccggtccgcggccgccggtcgcgggccgctccggtgcgcccgctcaaactgcgaccctcgccgacatgtgcggtagcgacagaagcgatatcgcgggcttcccgatcgaacaattccgcagcgcgatccagcccaatgcggagcagagcgcggcgctcgacgaactcgccactgcatcgcagaaggcgtccgaaaccattctcagttcatgtcccaaggacatcccgttgaccgcgccgagccgcctcgcctcgatgcagcagcgcctccaggccatgcgcgacgcggtcggcaccctgcaaccggcgctggagaagttctacgggctgctcagcgacgatcagaaagccaaggtgaccgcgctggcagcggatcagcaacgcagcagacgcgaggcgacgcgagacaacggcaattgcaacgcggcgcaacctgccgccatcgcatggcccagcgagatcatcgaacgcgacgtcaaacccaccgacgcgcagcgggcgagcctcgatgccttgcgggacgcggcaacaaaggccgaggacgcattgaaatcgtcctgtccgcccagcgatgcgcgcacgccgccggcgcgccttgcggcagtcggagcacggctcgattccatgctccaggcgatcgggacggtacgcccggccctcgacaccttctacggcgcgctcagcgacgagcagaaggcggcgttcgacgcggtcggccccgggcaggacggcggcaggaccgcaatggccgcagccaacgacgaaccgccgcgaagccgtcatcgccgccaccgccatcacggtcccaatatcggcggcatgatcttccggatgatcggcctgtagggctcgtcatcgccgccgcgcgcggttggcggcaacgccatcccaggatcgcttaccgcggtccgctgcctctgcgctcaccgggctacggcgcgatccagacgccgatcaggatgatcgccaatgagacggcaatcacgagcacgtcggtcgtgagccactccggcattccacttgctggctgcttgctcatgtccgcgactccttctgttcgcgtcgagccaccatgctgaagcggatcagcgcgaacgaggatgaactggatcacataagggcgcgacaagcggtcgctctgaatttcgcgcatctgcgcgcgctgaagttgcggcgcgcgatcgttctgccgcacaggtttctgaacatgttcgagaacgccggcggctgcggctaacgctagcacgttatcgaccggcgcggggtaccacatgacaaggcggatcacacccagaagcccgtgatcgggccgcagttcgcgcacatccgcagtgcgtaagatgtgtagagcgcagcgaaactcatcctacgcagctacagcggcatcacagcaccttgcgctgcgccaggttcttcatcaacgcaccgacgccgaacgtccacggctcgcattcgtcgctgccgcgcatgcggttgacgagcttgccgagctgaggcgccgcgatggtgacgatgtcgtcgcgcttgtgggtgaagccctcgcccttggcgtcgcggtccttcaccggcgcgaacatcgtgccgaggaacagcgcaaagccgtcgggatattgatgcacggggccgatggtttgcgcgaccagatcggtcgggtcgcggctgatcttggagatcgaggaatggccctcgagcacgaagccatcggtgccggtcacggtcaggccgacatccatcttcctgacgtcgtcgagcgagaacgtctgatcgaacagccgcagcagcggaccgatggcgcaggaggcattgttgtccttggccttcgacagcagcagcgccgagcggccctcgaagtcgcgcagattgacgtcgttgccgagcgcggcgccgacgatcttgccggcgccggagacgacgagcacgacctccggctcgggattgttccaggtcgacttcggatgcagcccggcatccatgccggtgccgaccgaggacagtgtcggcgccttggtgaacacttcggcatcgggaccgatgccgacctccagatactggctccaggcattctgatcgatcagcacctgcttcagccgcatcgcctgctcggagccgggcttcagcttggagagatcgtcaccgacgaggcgcaccacttccttgcggatcgcctccgccgaggacggattgccgcgcgcccgctcctcgatcacgcgctccagcatcgagatcgcaaaggtgacgccggcggccttcagcacctgcaggtcgaccggcgcgagcagatgcggcttggtcgcgtcgcggcggtcgggcggcgtgttggcgaggatcgtctcgaaatcgccgatccgctcgccgcgcgtggcgcgcaatgcggcagcgggatcggcttcctcgcagagcgcgctcacggtggggaaacgcgcggtgacgtcgaacacgccgtccgcccgcaccgcaaccacggccggtccgcccgcctgcggcagccagacccgtccgaccagcgcgccggcggtgccgtcctccggcaggacgtcttttggcgtgagcgaaatcatcggcatctcccattttcgtgttgttggcgcttgttagcacagccgcggcgccggcgtgagacagcggtcatggcattgtcatagaggggtaacatcgcccgtcaatgctcccgtcgatccatctaacacactgaaagacggaccttcatgaccgctccccacctcaccgacgaagccgcccacgaggaagcactgcgtgaggaagccttgcgcgcccgcatccatcaggagatggccgacaatctcgacgaggaactcgagctcgaactcgacgacatcaggctcgacgagctcgaccatgacggggaagccggaaagccgtcgatcgaccgcaagttctacttccgcgaattgctgcggctgcagggcgagctggtcaagctgcaggactgggtgcagcacgagaagaagaaggtcgtcgtgctgtttgagggccgcgattccgccggcaagggcggcgtcatcaagcgcatcacccagcggctcaacccgcgcgtctgccgcatcgcggcgctgccggcgccgaacgagcgcgagcgcacgcaatggtacttccagcgctatgtctcgcacctgccggccggcggcgagatcgtgctgttcgaccgcagctggtacaaccgcgccggcgtcgagaaggtgatgggattctgcaccgacgagcagtatgaggagttcttcaactcggtgccggacttcgagcgcatgctgatccgctccggaaccatcctgctgaaatactggttctcgatcaccgacgaggagcaggcattccgcttctcgatgcggatccaggatccgctgaagcaatggaagctgagcccgatggacgtcgaggcgaggacccgctgggagctctacaccaaggccaaggagacgatgctggagcgcacccacctgccggactcgccgtggtggatcgtcgatgccgtcgacaagaagcgcgcccggctcaactgcatctcgcatctgttgagccagatcccctatcagcacgtcgcccaccaaccggtggtgctgccgccgcgggtgcgcaaccccgactatcaccgcggtccgatcccgccggagatgttcgtgccgggacggtattgatcccgttgtttcccctctccccgttcttgcggggggaggcacatcgcgcattttcggaataatagaataatgcctctgatttgcccgacatgtcaagttgacgtgtcgactgccggcacgcggccggctcctttgcatggggttgttttcgagtttttgacggtgcgccccggcgagggcaggcgatgtgcgatagccaggccgcaaacggggaggtgaagagatgggcatctcctcttcgccacgcctaccaatggtgcaggcgcgcgcccttgctggcacaggaacccgacgctaggcttcggcgacctggtgcagggaggcccgcttgactcaatccgacgatgtgaagatttccgaagatcgccgcgacgcgctgcgctatgcgctcgggatcggcagcggcgtggcgctcgcggccgcgatggcaaccccggccgcagcgcaagcccaagccgacaacacgctggatcgcatccgcgccaccaaggtgctgcggatcgcggtgctgcccggcgagctgccctatttcaacaaggatctcgccaccggcacctggtccggcttctcgatcgagatggccaacgacctcgcgaaactgctcgacgtcaagctggaatatgtcgagtcgacctacggcaattcgattctggatctgcaggccaacaagatcgacctcggcttcgcgctcaacccgacgccgcagcgcgcactggtggtcgatttcaccaacctggtgttcccgcatccgttcggcgcgatgctgaagaaggggctggaggcaaaaacctgggccgacatcaacaagccggaggtcaagatcgcagtcgacgtcggctcggccaatgaggcggtggcgcggcgctttgcgccgaacgccaccatcaagtcgctgaagtcgcgcgacgaggtgatgctggaaatgtcgtcgggccgcgtcgattgcgtagtcaacgcgctggtgctcgggctgaccgcgatcgccaagaacccgaacctgggcacctacaagatcctgacctcaccgtcggtgacgatcgcgagcggcacggcggtgcggcgcgagcaggacaagcgctggcgcgatttcctctcggtgtggatcgactacaaccgcggcatcggccagatgcgcgaatggttcgtcaagggccttggacttgccggcgtcaaggcggaggacgtcccggtggagctgaatatctgaggctctggcgtggttcggtttggggctcggtcccttcacctctccctacgggagaggtcggcgcgaagcgccgggtgaggggtctcaggtcctacgagagagcgtgccccctcacccggatcgcattccgcttcgctgcatgcgatccgacctctcccacagggggagaggtaagacagatcacaccttgtcgtaggtcagcccgcgctccagccggcgcgccaccagcgtcgacgggaacaggatcgcaaagtagatcagcgcgacgatggtgtagacctcgagcggccgataggtgtcggcgttgatcagcgtcgcgttgtagaccagatcgggcaccgcaatgatcgagaccagcgaggtgttcttgagctgcgtcaccgactggttgacatagggcgccatcatcggcttcagcgcctgcggcaggatcacgagccgcatcaggcgccagccgcgaaagccgagcgccttcgccgcgtcccactgcccgaccggcacgctctcgatcgagccgcgcacgatctcggcatagaatgcgccgccatagagcgacagcacgctgacggccgcgacatgcgccgggatgttgacgccgatcacgaccggaaaggcgtagtagaaccagatgatctgcaccagcagcggcgtgcaacggaacaattcgatataggcgatcagcagccagtcgatcacgggaatgcgccgcagccgcagcatgccgacgatcagaccgatcaaggtgcccaggatgatggtgccgatcgtgtaagcaatggtccagccgagcccgagccagaacagatggctgtacttggcgaggatcccgaaatcccagacgtagttcatcctgcccctctgttgccgcgcggcgtgtgctgaccttgcggccccagcatcgcaggcggcctcgcgcgagtcacgcgatatgccggcacgacgacgccgaccattgtgccgttacatcagggtgagcccgccatcgaccggcagcgtcgcgccggtgacgtgggcagcgtccgacgacagcaggaaggcgacgacggcggcgacctcgtcgggctcggccagccgctgcatcggattggctttcgcgacgcgatcccaggtcgcggtatcgagcgcgccgagcaggccggggtccttgcgcgtatagccgggcatcacggcattggatgtggcgcctgatacagcgagttcgatcgccagggacttcaccagcacttcgagcgcggccttcgccgcggccgatcccggataggtggctcccggcacgaagcgatgcggcccgaaactggagaccgcgacgacgcggccttgcgcgctgcgcgtgaggtcggccagcgcggcggcagcgatctcgtggaaggccgctgccatcacggcgaaggcgcgctccagcgccgcgcgcggcaggctagcgaattcgcggcggtcggcaaagcccgcggcgtgcacgatgctgtcgatcggcccgaacgcggcgcgcgctgcctcgaccagcgcggcgccggcaccggccgcggcgagatcgccggtctggatctcgaccttggcgcctttggcgcggcattgctcggcaaccgcattcagccgggcaaggccagcggcgtcagcgccttggccgtgcagcatcagggattgatcggggccggcgagccggcgcgcgaccgcagcaccgatgccggagccgcctcccgtgatgattgaaacgcgcatgagataggtgctgtcagtacttccgaggacagcgaactataggttcggtgccgcgaaatgcaaaccgcgccgccaccttcagttcaacgccacggctcgaccaggatcttggtatgggcctcgggattggcgagatcggcaaaggcctgcgcgacgccgtcgatgccgacgcggccggtgaccagcgaggcggcatcgacctggccttcagcgatcaggcgcagcgaataggcgaactcctcgggcgtgtagccgagcacgtactggacgttgagctccttgatgatgccgagcatcggttcggacttgtcggtctccatgcagacgccgaccacgacgacgcgggcgctgcgcggcgcgccctcgaacacctgctgcagcacgccgggcacgccgacgcattcgaagatcagcgcgggcttcagcggcggcagcagcgcctgcatcggcggccgcgcggccttctcggcttcggacatctgggcgtgctcggcccagctcgcatagggctgcgtcttcgccggatcgaccacgacatcggcgcccatcttctcggcaagcagccgccgcgccggcgaataatccgcagcgacgatcgggccgagccccctgatcttcaacgccgcgatcactgcgagcccaaccggcccgcagccgatcaccagcggcacctcgccgcccttgatgccggccatcgccaccgcatgcacaccgaccgccagtggctcggtgagcgcggcgtgctcggcggcaagcccgttcggcacttcaagcagcagcggctcgctgagcagcatctgctcggcataggccccaggataatcgttggaatagccgacgcccttcgggccctccggcgtcagcagcgccggcagcgagcagacccgcgtgccgggcttcagcttgcgcgtggtgcccggaccataatcgagaatctcgcagcagaactcgtggccgaacacgacgtcccgggacaggtccatcggcgtgcggccgggcaggaacttgctcagctccaccatgcggtgggcatgcttgcgcgcgtgcagatcggaaccgcagatgccgcaggcgagcgatttgaccagcacctggccggcgcccggcttcggctccggcatctgatcgacgacaatctcgccgtttctgaagatcgctgcgcgcatgtttcctccgcgtgggttttgtcccactcattttgatgcgtatttcgtcccgcgaaatgcgctgacgcggatcaaatccgcatcaggctttcgttgcaggacgctatagcatggagggtcaccacgtatagcgcataacacccttgccggcgtaggactgggtcacgctggagaactcgccttcgaaggtcgcccccaccgaccagccgttgcgccaccgcatctcgagcgcagccgtggtcagcgcggcctcgctggcctgcgccgcgccgttgaccacaaacgccgagccgggcagcgcctggaacacggccgcggcgctgcggctcgggttgaagtcgtgcgcccaggcgacgcggccgcgcagcgtcatgaggccgccatccaccgcgaaggatttgtcggtgcgcaggccgagctcgctcctgacatcggtgacgctcttgcccgcatagttcagcgcgaaggcgccgccgccggagaccacactctccgcataggccggcagctcgaagctggtgaactgggcggccgcgtacggcgtcagccccagccacggcgtcacgtaccgatagccgccttcgagccggcccgaccacgcattggcattgaagttggcgcgcagacgatcggtgcccgcggcagtgacgacgcggtcggtcgtgatgtcctgccagccataggcgagtgccgcactgagataggcggcaccgatgttgtggcgcaggaaggcgccagcctggaacaggtcggagcggccccagccgagaccgttggtggcgaagctggtgccgccgccggcgagagcaacaccggcgatcgtgttcggcgagaagcgatagtcggcgccgaccgcggtgccatagacgctgctcgtcgtgttgttggaacccagcaccgcattgccgctggtgctctgcgagccgccatagccggccgcccagacgctccagcgctgcgcgaaatcgagttgcggcggcggcgccttggcatagatggcggccagcgcatcgcgcggctcggtgctgcgcgccgcataggccaacgttgcgctctcctcggcgaacggcacggcgcccccaccgacaccgccatcgcgcccagcgacgaacggatcggccagcagcccgaggaacaggttcattgcgttgaacgtcgcttgttgcgatccggtcgcaccctcgcccgaggcctgcgtcaggccattcggcgacagcccggcatacatcaagttgatcccgccattggcattgaagaaattctgcagcgtggtggcgacattgccctgattgacgttgagcttcgatgttgcgccgtaatcgagcgcgaagttgagataggcattgttcgcgtcatagccgagcgttgcgaccagacccgacggcagcccggtcgaatcgacgccggcgaaggtgccgctgcggccgccggccgccgacaggatggtgtattgcctggcgatcgtgctgccggcggcaacgctggcgccgaccgagccggccagcgtcgcggtgccggtcaccctggctgatgtcgacgcggtggaattgagcccgacaagataaagcgcaccggattggaaggcgagattacctgccacgttgaggaacgtgcccggcactgcattgccgggcagcaggatgccgccgcttgcaatcgtcgtattgccgacggtaccgatgcctgtgagcgcaccacctgaattcaccgtcaccgagctcgacgacacgatcgagccgtcgatctgcaggacgccgccgttgacgacggtagtgccggtataggtggtaacgcccgacaaggtcagcgtgccgctgccggtcttctccagattggcggggccggccgggccgcagccgcagggatccacatcggcgatcacgccgctgacattggtcgagagattgttgccgccgaccgtgagtgtattgccgccgccgatatagtagatgcccgagcccgcgatcgagcctgccgtgatgcggccgtcgccgttcggtccaaggctgccgccaaagtccacatagccagttccctgggtgatgaattgcgcgttgccgccggtcgaattaccgaagaacttgacgctggcgccgctcgcggtggtgatcgtggcgttgccggccgtcgcgtaggcgtcaaagatcagcgaaccgccggatcggttggtgatcgtcgcgttgccggccgttgcataggcgtcaaagatcagcgaaccgccggatcggttggtgatcgtcgcgttgcccgcggtcggcgcctcggtcgagctgaagttcgacgtgccgaaataggtcaggccgctgttgtcgatggccgcgttcgccgcggtgctgttctggaagaacgcaagatagccggtggcggacgtcgttatcttcgccgacgccgccgacgaaaattcgaagaactgcgaaccgccgttgttaccattggtaatggtggaattgcccgcagtgctgctgtcgcgaaacaccgtggcgccgtaattccggttgacaatcacagccgtcgacgccgtcgtggaattgtggaacgtcgtgctgccgaacccgatggagccgtcgttgacgatcttggtgatgcccgccgtgttggcgttcacgatctcgaacctgccattgacagtgacttcgccgacgatcgaggcggtgtggctggcgtcgccgagttgcagcgttgcgcaactgcagatcgtggtgccgccggcataggtgttggagcctgtcaagaccacgcggccgaggaaggccgaagcgcccagcactgacagtccaccggcgccgctaatgttgcccgagtaagtgaaggtgtatccgttggcatcgatggtgccgccggtggcattgatctgtgcgttgttcgcgatcgtgtaattgccgccggcctgcagcgtcccgccatcgaaggtgagcaggccggtgccgatcgccgacgagacgatcgcgcccggcgtacccacggtgtcgacgccgacttgcagcacgctgctgccgccggcaatgccgcacgcagtgccgcagatcgtggtgccgccggtgtatgtattggcgccggacagcaccagcgtgccgcccccgttgagcacgatgtcgccggcgccgctgatcggccccgacatcgtgttggtggtgccggtcgcgacggtgatgacaggatcgctgttgatgacgacgcggttggcgatgttgatgccgttgccgtccagcatcagtttggtgagcccggcaagcgtctcgcccatcgtcagcgtgccgctgccaagcgcattgctgttacggaggacgagtctcgatccgtcgctcaccgaggtgccgccggtgtaggtactggcgccggtgatgatcagcgagcgcccgccgtccagcttgaccgcaaccgaggcgtcagtggcgccgcccgtgaggccggtgatgcgagagatggttacatcgccggtggcgccggccgcgctggtctgcaggaaggtcaggctggcgccgacgccattggcaatgccgagattgccggacagcgctccgccgctcgacgtcagcgtattggcaccgccggtgaagccgatcgcgttgccctgcacgcccgggccaccgccgccggtaatcgttccgctgttgatgatggtcaagccgccaccgacgatcccggaaccgcccgtgcctgctgcaccgggcctcccccgcgtgccgccggtggacggctcgccttgattcgagtagacatcggacacctgtgcgccgccgctaccgccggcgccaccggagatcgagccggaattcctgatcgttacgcccggcgacgtgacgacgatgccggtgccgccgtcgccgccgctgccaccgacgtcccctgcgccgcccgcgccgccattgccacccgtgatgctgccgctgttcgaatgggtcccggcgccggtgatgacgaccgcggcgccacccgcgccaccaccgccgccaccgccagcgacttgatttgaaggcatcgaggcgttgacgccaccgtcaccgcccttgccgccgttgccgccggtcaatatcccggcgttgttcagcgccgcgctggacgctccgttgagaccgccgccgccaccgccgccgccgctggctgtggatccgccgctcgttcccgcaacgccgtcctgcccggccgcgccaccggcacctccggcgggagaggcgttattgccgccagggccgccggcacctccggcggcccccgcagcgccaccaccaccgccacccccggtgcatacgcatgaccggttcggcgcgccgccgtcgccgccaaccccgccgttgacgcccggagcgccgccggcaccgccatattgtcccgtcgactgaaaatcaccctcgccgccaacgccgccattctgtgcgagggctggcacggccaatagacccgctgagaggatgaccgcggccatcaaccagccttgcagacggattcgcgcgcagccccactccggcattgccccagccccaaatcgatagcgccgcgcggacgcggcttaacctgaatgggctatgttgcaattcgcggcggacgcgtcttctcaggccgtgcacgaccgtggcgctcagcccgtgttcgcaacgataaagcgcagctgttgtaaaatagatacgtattgtcaggcgttcggcgacggctcgctggccacatccagcaattgcgagcggcggatgcgctcgcgatgcgcggtgtagaggccggaggcgacgatgaagccggcgccgaggatggtccagcggtcgggcacctcgccgaagatcaggaagccgaggacgctgacccagagcaactgcgtgtaggagaacggcgcgagcaccgacgcgtcgccatagcggaacgccagcaccacgatccactgtccgaccgtggaggcaacgccgatcaggataccgaacatgatgtcgtgccagctcggcgtgacccagacgaacggcaccagcgcgctgacgatggcgacgccgacgatggacgaataggtcatcacggtgaccggacgctcgctgccgctcatcatacgcgtcaggatcagcgtgccggcccaggccagcgccgagacgatcgggaagaccgcggcgggatggaaggcgctggtgcccggccgcaggatgatgaacacgccggcgaggcccaccgcggtcgcgatccagcgccgcatcccgaccctctcgccgagaaaggcgattgacagcgcggtgacgaacagcggcgagacgaagctcgtcgccgaggcctcggcgatcggcaggaagcccagccccgtgatgaagatcagggaggagccgagcagcgcggcgccgcgcagcacatgcaagccgggacggctgctgcgcaatgcgaacagcggcgtgcccggcagcatggccggcgtcatgatcagcgcgaacaccaggaagcggatccaggcgatctcgatcgaaggcagcgaggacgagagatattttgcggtgacgtcggaggtgccgagaaacaccgtcgacagcaggatcagcgcaatgcccttgaacggccggtcggtgcgcgcaggcgctttgcgcgttgcggacgtccttgcaggcaatgaaaggggaacgctgtccagcctggcggctacggcggggggcggtgtcacggcaatctcgaaggcgaaataaggggaatctgctgccctacagaacgccaattccgctgcgagaacaatgcccgaaaacgggactccgatatgcgtcagcaggcgcgaccgcccgccgcagccgcaatacggccgcacctgcaacagtttgttaactcacgtgtggagcgggcgtcgtgaatcccgcgaacttgcgggaacgctggattgttgtgtgacgcgctcagttcagagcatcggcaacgagcgcggtttcggcccgcgcgggaacgccgcgtcgagcgcggcgagttcgtcaccgctgagcttgagcgtaccagctgccgcgttctccgccgcgtggtccacgttcgacgccttcggaatcgcgagcaccgacggcagccgcgtcaggaagctcagcgccacctggcgcggcgtcgccttgcgcacctgcgcgatcgattgcagcaccacgccggccttgctcgatgctgacggaaaatcattgtggccgaacggcgagtaggcgacaacggccacgccgtgctgctcgcaccacgggatcacggcatgctcgatagcgcgctcccgcagatggtaaagcacctggttgcaggcgatattcccctcgcctgcgacctcgagcagttcgtcgagatcatcagcgtcgaaattgctgacgccccaggagcggatcttgcccgcggcgatcaattcgtcaaacgccgcgactgtctcggcgagcggataggttccgcgccaatgcagcaggtaacaatcgagccgatcggtcttcaaccgcttcagcgagcgctcgcaggcggtgatggcgccgcgccgcgaagcgttgctcggcaggaccttcgagaccaggaacaactcgtcgcgccggccgccgatcgcatccgcgatcacgagctcggcgtcgccatacatttcggcggtgtcgatatgggtcatgccggcatcgatgccgcgcttcaacgccgcgacggccgccttgcggtcaccgcgatcgagataccaggtgccctgcccgatcaccgaaacctgcgggccgttgttgccgaattttcttgtctgcacgatcgcctcgttctgcgtggctggtgtctcacccacgaggatagaggaaacaagggatcgtgtctgcacaccgcccgacggtgtctccccatcgtcgtcccggcgcaggccggaatccactaccaaagaggtcggatatgaaaagcgactgcggccacaacgtcgtgcaacaacgtagatttggggttatgggtcccgctcatgccgcctcgacgaagctgtggcgctcatagaggaattcgagcacgcgctgccggcacttcaggtagccggcgttggtcgcgagctcgagccgcttgcgcggacgcgccaagggcacctcgagcacctcgccgatccgcgcggccgggccgttggtcatcatcacgatgcggtccgacagcagcacggcctcgtcgacgtcgtgggtgatcatcaggatggtgttgccgagcttctggtgcagcgccatcaccgaatcctgcagatgcgcccgggtcagcgcgtcgagcgcgccgaatggctcgtcgagcagcagcaccttgggctccatcgcgagcgcccgcgcaatgccgacgcgctgcttcatgccgccggagatctcgctcggccgcttgtccctggcatgcgccatctgcaccaggccgagattgtgcatcacccaggcgtcgcgctcggcccggctcttggttcgggcaaacaccttgtcgacgccgagcttgacgttctcgtacacggtcagccacggcagcaggctgtggttctggaacacgacggcgcgatccggccccggcgaattgacctctcggttctccagcagcacaccaccattggtggcgccggtaaggccggcaacgatgttgagcaaggtcgacttgccgcagccggaatggccgatgatcgagacatattcgccctgatcgatggtcaggttgatgtccttcaggacctccgtggtgacattgccgcgggcaaaggtcttgtcgatgtgatcgagcttcagataggcctgcatgacttgtccccctcagttcgccgccgtgccgcgggtcacggccttgccgaggcccgcaatgaggcgatcgagcacgaagccgatgatgccgacatagaacagcgccaggatgatttcgctgatatgcgaggaattccacgcatcccagatgaagaagccgatgccgacgccgccgatcagcatttccgccgcgacgatcgcgagccaggacaggccgatgccgatgcgcaggccggtgaacatgtagggcgcagccgccgggatcatgatcttggtgaagaactccagcggattgagctgcaccaccgcggcgacgttgcggtaatcctgcgggatgttgcggatgccgaccgcggtgttgatgatgatcggccataccgacgtgatgaagatgacgaagatcgccgagggctggccgtcgcggaacgcggcgagcgacagcggcagccaggcgagcggcggaatcgtgcgcagcacctggaatagtggatcgagcccgcgcatcgcccagaccgactggccgaccagcgtgccgagcgcgatgcccgcgatcgccgccagcgagtagccgtaggcaacgcgctgcaggctggcggagagatgccagaacagccccttgtcgatgccgccatggtcgaagaacggatcgaggatcagctccttggtgtccttgaacacttttgtcggcggcggcaggctggagccggcgcgccggcagatcaactcccacaccaccagcagcagcgcgaccacgatcagcggcggcaccacccgcgccgcggtctccttcgccaacctggcgtaggtctcggcgcgcggtgcgcgcttcggcgtcatggtcacgaccggcgccgcggcagtggccggcggcgtcgcgacctccgaggtctcggtcttcatggcaatcatcgacattgacaaaggatctccgtggtcggcgacgggccgcgcagaaaagcgcggccctgacgggggctcggctcagacgtcgacgcgcttgatggacagcgacttcagataggcggcgggattctccggatcgaagatcttgccgtcgaagaaggtctccttgccgcgcgaggtcgaggtcggaatgtcggacacgccgagctccttggcggcctccttccagagatcctcgcggttgaccttggcgatcagcgccctggtgtcgaagcccgcctcatacttgccccaccggatatcctcggtcaggaaccagaggtcgtggctttgatagggataggaggcgttgtccttccagaaccgcatctgctgcggcgagttctcgaccacacggccggtgccgtagtcgaacttgcccttcatgcggtcggtgatgtcttccaccggacagttgatccactgccgcttggcgcagatcgccgcggtctcctcgcggttctccgccttctcgcaccactgctgggcttccatgacagccatcagcagcgccttggcggccttcgggttcttgtcgacccaggcggcgcgcagcccgaacgatttctccggatgcttgtcccagagctcgccggtcgtgatcgcggtgtagccgatctcctgatggatcagctgcagattccacggctcgcagacgcagaagcaatccatggtgccgactttcatgttggccaccatctgcggcggcggcaccacgatggtctcgatgtccttgtcgggatcgatgccaccggcagcgagccaatagcggatccagagatcatgggtgccgcccgggaaggtcatcgcggccttcactgccttgccggaggccttcttcttctccaacgcagccttgaagggcgcagtgtcgatgccgaccttgagatcggcatattccttggcgaccgagatgcattggccgttcaggttgagccgcgccatgatgtacatcggcgtcggctgattgttctgcgtcaccttgccggccgagatcaggtacggcatcggggtgaggatgtgcgcgccgtcgatgccgctaccctcggagccgagcacgagattgtcgcgcgtagtgccccacgaggcctgcttctgcacctcgacatcgggcatgccgtatttggcgaagatgcccttctccttggcgacgaacagcggcgacgcatcggtcagcgcgatgaagccgagcttggcgcctttcacctccggaccggcgccctgcgcgaacgcgccggcgggaaagttgagcttggccgcggcgagcagcgcggcggcgccaccgcttgccttcagcagccggcgacggctgatcgcgcggctcggcggcgtgttgctgggcttggtcatcggtcgtcctttgcgttgcggtgttgcgtctgtgcgtcgagcaacctcccgtcgggtggcgacgcgcgcagggcgcaacagggcatgcaccggggaggccccggactggcggcgtcagaaatccgatggggtggcctcgagggacggcttcaatggcgtcggcagctgactattcaagcctcgtgccaagctaccgcagggcagaaatggattttattgcaatgttttgcgcaacttgtcgcagcgcgcgccaacgtgccgcgcgctgccaaaaattgcgatcagctcaattcttgtgcggtgcacataaatcgagcagtcgatttgacgatagctatcaggcgtcttcggcgagcttggtgccaagtggcgcgggcgccatgccgccgccgggcttcacatggaattcgtagctcatcaagctccacggaccgtccgagcgctggccgtcgggcatcacgggatcggtgcgccgttcgaccttggcgatcagctcgtccttcacgccgaacaccacatcggagtcgatgtactcatcgccttcgacgaacacatgcgtgatcagcggctcgtaacccttggcgttgaccaggaaatgcacatgcgccggcctcatcggatgacggttggtctgcgtgatcatctgcccgaccggaccgtcggtcgggatcggatagctgcacggcacgatggtgcggaagaagaagcggccgtcggcatcggtgatgaagcgcgcccgcgaagaggcgccttccgttgcgaagctcggcttctgcgagtcgtagaatccatcatcgtcagcgtgccagacatcgaccgggacattggccagcggccggcccttgaggtcggtgacgcggctctgcacgaacatgcgctcaccgggcaggcttgccgagatgtcggtgccgtgcggcgtcaccttgtgctcgccgacatagaacggcccgagcacagtggtctcggtcgcgccgtcgcgatccctgtggttcaccgcatcgaccagcatcgagacgccgagcacgtcggacagcaggatgaattcctggcgaatgtcggtgcatttctgcccagtgcgagtcaggaaaccgatcgcgtggtcccactcctcgaaggtgagattggtcttgcgcacatagtcgtgcaacgacgtcaccagttcctgcagcaggaacttggcccgcggatccggcgtctggtcgaagctgcggatgacggcggcggtgagctcggtttcgttgaactgggtcatctcggcgtttcccctgaggccctttgggcgcgatcgcagcggcgagcctacaccaccggcccggagccggtaagtcgcagcagattggtgaaaccgacacttttcggctatcaaggctgcctcgccagccggagaaacgcccgatgttagcccccacgcctgcctcgcccgaatccgcgggaatgtcgaccacagccctcaatcgcctcgaagcgcatctgaagagccgctacatcgaatccggccgctttccggggacccagctgctgatctaccgccgcggcaagatcgtgcattccaccgtccagggctttgccgacctcgagcgcaaggcgccgatgaaggacgacactattttccgcatctattcgatgaccaagccgatcacctcagtcgccttcatgatgctggtcgaggaaggcaaggtcgcactcgacgagccggtcgcgaagtacattccggaatggaagaacctcggcgtgttcgttgccggtaccgcacccgccttcctgacgcgcgcgccgacgcgtccgatgcagatcgtcgacctcttgcgccacacctcgggcctcacctacggcttccagcagcgctccaatgtggatgccgcctatcgcgagaagaagatcggcgaggtcatcaaggccggtacgctcgacagcatgatcgaggacctggcgaagatcccgctggagttctcgccgggcgaggcctggaactactcggtctcgaccgacgtgctcggctatctcgtcggcaagatcgcagggatgccgttcgagcagttcctcaaggagcggatcttcaagccgctcggcatgaacgatacggatttcttcgtgcccgccgacaaggtgcaccgcttcgccgcctgctattccgccgatccgcagggcggcttcaacccgctcgccgccgagcgcaagggcacactgacgctgcaggacgatccgacgaccagctcgttcctgtcgccgccttcgctggtctcgggcggcggcgggctgtgttcgaccgcggccgactatctgaccttctgccgggcgctgctcaacggcggcgagctcggcggcgtccgcctgctcggcccgaagacgctgaagctgatggcctccaatcacctgcccggcggcgtcgacctgccggcgatgtcgcgttcgatgttcgccgaagccgcctataacggcatcggcttcgggctcggcttcgccgtcaccatgcatccggcgcagacgctgatcgccggcagcccgggtgaattcaactggggcggcgccgcgacgacgtcgttcttcatcgatccggccgaagagctgattaccatcttcatgacccaggtgctgccgtcgagcgcctatccgctgcggcgcgagctgcgcaccatggtctacgccgcgatcaccgagagcaatctctgaccaatgactcttccgcggcgcaggacatgcgccgcggagtttgcaattgccagtcatttcctttggctgacttttccgacttcccctaagtgcaccgcaaacgggcatcgacccggggacatcgtgccgaaactgacattgccagtgcgtctcgcgcttctggtcgcggggacgatgttgccgctgatcgttttcgcggtcgggatcgtgttccacaattaccagcgggatcgtcaggccgccacgcagcgcgtgctcgagacggcgcgcagcatccgcctgctgctggatgcggaaatgcagcgcatgaccggcgggctgcaggtgctggcgctgaccaattcgctgcgcaacagcgacttcggcagtttccgccgcgtcgcggtcggcttcctcgaccagtacggcaaggacggcgtggtgctggtggcggaccgcagcggacgccaggcgttctcctcgctgacgccggacaccgcggacctgccgccgcgcaacaatctcgagatcgtcgagaaggtgttcgcgacccggcagccgcaatactccaacctgttcttcggtcaggtgaagcagcgcctgatcatcaccgtcgaggtgccggtgatccgcgacggcgaggtgctctacgacatctccttcagcccgccgatcgagatcttccaggccatcatcgagaagcagcgcctgaaccaggactggaccatctctatcttcgacggcaacggcgtcaacctggcgcgggtgccgaatccggaagcgaccatcggccagcgtgccgcgccatcgctgtttgccgagatgttccgccgcgacgaagcgacactgccgaccgtctcgctggaaggcgtgccgctgatcacgggcttcacccgatcgcgcgtcaccggctggacggtcgcggcggggatcaccgagaactcgctagtggggccgctgtggcgcacgcttgcgatcaccagcgtgatcggcggcgtcctgctcctggtcggcctcggctttgcggtacggatggcgaccacgatcgcgcgcggtgagctgctgcacgatctgctgatcgaggagctcaaccatcgcgtcaagaacacgctggcgatcctgcaatcgatcgccacgcagacctttcgcagcgcgagccgcgccgagcgcgagaaattcgagggacggctcggcgcccttgtcgaggcgcacaatctgctctcgaccgacaaatggcagggctccgacctgcaggacgtggtcagccgcgtgctgcgcccctatctgctgaacaacaccgccgagcgggtcaagatgttcggaccgcgcgtgccgctgtcgccccggcttgccttggtgctgtcgatgatcctgcatgagatggcgaccaacgccgccaaatacggcgcactctccaacgacaccggcatggtgacgctggactgggaaatcctcgaggaaggcgcagcaccgaagctccggatgatctggacggaggctggcggcccggaggtcgtagcgccagtgcagcgcggcttcggctcccgcctgatcgagcgcagcgcccgcgaccagttaggaggcgaagcctcggtcgatttcctgccccacggcgtcgtctacacggtgatcagctccctcgaaaccggcgattgaccgggccaacggcatccaaacctgcgacaacttggcacgcaagttgctaagataggacgggttcggccggcatgaacaccggcaagaaacagggggaattgatgtcgaccatcgcagctgaagccaccatggcacgcaagccgctctacacatcgctgttcgtgcaggtgcttgtcgcgctgctgctcgggatcgtcatcggcatggccgcgcccgatttcgcgatcgggctgaagatcttcagcgatgccttcctgaagctgatctcgatgatcgtggcaccgatcgtgttctgcgtggtggtgcacggcattgcgggcgccggcgacctcaagaaggtcggacgcgtcggcgtcaaggcgctggtgtatttcgaggtgatgacgacggtggcgctcgtggtcggcttgatcctggcctatctgttcgggcccggtcacggcatgaacatcgacacctcgacactggatgccaaggcgctcggcaactacgccagcaacgcgcagaagctgaagggcgaaggcatcggcagcttcctgctcaacatcatcccgagcacctcattcgacgcgctgtcgcgcaacgacgtactccaggtgctgttcttcgccatcatcttcggcgtcagcctggcgctggtcggcggcgagaagggcgagcggatctcgtccttcatcgatgcggtctccaccgtgctgttccgcgccatgggcctgatcgtgcgcttcgcgccgatcggcgtgctcggcgccgtcgcctacacggtcggcaaatacggcgtcggctcgctgaagcagctgctgtcgctggtggcgctgttctacgtctcggtcgccgtgttcgtgctcggcgtgctcggcgccgtgatggcgctcgccggcatcaacatcctcaaattcctcggctacctgcgcgaggaactgatgatcgtggtcgccaccgcctcgtcggacgcggtgctgccgcaggtgatgcgcaagctggagcgtttcggcgtcaaggattcggtggtcggcctcgtgattccgaccggctattccttcaacctcgacgcgttctcgatctatctgacgctggcggtcgtcttcatcgcacaggcgaccaacacgccgctctcgttcggcgacctgctgctcgtgctcggcgtgtcgctgatcacctcgaagggcgcgcatggcgtgccgggttccgcgatcgtcatcctggcggcgacgctcaatgccgtgccgagcatcccggcgatcggcctcgtgctggtgctttcggtcgactggttcatcggcatggcgcgcgcagtcggcaatttgatcggcaactgcgtcgccaccgtcgtggtcgcggcatgggaaggcgacctggatcgggacaaggcccgccgtgtgctcgaaggcaccgatgcggtggacgtgaccgcgggctgaaccgcacggcagaggaccggcggtgtcccgcgcatcgcgcgggacacgagcgggcttacttgatcagccgcagatacggcggcaactgcctggtcgccggttcctgcaccggctcgtccgacgcgatgatatcgcacagcgccttcaattcggaatccgtcaccttgtggagctccatccgaagctcgaggatcgcaagggacaatagccgcgccgtctccgtattcgcccggtcagtcaggaacccctgacattcctccagggttgcaagcagcgccagcaaccgttcttccgcatttgcgaccggcatatcttccactcccgaagccgcgaggtagagtcgaggtgttcccctcttccgcttcatttggcctctcctgccagagttcgccggcgtttcgtaggcgcacaattgttccagatgattcagaacttttgggcaattgtccagcaacattccgaaagcccgacttggacttacgtcaagttttcgcattggcgacgtttcagtcaagcaacctgagcagctcgccgcgacctctggatgcactagctggggttgcatccatatcaagacgcccgtacaatatagttgcccgtagaactacgggcgcagtgcattgccgcccagtaagcatgcgcgcaaaatctgtgtcgatcaaactcgcgctagttgtggtttggtcaatattttgccaaatgtagagggcggggtgtcgacagacaccttggcgcggtcgacttaaggtcgtcggccgagtcggtactagggtgcttccaacgcgcaaatgcgtttggataccatcccgcgatcttcttggatttcgtagttcggacgaactgacgatccactcgagcttaacgcggtacatcatgaatgtgtccctgacccgaccgggccagggattctcgatttgaaggacgggtcacaagaatgaacagatcagcagcaaagaagatgaagcaacgcagtgccggcaagccggacattgagttgggcaagcggattcgcctgcgccgggtcgagcagaagatctcgcaggccgagctcggcgacaagctgggcgtcagcttccagcaggttcagaagtacgagaagggtgtgaaccgcgtcggcgccgctcgccttcagcagatcgcgagcgcgctggacgtgccggtcaccttcttctacgacggcgacaacaaggcccgcgaagtcgagagcctgctgttcctcgacagtgcgttcagcctccggttgctgcgcgcctatagcaagatcaaggatcagaccgtgcagcgccagctggtgtcgctgatggaatcgatcgccgccaacgaagactgagcggctgcgcaggtacggtcgcgacgccgcgaacgcgatcgaccagggcgagcggattggccggcggccggtcatcggaccaccacggtcgggccaggaagatgtcgaagcgctgccatccgcgatggcagcgctttttcttttttgtctcttcggcaccacgcgagagcgagttccgcgctgatgtgtacggtaaggccgttgcgataccggcaagacggccgcggtcatgcagcggcggcaaccaaaacttaatcaagacgcaacggtctcggcgtagatcatcacctccgaataagcgcaccgccccctttgattcgtgcggcggggccgagttttccgatctttcgcgcaagcggcgcagtccggagaaacgcgatatgcagagacagacactcgtcgtcgtcgccacgatgcttgcggcgctgccggcattcgcccaaaccgccggcgcgcccggtccggctgccgcggtcccacctcatcatgctgtgccggctgcgataccagcggccacccagccgagctcggccaagccggctgcgtcggccacggtcgcggaaacgcgatcggctgcagcgctcgcgttgtcgcacgaaccgacctacgatcagggcagcgcgcagcgcattcgcgaggtggtgaagagctattccgatctcgccgcccacggtggctggcccacgattcccgcggacgcgaaattcgcgttgggcgtccagggcgccaatgacgagctgttgcgcaagcgtctgatcatcaccggcgaccttgccgccgacaagaccaccggcgcctatgatgaggtggtagccgaggcggtgaagcacttccaggcacgccacgggctcgcggcaaccggcacggtgacgccacggacgctggctgcgctcaacgttcccgtgcagaagcgtctcaagcagctcgaggcctcgctggagcggctggaccagatggacttccagttcgggcagcgctacgtggtcgtcaacattcccgcgaccttcgccgaggccgtcgaggacgacaaggtcgtgcggcgctaccgcgtgatcgtcggcaagaccgagaagccctcgccgacgctgacgtcggagatcaccgacgtcattctcaatccgacctggacggtgccgtcttcgatcgtgaagacggagatcacggctcatatgcgcaaggatccgacctatctgtcgcgcatgcacatggacgtgctcgacgcccacgacaacccgatcgatccgcatgcggtcgactggtcgggcaatcacgtgcccgacgtcacggtgcgtcagcagagcggcgcgtggaatgcgctcggcgcggtcaagatcgacatgccgaacgcctattcggtctacatgcacgacaccaatcagcacagcctgttcagcgacgactatcgcttcgactcgcatggctgctcgcgcgtcgacaatgtccgcgatctcgcggcatggctgctgaaggaccagccgcagtggacccgcgccgccatcgatgccgcgatcatcaccgggcagcgtcaggacatccgcatgctcaagaaggtcccggtggcctggatctacctcacggcctggatgacgaaagaccggaccatccagttccgcaacgacgtctacgaccaggaccagcaactcctcgaagccactgcagaggaagctgcgtttttcaacaaggccgccgaacatccgctgaccacgcagtagcgcgcttccgaacggagcgcgacatcgcgagtccgcccgccattgtgtcgcgcggccaattgtcgcccgcgcatcgcgcgacctcacaactcccgcatttcctgcgttgaaccggcatcgccaggaccaagtgcacgtgcctgtcttttttgtcgcagcaaccaggcggccgcatgaacgttttcaggcttcaaccaaggagatttcgatgaatatcaagcttgccgttattggattggtcgcgctcgggagcgcgacgttgatgtccggtgcggcgtcggcgctgccgaacgggcttccgcaggccagccacatcgcaggcgaaacgtccaatatcgacaaggtgcgccaggtctgcgatcgctggggccgctgctattggcaaccgggttacggctacggaccgcgccatcacggatggcatcatcgtccgcacttccaccatcgccacggataccgccctcatggcggtcatcacggtggcggtcatcacggcagacatcgcggcgacggacatcacggcggacaccgccgctgattatgcgagggggcttcggccccctcaccttttttgcagcagggcgccgccagcgcagcctccgacattcgccggtaccgttgctgccgtcaaaacgagcagcgtgacaccttcggcatggaccgcgtgttcgacggccggccagtccatctccggccacaaggctgggcgtcactgcatcgtcatctagccaaatcgaccaaacagggcgttgcatcgcggagcgatagcggcgtagcttgtcgcaacctccgatgacccacgtctaccgacgccggacgaactgaggagcggcaagatggcagccaatgagggcgatcgcttccgcgatcaggtcgcagcgttcctgcgcgcggtcagaaaagacgtcgatgtcgaagttctgctcggccacaagcgggtcgacatcgtctggcgcaggcaggaattcggcaacaaggcgcgggtcgtcgccatcgagtgcaaaaagtattcgcgcgccctgagccttgaacaggttagcggcatctgggccgactacagcgcgctctatgatcaacatctcatcgacgaagtcctgctgatcacaagtcaggatatcagcgcgaccgcaaagggctacgcgaacggcatgcgtgctctttcgtacatgacgttctcacagttgcaggacgccaccctcaatgtccgtgcctacctgcgcagcctcgaagcctcctattcggaggaaggaatcgagaattactatatagcctcgcactgcgatgccggtgtcgaggtcgtcacgcacatatcggattggatgaccgccgaaggacgcccgaccctggccgtgctcgccagttacggcatggggaagacgacgacagccagaaaagtagccgcagagctggccaatgcacacctggaaggcgagcaggttcgaattcccatctatgtgcagcttcaggagatcgttggagagcaaagtctggagggcctgctcggcaaggtcctcgcagcgcgcgcacccatcgaaggttaccacttcgacacattcatgacgctcaacaaagccgggcgtttcctggtgatcctcgatggcttcgacgagatgaagcatgcgatgacctgggacgactttcgcgcgaccttcaaggaactgaaccggctcgtcacacccaacgccaaggtgctgcttctcggcagaccgaccgccttcctgtccgacgacgaagagacgtttgtgttgaagggagtgcgcacgctcgccggccgtcaggttcgagagccggattggccggcctacgagaccaccaggctgctgccgttctcccccgagcagtcgatcatgttcgtgaagagctactcgatgtatcgcaccgaaaacagcgcgacggacgaatacatcgtggaccgtgctgagctggaaagacgcaccaagatactcgagctcaacgacttcggcgatctgctttcgcggccagtccaagccaaaatgttctgcgagatgtttctcgaccggttcgtcgaaccaaagccctatttgaccggagagctgtacgaagtattcgtcacgcggatcatcgagcgcgaaatcgacaagcgcaccagatcgccattcgactacgctgaccggcggaagttcgccgaagcgatcgcctggtggctctggatgacagcccaaaccatgagtgtcgatgagggcgacatccccgatgagatcgtgcgcccgttcatgccggcgtccgacgccgatctggatgccgtgaggcgcgaccttgtttcggcgtgcttcctggatcggaagggcaacaagaccttgttctttccccacagatcattccaggagtttctagtcgcaagttacgttgtcacgaacaagattgacgacatgaacctggtggcgaccgcagtcacccgggacgtcctgaagttcattgccgagtcaccggacagttcggcgactttcaaactctggcacgaagccctgcttcacttctccggcgcaatgccgctgcatctcctgatcgacattgccaaatccgccgtcgagcgagcagcacaacgacaacgggtgcagtgtccgtgggatatcgtcctgcaattcctcacctcggtcagaggcgacggtgccggcgaaacgcgtgtcgggctgatcgccgtagatcatattcgcacgtcgctggacttcttttccgatccgcagcgccgcctgatctgcatcgacgccttcctgatcgcattgacccttgccgagtctgacacccaatcggtgatatcaacccatatcttcggagctcttgtgatccagttgcggatagagctcggcgatatgccgggatcagcagtggatccaaggttctcgctcagtcgctacatgagccaggcggagtccgacccgtattatcagatactgaagaaggcattcaccttcaccgaagcgcgagacggaacaatagaggcaaagtacataccgcttgaactggcggccgcagtccgcgagcggtatccttcatatcgcgtcaaggacatcgacgggttggaacgagtggccaaacagaccatcagcatttcggccgaccgcccctatccgcacgtgacgcaaattcgattgaggagagcactgtctgctcttggtgtccggacctagagcatgacccggaaaagtggaaacccggtttccgaaaggatcatgctctagagcgacgccagaactgcccgcgcgacatcggcggtgccgttgctgccaccaaactcgaacggcttgataccgccggcatagaccttgtcgaccgcgcgctcgatgttctcggcagcttcagcggcgccatcgagaccatgcttgtcggctaaccagtccagcatcatcgcggcagacaggatcatcgcggtcgggttggccttgccctgccccatgatgtcgggcgcggtgccgtgacatggctgaaacacagcgtagcggtcgccgatgtcggctgacggcgccatgcccatgccgccgatcaggccggctgtgagatccgacaggatgtcgccgaacatgttctcggtcaccatgacgtcgaagtcccaggggcgcttcaccagcgccgccgcggtcgcgtcgatgtagaggtgatcggccctgacatcgggatggcgcttggcggtctcgtcaaaaatgccgcggaagaacgcgaacgccttgaacacgttcgccttgtcgacacaggtcagcccgcctccgacgcggccgcgcgccttgcgacgttcggcgagccggaacgagaactcgaacagccgctcggaggtgcggcgcgtgatcaccatggtctcgcgcgcctcgctgtcggtgaccacccccttgcccatcgaggcgaacaggccctcggtcgattccctgatcacgacgaggtcgatgcccttttgatctgcgccgacgatcgtgctccttacgcccggaatcaatcgcgcgggccgaacgccggcatagagatcgaagatcacccgcagttcgatctgcggcgcgatctcggtgttgtcgggatagcgcaccgacggcaggccacaggcgccgagcaggatcgcatcggcctcctcgcacagccggatcgtgctttccggcatcgacctgccggtctccttgtaatggccagcgcccgcaggcgcctcagtgaagcggaatttgaggcccaccgaggcctcgatcttgcgcagcacctcgagcgccggcgccatcacctcggggccgatgccgtcgccgccgaggactgcgatgtgaagggcgtcgttggcggacatggggattcctcaagacaatgagagaagaccggtcattgcgaggagcgaagcgacgaagcaatccacgtcgctgcaatcggagagatggattggtacgctttgctcgcaatgacggaggcgtttattgcggcgtcaataccgcacgtccgacgagctggcccttctgcagattggtcagcgcctcgttcgccttcgcgagcggcatcggcgtcaccgggatcgctggaatcttcttatcgcgcacgaggtcgagcagctcctgggtctcgcgcagattgccgacatagctgccctggatggtgaccgccttgatcgggatcagcggcagcgcccaggtcgcgccgccgccgaacaggccgacgatcacgagcttgccgcccttggtcaggcagtcgaagccgagctgcgaggtctgcgcgtttccgaccaggtcgatcgcggcgcggatcggctggccggccttcttgataagctgctccagcgcgtcgggggccttgccgtcgacggtcgcgagcgcaccggcagcctccgccgcctcgcgcttcctggcatcgatatcgaccacgatcgcgcccttgccgcccatcgccttcagcagcgacagcgccatcaggccgaggccaccggcgccgaagattacgatcggcgtgtcgaggtccttctcgaccttcttcagcgcgctgtaggtggtgactccagagcaggcgtagggcgcggccgtgaccggatcgagcccgttgaggttgagcagatatttcggatgcggcacggtcatgtgatcggcatagccgccgtcacaatagacgccgagcgcattcggcttgatcgcgcacatgttctcgtcgccgccgaggcaggtcgggcattttccgcagccgagccagggataggccagcgcgacatcaccgaccttgaggccgcctttgtcggcgtccttgacgtcggggccgaaggccacgatctcgccgaccgtctcatgccccatcgtgcgcggcagcgagacgccgcgatctttcagcgacagcggcttgcggccatggccgagatcatagccgccctcccagatgtgcaggtcgctgtggcagacgccggcggccttgaccttgatcagcacctgcgtgcccgacggctgcggtgtcggctggtcgacctccttcaagggggcattgaaatcgacgacctggaaactcttcatcgctgttctcccgaagcttgttgttgcggcggaccttgccacgcctgcccgcccgggacaaacgctgatgaccgcattttcgagcaagccgccatgcagcccgctcgaaggccaagacgcaccatctgtgggcgtcactcttcagatcagtggatgatggcaggccgcgaattggccggtcgcgaccagacgcagttccggcacctcgctggcacagcgcgcatcggcgcgcgggcagcgggtgcggaagcggcagccggagggcggcgcgatcggcgacggcggctcgccgaccgggatgctccgggtcgggcggacgtccggatcaggcaccgggatcgcctcgatcagcagcgcggtatagggatgcgccggccgcgcgaacagctgctccgacggagcgacctcgcagagccggccgagatacatcaccgcgacgcgatccgagactgccttcaccaccgcaaggtcgtgcgcgatgaacagcagagtcaggccgtagcgcgccttcatctcctccagcagattgaggatctgggcacgaattgaaacgtcgagcgcggacaccggctcgtcgcagatcacgaattccggattgagcaccagcgagcgggcgatgcagatgcgttggcattgtccgccggagaattcgtgcggcagccgtccgctcaccagcgcaggatcgaggccgaccgccgccagcacctcggctacccgccgcttgcgctcctcggggtccttgacgcccgcgatcaccagcggctcggcgacgatgtcgccgatccgccgccgcggattgagcgaggcgatcggatcctgaaagatcagctgcacgcgccggcgcatccggcgcagcgcctcgcccttcaaagtggtgaggtcgtggccgtcgaacagcaccttgccggaaaccgcctggcgcaactgcaggaccgcgcggccgagcgtggacttgccgcagccggattcgccgaccagccccagcgtctcgccgcgcgcgatgtcgaggctgacgtcggagacggcatggatggtcttcccgcccaccgaatattcgacgacgaggttctccaccttcatcagcggattgggtgcagcctgcagcatcatgcgccgaccctcgcggtgatcggatggaagcaggcgtagagatgttccgatgtctccgccgggctcagctgcggcttctccgcgccgcagcgctcggccgaatagcggcagcgcggcgcaaacgaacagcccttgagcggccgggtcggatcgggcggccgccccgagatcgccggcagcggcgtatgcggcgcgacgtcgagcttcggcagcgcggcgagcagcgcctcggtgtagggcatccgcatctgcttgaacaaggcgggcgtcggtgcgcgctcgacgacgcggccggcatacatcaccgcgacctcgtcggtgcggccggcgaccacgccgaggtcatgggtgatgatgatcatcgccatgtggcggcgctgctgctcgcgggccagca

(The sequence listing continues in the following parts.)
